United States Patent Application Publication US 2024/0093182 A1 - sequence listing, part 4

SEQ ID NO: 6856 - DNA, 1965 bp, Artificial sequence
  DNA replication origin
tagtgacaggtggccatactaccatgtgatggttgccccaggctgggcctggagagctgcagatcattgactctgaagatggaaggctccatgaggctgtgggaagggcccgcgcgtttctggggaagggaattgcagatggcaaggctggtgatgcttgtggggcgggccctgagtgccatcgaggcgcctggaccttctcccgggggcagccgcggcctgaacgtgtgggggcgggctcgcggaaaggctggcctcgactgggtggggctccggcgttggcgcatccgcctccggccgccagggggcgccgccgcccgtgctctgccctgcctggctggtcacagaggctgacgtcagcgggtcccgcggaggccgctggacacaaaggcagctttgtgaggcggcgacggctccgcggccgccccaggacagagcggcctgggcagagggcgggccggggtcggcgccgcggaggcggggagggagggagggttggagggttgagccagagacccgggaccccgtccccgcacacctgccagtgccccgtagcttcggccgccggcactggcaggagatgaaaggctgctgccgcccggtcggaaggacatcggcgccccccaggcccggtccccgccccagttcctcgggcctttcctgctgcccctgcctgcgagggccgacgacacggagaacaggatcctgcgcccaacccaggtccccgccttctttcagaggcccaggcctggaccccgctgagccgcagatgtgcgagcaggagcgccagagccccgatgcccgcccagcaggaagcgggcgggagatggttccttccttctgtcctgagggggaaccctgcacagagggaccattgagggcctggcattgtctgcctaactcacccagtgcctccctccctgggtgggccatgcggggccttgacaggattgccctggtgccgtcttggcagtgggtctgggtgggatcctgggggcagggcttccctgagtgcagacagctaggcctccacctgccccggcctcccacccaggctcagatttccagggcataaggctccattgtcccagcactggtggaggcggcctgtcaattcagccttgtgtttggtggttgggaaattcccagccatggggggctgcaggcaggaaggggctgcccaggtgtcctgcaccccaactgaagggactccatgaggttggttcctgggcatcccctgctgcctggagctgtcccaggctggacctcaaccattcatcaaccctcaggagcagttgggtgaggagcaccagaaattcaatgctccctggcgctgcatccccagagccctcccagcctaagaagccccatctttctgtctccacgcatggagaactgcagctgtgaggcccaggacccttagcaggacatgcagagctgggcagggacccaggctcatgctcccagcgtggggtgagttgtctccagcctgtggagactgccatgaagttgatctgcctcccagagggcctggcccacttgaaataattgctccggctactgatgtggtgggaactttggtatttttaacccatttggggggtgggggagcagctaggaagagagaggcaagctttcagagtcagagaggcctgagagaggagagtagagggaaactcagtgaggaggagccaggcaggctgcctcggtagttccccaggcctagacaccccccctgtaccaccccctgtcccagcaggtaggtgcagacctagatgccaggtgcagaagggggaaagggccctctccagggttacagcagggatcaccgaggctgcaggggctgccaaggcctggaagaagtcccatgttccagggagccccatggcttctgatgtcaggaaaacttagtcctctcagttccccagaatcatttcaccccaccccacccaaactgagtggcaa

SEQ ID NO: 6857 - DNA, 1672 bp, Artificial sequence
  DNA replication origin
gagcggggctcacactccagaaaggcgctgctgccctccacgccgaacaccttgtgttccagcagcgcgggacgagacgagtcttggggcgagaagaaagtcagatttaggcaaggcagggcaggtggggcgtcttctggggctgagggtaggggcagctggggcactcacctccggagcacaacgtgctggggtcgccattccttacgtcttgccgccggaaccgcctgtggggaacatccgatcttctgtgagcccttctttcagccccgggcagtgaaagacccttcgcctccctcccggcggcccaaccccgaccccgcccacctcttggcactgggctggaagcgcgtgcacgcgaccccgtcccaggcgcagtaggggtcacgcgccagacagcattcggtgcagacgcggccgtgggcagcgcagcggtgcaacgcgatctgggccaccgcgctccgcgaggctacgtacagctggtgctagggggcacgaggggctctgggctgaccgagggcgaccccacgcctgcctcccatcggtcagggatcccttcttccactcgacagatgggaacactgaggtcttacgcctcaggtcacacagtctaacaaagccagagcctgtactcaaacccgggactgcaaactaccaaaaggggccagaggcttgggacgcgccaggcacaagctcagtccatcccaccccgacccccatcctggtcactcaccctcttggaagaaatttgcatgctggtgacagcggccgagtcctgagagggaggaggggcgacggggtcagggcttagtggggtgggggggtcccgggcgactgggggtgaggcctcacctcaaacacgtgcagctcctccaggagcagcccctctgcgctgggcctactgcccttggggaccgagatcaccttcagcaccgtgccaacgtctgcagggatgagaaggggtaatgaccattggtgctcccggacagctggggctagtgtctcctcgcctttgaggcgtctaccctcagcatgtttgggttgtgaagagtgtggactggaagagtgtgggttgggcagcatccacagggtggagacacagcccaggaaaggatgtggagatgggactgaacagggagagcttccatcagcagcccacagggcctggctgggagcctgggggtcgctgtggagggaccctgacctgtgccaatgaagaggacgtcatagtgtccgtcagcggctgcaacccggtccgcggcaatttgagtgaaggtgtaattggctccaacttgtaggaaaagagggcgccccccagtgggcaggacagagttgtacatgagggggtggttccgcgcaaactggatgacatcgtctgggaagtccttggtggaactgaaggtgccaaaggtcttgctggggcactgggggtgggggaaagggaggcacagcagggatatagatatgggggcttgataggcagccctccatgcccagcctctgggaacatggagggggatggggacagaaccctgccctgagaattagagaggagatcagccttgccctaggaagtcagaggcgggaaacaagccttgtcttatgatggaaacgttttcccacccataactaaaggaagaaaccacattcaccaagaagaccccaggccaag

SEQ ID NO: 6858 - DNA, 1283 bp, Artificial sequence
  DNA replication origin
cctgtcgtctcctgcttggttcccggcgtggggacagtctggtcaccagtgcgttgcgctgcgcggcccccgctcagcgcgaggctcaggggcgtgggtcctccggttacggccctttctccgcgactccaggggcagtgactgcagcgcaggctgcgggcggcacatgcgcagggagttcgcgctgccacctccgcccggctccaccagctgcagaaagtcccggtaccagagtttggggcccggcggcgcggcgggcgcagcctcctcggcccgcgccagtcgttcggcctgcgtagcactcaacacgtgcagcgacaggcgacgcagcggttgcgtaaagccctgctcgacggcggcgcacaagtacacgcccgagtcccggcgccgcagcctgcgcagcagtagtccccgggcggtgcgctcggtgcgctcctctgccagcacctgcgggcagagggcagcgtgaggcgggggtgtcgggccgggaacagggcttccgggccctagcacgcgacggaagaagcaaagagtcattgggagccgaggtggagcgggaaaggggtgcccgcaggcgcacattttaaggctgagtgtttgggagctggtggtcttcaagggagaatccgaaagaggcggggtttacatgaacttggtggggggtggtcagggaccttaatgggagggtcgagggcgggtcttctccttgattcaggggaggcgggtcgggagccccgttggacgcaatggggcctcagcagcttgtggagtgcaggtgagggaccaaactggacagggcggggagtgggtctggttggacggggcttcgttgggtagggcggggcctctcctggatgcagggggtgggacaggagcctggcggggagggcggagtaaggctcacctgggtgtgggctgtcacccctgcgcgctggaaagtccactccacgcgcgcctgcagcgagcggggctcacactccagaaaggcgctgctgccctccacgccgaacaccttgtgttccagcagcgcgggacgagacgagtcttggggcgagaagaaagtcagatttaggcaaggcagggcaggtggggcgtcttctggggctgagggtaggggcagctggggcactcacctccggagcacaacgtgctggggtcgccattccttacgtcttgccgccggaaccgcctgtggggaacatccgatcttctgtgagcccttctttcagccccgggcagtgaaagacccttcgcctccctcccggcggcccaaccccgacccc

SEQ ID NO: 6859 - DNA, 1605 bp, Artificial sequence
  DNA replication origin
cgtgctagggcccggaagccctgttcccggcccgacacccccgcctcacgctgccctctgcccgcaggtgctggcagaggagcgcaccgagcgcaccgcccggggactactgctgcgcaggctgcggcgccgggactcgggcgtgtacttgtgcgccgccgtcgagcagggctttacgcaaccgctgcgtcgcctgtcgctgcacgtgttgagtgctacgcaggccgaacgactggcgcgggccgaggaggctgcgcccgccgcgccgccgggccccaaactctggtaccgggactttctgcagctggtggagccgggcggaggtggcagcgcgaactccctgcgcatgtgccgcccgcagcctgcgctgcagtcactgcccctggagtcgcggagaaagggccgtaaccggaggacccacgcccctgagcctcgcgctgagcgggggccgcgcagcgcaacgcactggtgaccagactgtccccacgccgggaaccaagcaggagacgacaggcgagagaggagccagacagaccctgaaaagaaggacgggttggggccgggcacattgggggtcaccggccgatggagacaccaaccgacaggccctggctgagggcagctgcgcgggcttatttattaacaggataacccttgaatgtagcagccccgggagggcggcacaggtcgggcgcaggattcagccggagggaagggacggggaagccgagctccagagcaacgaccagggccgaggaggtgcctggagtgcccaccctgggagacagaccccacctccttgggtagtgagcagtgagcagaaagctgtgaacaggctgggctgctggaggtggggcgaggcaggccgactgtactaaagtaacgcaataaacgcattatcagccaaagctggaatggccccagcagaaaaccccagtcctcggccttgctatgtggtcttgggcaccttactagcggtgtcagggcccgagtttctcctgtccaaggttgcctggtgaggattaaaggtggttccggccaggcgcggtggctcacgcctgtaatcccaacactttcggaggcccaggcggacggatcacgaggtcaggagatggaaaccatcccggctaacacggtgaaaccccgtctgtactaaaaatacaaaaaattagtcgggcgtggtggcgggcgcctgtaatcctagctactcaggaggctgaggcaggagaattgcttgaacctgggaggtggaggttgcaatgagcctagatctcgccgctgcactccagcctgggcgacagagcgagactccaaaaaaaaaaaaaaaaaaaaaaaaaaaggtggttccgcgtgactgaacaggttctgtagggcctttgggaatagtgacacgcagggtacattgtgcataatataacttcaggactaagtgctaggaagaaaataaaactggaccgggcgcagtggctcacgcctgtaatcccagcattttgggaggccgaagcagtcggatcatgaagtcaggagttcaagaccagcctgaccaacatggtgaaaccctgtctctactaaaaatacaaaacttaggtgggtgtgatggcacgc

SEQ ID NO: 6860 - DNA, 756 bp, Artificial sequence
  DNA replication origin
actgagtggtgtcagccccagacttaggactcagggaggcctggggggaagtgcttctgggtgagtcctgagaggatggagaagagagcaagttgtacaaagacctggcagctggagggaccccagcgcagtggagtgaatgagggaaggctgggctgctccggcaggtagaatagtaagataaaatgggagcaggctgggcgtggtggctcacacctgtaatcccagcactttgggaggccaaggcaggcagatcacctgaggccaggagttcgagaccagcctgaccaacatggagaaaccctatctactaaaaatacaaaattagctgggtgtggtgtcgtatgcctgtaatcccagctactcgggaggctgaggcaggagaatcactggaacccgggaggcagaggtcgcagtgagccgagatggcgtcattgcactccagcctgggcaacaagagcaaaactctgtctcaaaaaaaaaaaaaaaaaaaaaaggtggcggggagcagaggccagtgcgcaggctggactttgtcctgcagatgaggggtgtgagtagttcttagaagtagggccagcctggtgatcacaccctgtccaaaactctgccacagcagccaaccttgccaatgtcagcccttggccctggacagaccccacacacaggagtgcaccagccctactgaactgacccttggctttggtttttcatctctgagagggacaccattctatcttttgggattatgaggtc

SEQ ID NO: 6861 - DNA, 1044 bp, Artificial sequence
  DNA replication origin
ccgcccgccgctcatacagctgtcccgcgccccccaccccactcacctcctccacggcgctgaccacccttccggagcgtgttgcccttacgggcgcgaggcatgccgggaaccgggcgcggggggcgcggggtcagggacccggtgggtgtgggctccaggccaacgagacgccggccggtgcgctgcgctgagacttggccagacgacgggagccacacgccacgcgcgccaccatcttcgcgaggcgccccgccctgccaaacaggtcgccgggaaggcgagttccaggccatccgattcaggcccacatccacgaggctaaaactactaatcccagaggcctgagcgcgcaggcgacggcggctagctgcgcgtagagcaccatgggaatggtagtccacgcctggggcccaccagccgacgacgcgctggctgaactatgcacccacaatgccctgcgcgcgccccagccccgcgtcgggaacaagtgcacggtggttaactccgaagcgtccctcagtggagcaccaaggcaggactggcttctcagggcacttggcagcgggacactccagacgagacctacccctgcctgggtctggggaccatgggaagggcttagagcttgggataacaggagcaacagccaaacctcaggcagtggaaaaaagtgactttatgatgaaagagtgcagacaacagcttagcactttaccgaccttcgccaagattttttggggcccatctgcccgtgcacggcccatctgtgacctctccatgggcttagtgaggtgtaggcacaaagccctaggctggcagccctaactagctggaacctgactctccctggaactgcttccttgccatggaggactcacatgatctcagagggcctctggttttataagcgttttttctggccccttctacccctcagggattccaagggaagcggggtgtgtgcttgggagggttgactgtaaactgaatagagcaagagtgggacagagtagttccaggactggaaaagtggcagcaggg

SEQ ID NO: 6862 - DNA, 832 bp, Artificial sequence
  DNA replication origin
tatggggcgccccctcacattttgatattgtgtctccagcaggctttttgaagggggccctgatggaactgggggtgagatggtcaggcactcaggtaggggagggggtggtggcaatggaggtcccttgggaccccttggggcagcttgggcagtcaggtttggggccttcctgggtggccggggagagggggctgtggggaaggcattaagcagggtggcaggcagccgtctgctggtgaagaccaggccctgcacaggctcacccagctggtagcccaggtgggtatagaagtgcacctggtcatgggtggtgagatgcagcttgcggaagccccgggcccgagcaaagacctccaggccctccatgaggcggcggccaaagccacggcccctcagggcccgggccaccaccactgtctccactaagaggctctggggctggttcagcacccgtgacaggcgggcatggcccaccacaacgggtgctgcttcaagtgtggggtgggggcttagcagcatcaggcagagggggaaggcatctgaggactggcccagggagtgcaggcgggaggtgcggctgcggggccactgatcattgatgaggtcagcacaagcatccaggagctcgggtcggcggtgcacaggctccagggtcaactcagccaggctaggagctggggtctcctctggctggtgttcaggatccagggtaagctcagttggaccaggattgaaggtcatctctggttggcatgtggaatccaggggcagctttggctggcacgcaggatccagagtcagctcagctgggctggtactcaggatcagc

SEQ ID NO: 6863 - DNA, 1090 bp, Artificial sequence
  DNA replication origin
atccgggagggaggtgggggggtcagccccccgcccggccagccgccccgtccgggagggaggtgggggggtcagccccccgcctggctagccgccccatcccggaggtgaggggcgcctctgcccggccgcccctactgggaagtgaggagcccctctgcccggccagccgccccgtccgggagggaggtgggggggggtcagccccccgcctggccagccgccccatccgggaggtgaggggcgcctctgcccggccgcccctactgggaagtgaggagcccctctgcccggccagccgccccgtccgggagggaggtgggggggtcagccccccgcccggccagccgccccgtccgggaaggaggttggggggtcagccccccgccccggccgggagggagttgggggggtcagccccccgcccggccagccaccccgtccgggaggtgaggggcgcctctgcccggctgcccctactgggaagtgaggagcccctctgcccggccaccaccccgtctgggaggtgtacccaacagctcattgagaacgggccatgatgacaatggcggttttgtggactagaaaggtgggaaaggtggggaaaagattgagaaatcggatggttgccatgtctgtgtagaaagatgtagacgtgggagacttttcattttgttctatactaagaaaaattcttctgccttgggatcctgttgatctgtgaccttacccccaaccctgtgctctctgaaacatgtgctgtgtccactcagggttaaatggattaagggcggtgcaagatgtgctttgttaaacagacgcttgaaggcagcatgctcgttaagagtcatcaccactccctaatctcaagtacccagggacacaaacactgcggaaggccgtggggtcctctgcctaggaaaaccagagacctttgttcacttgtttatctgctgaccttccctccactattgtcctgtgaccctgccaaatccccctctgcgagaaacacccaagaatgatcaataaaaaaataataattaaaaaaaaaaaagaaaaaaaaaagaaaagaaaccacagtggccgattg

SEQ ID NO: 6864 - DNA, 1172 bp, Artificial sequence
  DNA replication origin
cttcccagtaggggtggccgggcagaggcgcccctcacctcccggatggggcggctggccaggcggggggctgacccccccacctccctcccggacggggcggctggccgggcggggggctgatcccccctcccctcacggatggggtggctggccggccagaggggctcctcacttcccagtaggggcggccgggcagaggcgcccctcatctcccggacggggcggctggccgggtgggaggctgtcccccccacctccctcccggacggggcggctggccgggcggggggctgacccccccacctccctcccggacggggcggctggccgggcggggggctgacccccccacctccctccaggacggggcggctggccaggcggggggttgacccccccatctccctcctggacggggtggctgccgggcggagaccctcctcacttcccagacagggtggctgccgggcggaggggctcctcacttctcagacagggcggctgctgggcggaggggctcctcacttctcagacggggcggccagggagagacgctcctcacatcccggacggggcgacagggcagaggcgctccccacatctcagacgatgggtggccgggcagagaggctccgcacttcctagatgggatggcggccgggaagaggcgctgctcacttcctagatgggatggcggctgggcagagacgctcctcactttccagactgggcagccaggcagaggggctcctcacatcccagacgatgggcggccaggcagagacgctcctcacttcccagacggggtggcggccgggcagaggctgcaatctcggcactttgggaggccaaggcaggctgctgggaggtggatgttgtagcgagccgagatcacgccactgcactccagcctgggcaccattgagagactccgtctgcaatcccagcacctcgggaggccgaggctggcagatcactcacggttaggagctggagaccagcccggccaacacagcgaaaccccgtctccacccaaaaaatacgaaaaccagtcaggcgtggcggcgcgtgcctgcaatcgcaggcactcggcaggctgaggcaggagaatcaggcagggaggttgcagtgagccgagatggcagcagtacagtccagcttccgctcgg

SEQ ID NO: 6865 - DNA, 824 bp, Artificial sequence
  DNA replication origin
gagccgagatcacgccactgcactccagcctgggcaccattgagagactccgtctgcaatcccagcacctcgggaggccgaggctggcagatcactcacggttaggagctggagaccagcccggccaacacagcgaaaccccgtctccacccaaaaaatacgaaaaccagtcaggcgtggcggcgcgtgcctgcaatcgcaggcactcggcaggctgaggcaggagaatcaggcagggaggttgcagtgagccgagatggcagcagtacagtccagcttccgctcggcatcagagggagaccgtggagggagagggggagggggagggggaggggagggggagggggagggggagccactgcaatcggccactgtggtttcttttttttttttttttgagatggagtctcgctctgtcacccaggctggagtgcagtggcgcgatctcagctcactgcaacttatgcctcccaggttcaagcaattctcctgcctcagcctcccgagtagctgggactacaggcgcttgctaccatgcctggctaatttttgtatttttagtagagacagggtttcaccatattgaccaggctggtctcgaactcctgaccttgtgatccggccgcctcggcctctcgaagtgctgggattacaggcgttagtcactgcgcccggccctagctgtggtttcttaaaagcgtgtcaactaaagtcagacaacttacacttcagaagaaagtaacagtaacctgtttatgtacatacataagccactttcatacctgcctaccaatgtatggacttcagagtaatgtggcctatat

SEQ ID NO: 6866 - DNA, 1071 bp, Artificial sequence
  DNA replication origin
tcttcgagcccgaaacgaggcaccggcaccgagaaaggtggaccacaccttcccgccccgtccgcaagtccaatcccgggcccacctccgcactggagtcttaaagggccagcgtgcctgggggcggagccagcagaggcgctgagccgggccgcgcctgggcgaacggccggagcgggctgggctgggcccgggatggcggtggccctggcgccggtcccggtggcgccccgcgcgaggtgagggcgggcggtgcaaacctggcggctctctccccttgggctggggtctgaatccccgggggtgctcgcggagaggcgtcccagaaaccccacccccacccgaccgggcgcaggccccacgtgtggggcgggggcggggtcccgcacaaagacccggcggagcgcgctctagccctgagcggccgggcgggggaggcgagcgcgcgcattcccggtggcggtggagggaagggccgggcggccggcgccgccgtgggaggtccgctgcccctttgtccctacggggcctcctccaagccgggagagtgtcagcgctcgagagaaagtccggagagcctcactcttctgccgggcgagtgttacacggatagaagcctcccggcagcgttccttccagtttcgtagcctcttgacgagctgttccctgctttacccaaatgctgtcgtttctctggatcaagggttcttcacggtgtacagggtgggcatcagctgttcagggttctctgaaaccatgtactggatggtatgcaggcatatatgtgactctggtgagcccaaattatctagttcttagaagggtcacagacctaatagagatttgtgccgagccacaggctacctgctccagaaaagagccctgtgcttctggcagtgagttcccagggtgccttgtctgccctgcagtggcctgtggtctctcaaacctattacagccatgagcacagtgcccccacacagcatgggctttgggagcatagatgggcttgaggtgggcacttccagtattccctagactgacttgttctccccaacccttcttccagtt

SEQ ID NO: 6867 - DNA, 1606 bp, Artificial sequence
  DNA replication origin
cccagcccagcccgctccggccgttcgcccaggcgcggcccggctcagcgcctctgctggctccgcccccaggcacgctggccctttaagactccagtgcggaggtgggcccgggattggacttgcggacggggcgggaaggtgtggtccacctttctcggtgccggtgcctcgtttcgggctcgaagagccccaggtcctctgcagagggacgtggccgcccatttaggaccctaatgcccctctgagccgggctttctatgggagtctcagccacgagcgccagtcagcctgaaatgtttcccctgcagcccgaggccggtggttcagtcctcccagctccgcggcgccgccagccctttaaagagacagtgtgagggacaaggcagggggacgggaagggggggggggggaataggaggaggcgttgccccgttcggccatcaggaggtgctgtggtactccgaggttggcagggggcagcaccagatctggctctgcaccccctaacgtagacgccagccgtgggtcccctttgtgtggaaaaagggactttgacctgaggcgacctctggtctcctggagagtagtgccccgcctcccacgaatcaggggcccccttctctggtccgccgtctaaagggaggccccgccccctgccagactgagggaaggggccaagcaccgcttcttagccggcccaggaagggccgaggcagtcgttatcctggcagcccggctctgggtcgcggcgtggccgcagggttggggtcagggaagctcagaggggtctaggaggttggccgcccctctccctgactcgcatcagggcgggacagtcatccctgagatcccgtccttttctgcccagtctctgaggtcctttgggagcccggctccctctcaaccccgaggaggcctccattccttgcagcagtttctggctggacctccgagaaagccagcaagaggggtctcccagggcctccatcccgtatccagcgccccctacgctccacaggcctctcccggtggggggcaggcttagaccctggcgagccccgtgcgaaaccacctcggctcttcctaggtccgctcccttgtgcgagactcaactcccaaaagggcccgcgtctgcaccaccagcccctaaccctcccgggcgccaggagagggagggagtgcaactgcgagcgcatctgtgggggtgcagaccagccgtctgctctgggctcacctgtgtgggagtccgtcggcccagtaggtcggtggcctccctccttcctggggtgagcctctccagctaggctacttgcgccagctgctgcccgttgggcagctcgccgaggacttgataaaccccattccctcccatccgctcccgcctcccatcccagccctttctcctcacttcctgctgccccctgagaggaaagggccaggaacaggcgtgggggaggagatcgccttgaccctgtttccctccagaatgccctgctggctggctgccctccccacccttcccgagtaggatctggccccgccagctgcgccaggtgacaggaaggctatgggctcaggatcaggtgccaatctcccccacacc

SEQ ID NO: 6868 - DNA, 1255 bp, Artificial sequence
  DNA replication origin
agctagatcccggcgatctacgtttcagtcttaacggttgcggcgcggctctggcccgggcgcacgcgcacactgacacgcgtacacgcacgcacgcgaccggggcggtggttggcggctacggacgcgcaggactgggggacgggcgggtacggctatgggcgaggcggaggcgccttctttcgaaatgacctggagcagcacgacgagcagtggctactgcagccaagaggactcggactcggagctcgagcagtacttcaccgcgcgaacctcgctagctcgcaggccgcgccgggaccaggtgggagccagggggtgccggcgggcgggaggggaagcggtcgctggagctccgccctccccggtccgttgccgcgtcctgggtcggtgggcagccccaccctcctggctacgtggctccccgcgggtcctggccggggacctgcccgcggaaccgtgcgtaagaccccgattccaccgcctagatgctgggtgccggggcccccttggtttctgtcacagacaggttgaacacggaaaaagcagctgtatggcttgtggtagacctgagccgggcattatccagctatgactaaagccgaccgagcagtttggactagcacctcgatttccgcgttcgaatgctcctgctccctccttggggagactaggggaggatgtggagagggaagagtcctcgccaggaattgagaagtatgtttaggaaaacttgagaggcagagagagatcctgctcctccatctgcactcctgtatggagccagctgagccctcacctcttccctgttctggcctgtcaccagctgctggaatgtggaagattctgttcccttcctctagggtggatctggagaaagatttgggaatagataggaaagaagtcttgttttggaccataagcattcaggagcactttacccacaggaagggggaaagctagattataaaatgcctaaagaggtggaaaaagagatccaggttactaacccaggactgtaaggtgtctcggaacctcctaggtatccccattatcggagaactgtgtgccagatgccattggtgtgaccaccaggctcagagaaccaggcctaggcaccaggaaaaagaaacagggactgtgaagctcagtatgcctggcagaaatggggcggaaatccttatttaagtaaagaaagtggagttgtgagtgatgcttcagataaaattttacaaaattccttacaaaatgggtg

SEQ ID NO: 6869 - DNA, 861 bp, Artificial sequence
  DNA replication origin
ggggtgagaatggagaatggaacactggattccatttggtagtacacagatcgctgaggaccctgtcccgggcagtttcctggaggaagaggcaagcctggctggagtgggtagaggggagagtgaaggcgaaggattagagtgtatagagaccagtgtcttggtctgaggggagtagagacaggtgacaaccacagggcagacgtaggttaaaggtgtttagtttttccttcaagtaaatgggcagatgtattccatatacgttcccagtgaagggccgggtgcggtggctcaagcctgtagtcccagcactttggaaggccgaggcgggtggatcacctgagatcaggagtttgagaccagcctggctaacatggtgaaaccccgtctctactaaaaatacaaaaattagctgggcatggtggcgggcgcctgtaatcctaggtactcaggaggctgaggcagaagaatcgcttgaacccaggaggcggaggttgcggtgagccgaaatcgcgccattgcactccagcctgggtgacaaaagcaagacgcagttttttgttgttgtttttttaattgccaatgaggaaaggggaagttctgtgctaggcgatagagatccaactgttgagcaggcctctctgcctgtggccttccggccggtttccagacgcccaggtggccaacattagagtccgcgtagcagtgtgaggtaacccactgagataggtcgggcctgcggagcctggcgagcagcggccctctccctggggcttcccttcaatctccgggacatttccccgacctggagctcctccgcctcaccgccaggcctctctgcagattgcaagttcacctgcc

SEQ ID NO: 6870 - DNA, 1250 bp, Artificial sequence
  DNA replication origin
cactgctctggcctatttaggaacttgtggatggatagtgtcccaggtctgtgtgtgcatggagaccctctcatccggtacaagaggacatcacaaattcagctggggggagcacaaagttgtgacagaatgcaaagaatgaacaaggggccgagcgcggtggctcatgcctgtaatcccagcacttcggaaggcggaggcgggtggatcacctgaggtcaggagttcaagaccagcctggccaacatggtgaaacctcatgtctactaaaaaataaaaaaaaatgagccaggcgtagtggcgggtgcctgtaatcccagctactcgggaggctgaggtgggagaattgcttgaacacaggaggcggaggttgcagtgagccgagatcgtgccactgccctccagccttggcgacagagtgagactctgtctcaaaaaaaaaaaaaaaaaaaaaaagaacaaggctgggacattgcagcgttctcaaagagaaataaagtagccatggagataagaagcaggatgatttgggcatgtttatcagaggtagagacaagggagaaatcaaagataagtttgggcttttgtctccagtaactgggagcctagtggccatttttgctgcaaagaggaagctgggcaagtgtagcagtgaggctgaagaaaagggaattaaattttggccatgttcacttgaaacgtcttttagacatcctagtgaaggtactggcacggaggatctagtctgagggtttaggtcagtgtttcagccgtggatctggggcagatgaatgtagacagaccaggccagtgatcaggactgagcccagacttcatcgtgagatatggaagttgagtcagaatctgcaaaggagctgagcaggagctgcagggggtaggaggaaaactgggagagtgtagcccctgggagtcaaagggagcaagcttcaaatgatgctgagggggtgagaatggagaatggaacactggattccatttggtagtacacagatcgctgaggaccctgtcccgggcagtttcctggaggaagaggcaagcctggctggagtgggtagaggggagagtgaaggcgaaggattagagtgtatagagaccagtgtcttggtctgaggggagtagagacaggtgacaaccacagggcagacgtaggttaaaggtgtttagtttttccttcaagtaaatgggcagatgtattccatatacgttcccagtgaagggccgggtgcggt

SEQ ID NO: 6871 - DNA, 1441 bp, Artificial sequence
  DNA replication origin
cgagagcgcgcccagccccgccttcgggccccacagtccctgcacccaggtttccattgcgcggctctcctcagctccttcccgccgcccagtctggatcctgggggaggcgctgaagtcggggcccgccctgtggccccgcccggcccgcgcttgctagcgcccaaagccagcgaagcacgggcccaaccgggccatgtcgggggagcctgagctcattgagctgcgggagctggcacccgctgggcgcgctgggaagggccgcacccggctggagcgtgccaacgcgctgcgcatcgcgcggggcaccgcgtgcaaccccacacggcagctggtccctggccgtggccaccgcttccagcccgcggggcccgccacgcacacgtggtgcgacctctgtggcgacttcatctggggcgtcgtgcgcaaaggcctgcagtgcgcgcgtgagtagtggccccgcgcgcctacgagagcggaaggggcagccaaggggcagcgcagtcgccgcgggtcaagtcgcggcagagggggtcggcggggacagctcccgaggactaggtccgttactttcgccccatcgctgaagagtgcgcgaaaatggtttatcccttgtcgcactccactcgtatctgggccacagatgagcagaggtggctgcttatatgtaaaaatacgctgattttaagtttcttatctttaaaatgccttggcccttcttgagaaagggtttgtgcctactgtcctcggagtccatcttcccaggcttgcctcttctcaaacactcatgaccccctccagaacctttagggtgaagggaaattaccacctatgggagggagcctggaaaaatttagaacctttggtgggccccctgcaagcaggagttttgttgagtctttatttagcaaacacccttttctgacccagtgaatcagatgctaaaatatgcacgcagccacacacccagcagtccttctgcacccctgggaatcgccagcaagcaaaggttgctctcccctgggtagacaccagctggaatcaccaggggtgcttttacagtcctccccgctagcctggatcccaccgcagacctgttgaatcaactgctgggagtggaccctaggcatcagtaaattttaaaaactccccaaattattgtaacatggagtctgggttgagcatcactgctctggcctatttaggaacttgtggatggatagtgtcccaggtctgtgtgtgcatggagaccctctcatccggtacaagaggacatcacaaattcagctggggggagcacaaagttgtgacagaatgcaaagaatgaacaaggggccgagcgcggtggctcatgcctgtaatcccagcacttcggaaggcggaggcgggtggatcacctgaggtcaggagttcaagaccagcctggccaacatggtgaaac

SEQ ID NO: 6872 - DNA, 1421 bp, Artificial sequence
  DNA replication origin
gcgaaagtaacggacctagtcctcgggagctgtccccgccgaccccctctgccgcgacttgacccgcggcgactgcgctgccccttggctgccccttccgctctcgtaggcgcgcggggccactactcacgcgcgcactgcaggcctttgcgcacgacgccccagatgaagtcgccacagaggtcgcaccacgtgtgcgtggcgggccccgcgggctggaagcggtggccacggccagggaccagctgccgtgtggggttgcacgcggtgccccgcgcgatgcgcagcgcgttggcacgctccagccgggtgcggcccttcccagcgcgcccagcgggtgccagctcccgcagctcaatgagctcaggctcccccgacatggcccggttgggcccgtgcttcgctggctttgggcgctagcaagcgcgggccgggcggggccacagggcgggccccgacttcagcgcctcccccaggatccagactgggcggcgggaaggagctgaggagagccgcgcaatggaaacctgggtgcagggactgtggggcccgaaggcggggctgggcgcgctctcgcagagccccccccgccttgcccttccttccctccttcgtcccctcctcacaccccaccccggacggccacaacgacggcgaccgcaaagcaccacgcggagatacccgtgtttctggaggccagctttactgtgctagaggaagagggtccccacatccggccctggccctcctggtccggtttgctgaagcaacacacttggcctacccactgggtggggcaggaagtctcgagccttcacttggggtgaggaggagggagatcggtcagcagctttaccgcccgctctgctctccactgcggagactggggctccggcagaggctggaccgtgatcttgaggttcaggggtgcattctgggtggattcccttggcatgggtggtcggccctcagcaactgcagccctcatttggctctgtcaccctgggctgccaggacacaagtctttccatgcttttcccagtgcttgacttggcactccctgcaggcaggtgggtattgaggatggcaatgcatgtgggggatgtgggagtagggcttagaggtccaaggttctaggataccctcacctgcagcaataccactcattctggcatcgtgagcagcgcttagaagcctctgcactgcagtaagcacagcggggccgctctggagccactgcctctagcacatccagcctgtaggtctcagcccacctgggggaaagtcaggaaggtctgactggccctggaaggtgggggcaccccacccacatccatgcctcctgcatcccctccaccctccctgccatttccacaggccttaccttcgcgcctgcagccgcaggtcctgctctgaggggc

SEQ ID NO: 6873 - DNA, 1731 bp, Artificial sequence
  DNA replication origin
atgtgggggatgtgggagtagggcttagaggtccaaggttctaggataccctcacctgcagcaataccactcattctggcatcgtgagcagcgcttagaagcctctgcactgcagtaagcacagcggggccgctctggagccactgcctctagcacatccagcctgtaggtctcagcccacctgggggaaagtcaggaaggtctgactggccctggaaggtgggggcaccccacccacatccatgcctcctgcatcccctccaccctccctgccatttccacaggccttaccttcgcgcctgcagccgcaggtcctgctctgaggggctgaacacatgctggagctggtgcttggcaattgcctgccacttgcctctgttttctcgctccagccgctcccagatttctgggatctaggagagagaagtggagagtggcaggaaggtgctggtaaagtgggacagtggtcctgagcagctaactttccagtgcctacctgttccaacaccaggtccttcttaggaggctgggtttcagttagggtcagatgggccaggaaactctgcaagtgggccaggttgggcagctggtccagcagtgtgtctgtgaggaaggcccgaagctgcaagggtgtccagtggaggccagtgtgatgcaggtgctggccagggggccaaggaaaaggaaggggctgggttgggctgagaatgcctgtgggggcccatgtcccactagctggtgtgtcacctgaggcccaaggactgaaaagagcactggggttgaggtgggtgggcaaagataaacagcagggacgcagtcggggtaggatggggagggcggtactggggctgtgggggctggtgcggagggagtctgaccttgagtagccgtcccttggcaaaacttgtgaggcagtagcgcgcctgagcctcagggcttagcagcaggttgtacagggcgatccacacttgcccgtccaacttgctcagcttttgctgctctgagggggccacagtatgccaacggctgccctcgaactgctgcagcttgcctggggagaggaaccagcacactgggtgcagacgttgaattctcttcaagtgagccagctgtgggggctgggagactgaccactgcctgggaatgggagaacctgggctgcaggacttgcccaggctatagggctgctgaccccagagcagggtgagcctcagtagtggacacatgggcctggcctgctgcagagctcaggtctaggccaaccttggctgaggcatcctggtatcctcagtgggcttggggacagggtttgtcttcgtgtgtgcaagctgcccccctctatcaaaaagataccctgaagcagtagcctggggcttaggctggtgggggaggaccctacctccttcccgccggctccagggactatgctccagcagttccaccaggaggcagggcaggttgtgtgtgctaagcatacggctcaaggtgctgagagagaggctaggggcagggacgttgtgaaggaggtgagtagaggcaggctacaggcccggtcttccagccctccacagtaggcccaggcccagtcggactgctcacctgtccacacagtctgtgatgtagcgtagtactgagagggccttcagtgcaatctcaaattccatcagctctgcctgcttctgcagctcctgggaggtcacacagtgttcacgctgggccaccctcacctgc

SEQ ID NO: 6874 - DNA, 1056 bp, Artificial sequence
  DNA replication origin
gataacctaactggaggtggaacttcggcatggaaggaagcagccttcccaacatgaaagggggaagttagaaaccagggagatgcctggctggaacatggaccagggagtgtcaccagcagatgacctgagatatcaattgaccaaaaaaaaaaaaaaaaaagccgggcatggtagctcatgcctgttatcccagcattttgggaggccaagacgggtggatcatctgaggtcaggagttcaaggccagcctggccaacatggtgaaaccccacctctactaaaaatacaaaaatttgcagagcatggtggtgcacacctgtaatcccagctactcgggaggctgaggcaggagaatcgcttgaacctgggaggcagaggttacagagagccaagatcatgccactgcactccagcctgggtgacaagagtgaaactccgtctcaaaaaaaaaaaaaaaaaaaagaaaggtcctttgcaaaagaaagatggaactcatactaggggataggataggaacagggcactgtgaagggtcctgagtaggagtgaggccaaggcacacaagagctttggaggaccacagacagggactagagggagggcatgaggagaagggctggcttgaaagggatgcctgaatgggcgggcagaggataagggtgcaggtgcaggcagggcaaggcagtctgggaactgggcaggagccagtcacataagcatgagggacatccacagaggtgttgggagcagctggtaatgaaggtccaaggtgcaagagagaagtcaggaaggatactcatgggtctggaatagtttaggggcccagcagtgtttggggatatcagggttgagctgagccggggatgggagggttgccaggcaaaggtaggcccatctcatccctgtcctttaccctacccttcaaaggtcccaacactggtggaggagctgatcgcagtggagatgtggaagcagaaggtgttccctgtgttctgcagggtggaggacttcaagccccagaacaccttccccatctacatggtggtgagctgg

SEQ ID NO: 6875 - DNA, 1968 bp, Artificial sequence
  DNA replication origin
gccgggtgcacatggacacccaccctggcaccagcagtgggcatggaccacacacacacactgagaaagcgacaagcaacatgacattaattaacgaagccattaattaatgcatcaccctccccctcctcccagtccatctgagccccatcactatatccccttgccctcagttccccactggcccccaggctgggatgcctttgggggaaatgaccagaatgaatggtgtgaagagctgtgcccagtccccacctgtgtgtgtgtgtgtgtgtgtgtgttcagcaagggagggacagtttggcctcctgcaagcagggagtgtgtgtgtaggggtgggaaggagatagggagtgggcacaggcctgagtgtgtaagggccagattggcggaaggatggcccagccaggagagacaaagtcacccctgctaaggcaaagggtgatgtctggtgggggttcctctgccgaaaggtgcaggcagtggcatgtggtcccactgggggcctgacactagtgagaaatggttacaatgagcacctggagaggtgagggggcacttggaggacactggtggctaggggtgggacagagggttcttcaccccctgccccagcatttggcactgtttgacattcagctttagaaatgggaggaccagccaggctgcagctcagattagaggcaggtggtgagcaggagatggagtgtgcaggtgccaaccctcccaccaacccctcgccctgtgtaaggctttgtaagcccctacacccaccccaccccatagtgtgtgtgtttgtgcgtgtgcccagtggggtatgtcgaatgtgagtccagtttccatcctcaatgttccaggtgtatatggggtagtgtctgaactggtatcactgtgactatcctgacacctggtgggcttggggatgtggctgtaggcctgaaaggggcaggagcccatgggggctgccccagagcctctctcctgctaggatttaagctgggaggcacaggcttcaaactggccatctcaccttcctccactattctcacagaaaccaagtttgggcttgggtggggcagagaggccgggtcagctgaggcagggtcccccccaacataggcagcctccaggaagggcggcagcagaggcctggttttggcaccagtgcgtgtggcctccctgtcccatcccactggggggagcccagcaggcaagaagggtctggggacacttgaacagttcggaggtgagatgtgatttgggtgccaaacacctgcggcgtcccgctttgggactccccatcccaaggcgcagaccagactctcagggcctggccagctcaggtccttcagtgagggagggacgaggctctaaggcggggagtgtggggcaggagggtgggaaaggcgaagaggccgggtgaggtgggagtggaggtggggtggggcagggtgctcagaggcggcgagaggcgtggacgaggacttgaggctgcggccggggcggcaggcccaggaggagcagcagttgcagggagaccaggacgcccagcgacggcgggaaggaggccccgcggccacagtctgaggtatcttcctgcggggagagacaaggagctggtcggcctgggcgggcgcaaggccgcgggatttcgggtccaccgccccctctcctcactgtcgcgttgtagtcgaagcagatgtgcgggcctctccggtatcgcggtctctgcactagctcacactgctccgggccgtccgctgggcatgggtggggagtcaaggaggcggacggcggcggcggcacggagggggcgcgcggggcagagggggagcgggcggcggggagggcgggggcaggatacagtgcgtctccttctgcagcagccggccagcctcgcactggctgcacagcggcttctcggccaccacaaagagaagattggtgttggtcagtctctgcgcgtgg

SEQ ID NO: 6876 - DNA, 1779 bp, Artificial sequence
  DNA replication origin
cgtctccttctgcagcagccggccagcctcgcactggctgcacagcggcttctcggccaccacaaagagaagattggtgttggtcagtctctgcgcgtggaacagcctgcgggcagcccggaaaggcggggcgttgagtttgccccgccctgacccacccccatcctgcggccccgcccccggccgctcggaggccccgccccttccatcctcccgagcgtctcgccccgctcacaggttccgcccttggcctctggtcccgccccactgccagcacctggagcagtttccgcagtcgatgatggcgttgtaggaggcgtttaccgagccgaagtagtactgggtctgtttcatgacgcagctgctctcgcgcgtctcggggctcccctcggcctccgcggggtctgcgagggcccagagcgcctcagctccgcccacagaccctggcaaggtctccggcctccctcagtcgtagaccccaccctccccatggagtcgtcttagctcagattggggacccggacttgaggaggcgcctccaaagccctacctacctgcttggaaccagctgtggtagatgaggccgtagagaagctgctggaacagggacctgcagcgcacggggagccgagtgcaggtggtcagcagaggacgatgccatgccctacttctcttctgagccctcccggccagggagcaccttctctacccacctcccgctcaggactcaccaggcggcagcagaggtccaccaggccaggttaaggaaatctgcaacggtgggctgcagtggagagaggggcgtggactgccactgctgcccctcgccctaggtcacccccagctttatcaaatgtcagaggtagggggtcatctgtgggcaggtctcccagtcccccccatctccagtccaggcatctctggggactcaccacaaagacaccccggggtgcagcacccaggttgccagggggctgaggggcacaggctgcctgatagtcataggactccttgcgggtgtagaaggagttattgtagagtgccagcatcaggttggcatccacctcactgaagaacctgcccacctgaggatgtcaggagaaagccatggtcacagggctggcagtgctacacccctagaaggctcaaatccctactctcttctttcactctcttcctgatcctcacctggtcccactgatggttctggtttgacagcaccaggaatcctccatcatcaatgaggacacagagtaagtcctaggaggaagggaatggggaggaaaatggagaggggctgggccccggaccttccaccgcaggcagtccagtggttcagagttggggggcatcactcccccagtcctgggaaggctgtgaagtcagggtggggatgttgagacccacaggccaagggatgtgctgggagtcgcggctgggactaggaagtctggaagtggggtaagctagggtccagggtaggttcagggcacacacacctcattgttaacctcgcagtccatctcacagtggctgttggggccgcactgctgggcagagagtgaggaccgtaagccacccaccagttttcctccctcccatcacctttcatacatccggttccccaggccatctgcagctggccctgcctccatgtaggtgttggagccactgagtggagggttggtgggggttccaggggactccaggaagggcactgctgggttactgcccccgcccctgcccaaataccttctgaggctggtcttggtgggtacg

SEQ ID NO: 6877 - DNA, 698 bp, Artificial sequence
  DNA replication origin
ccaccccagggcggaaagggctcctgcctggttgcctgggagggcagggaaagtcagcagatgagtctggagccctcctgccccggcctggtgggagctagggccgtgaggcagctggccactgctgcctggtgcggtacatggcctgggtatgcacacagccgcgcataccgggcgatgtatgggggccgggggatgacactgcacaggacacagacacacagagctccaggcagcagtgcaggaggtggggccggggcggtcagggtaggggaggacacctcagcaaggccacacgcaagctacctgggagcaatgaaaacgtgtccttcagactcaaagctgctggggagcaggaactcaaaatctgcaacagaaacggggggttatccggcgggggctggggaggctggaggccggggggctcagagctgacggggctggaaggacaggggagaggggggctggagggagggggagacaccagcaaagaggaaacccgccatttccacgtccaggagccagagagaagggacgggcagggagggtggagggcctgtggagactacagcatcgcaggaggagggcagttatagccaatatgttgcccgggcctggtcctctgtcggcagtgagtcccttggcgtggctgtatatgcttccatacggctgtatagcacatatacacggacacacac

SEQ ID NO: 6878 - DNA, 1156 bp, Artificial sequence
  DNA replication origin
aatggaaaaaaccgcatgctgagcttcctttgcctccaaagagactttgaggaagggaattggcttttggctgcggatttttctctctctttctttgccgcagctgtttgcgttttggtaggtcttgcttttgttctgtgtcaggcatcaacatggccaaaccgagggggtttctcacgggcacaaacagtccaaccagagacgggtcggggcagctgagggttcactgcagtgcattgtcggggctggtggtcctccctgggctaggaggtgaagggagaccctcaaagtgccaaggagtgttcccacagtgtgggaagaaagtctgaggagctggaaggaggacaggggtgctgctggaaactgtacctgcttcccttggctaagggcgtggagacgggctgggtctccacccttcctaaaacctgtctgggctccaggcagccatgggggatgctagggctccagagagggcatagggctgctgttgaggcatccccagttgggcctgtgccctgggcttatgagctgtgcatgtgtgggtgagtgagcatgcatgtgtgtgtgtgtgtgtgtgtgtgcctaagtgtgagtatctctgtatgggtttgagagtgaacctgaggatgtggccgctggggctcctctgtggcctctccctgcccagctggactggccaccttgctggtctgcacctgggaggggtccctctgctcttggcctgtctcactgtgggtggtccaccttcttagcctgtctccacttctgagctctcttttgctcccagggctttaattgtatagaagacagattgtccctgataccaaatactcccacaatgcactgcaagattctggggaagggggcacttggggtgcttggaggggctgggcagtcactggttggactgttcctttctgataggactgtgaggcagggtttggacacaagccgatggggaaggggttggggggaagaggagaaggaggaaaaagaaaaaggagggcgaaggagcagggaaggagactatgctatgttgtcattgttactagggccctgcatttctggggtcactgggtgggatgtgcgggggtggggagaaaaagacaactcaagccagtgggagtagggcacatcccccacccccgccctggcc

SEQ ID NO: 6879 - DNA, 852 bp, Artificial sequence
  DNA replication origin
acaacacaaacacaaaaacaaacgaaaagggggagggaaaggggaggggcacaaacaatattttattcaatggctgtttgaatgaaaatattgtgtctcatcatcataccgaaaggaaacttcttgcaaaaaacgacatgagagagaaagagagagcaagaaaactcaaaggagatgagcccccagtcggccaggcaggtggggggcgcccggtggggccggagccccagcctccctcccagtgacctcgggcgtggtgggcaggcagggccacaggctctagagactctctcaggagaggcccaggatgagcagggcatgcaggggtgagccacaggcagaggagtgggagaggcaggggaggaaggaggggggccagggagaaagcagggagggggagggaggagggggatggggaatgaaggagggaagaaagaaggtgaggagggagccagggggcagagcggagggagtgtggggagtgggactgaaggggggggggtgctggggtggggagagcgggagggagggagagtgagagagagagatggaggaggtgagcaggagaaagagggagatagaggagatgcagggagaagaggagggagagagggaagaagagaggacagtgcgtaagggagggaggttggatgcagaggggagagaggtaggaagtgagaggagaaggatgagagggtaagtgggaactgagtgaggatggatgaggaaagaatggagaggagggggcagagagagagagaggcaccatgggaagggggcaccacaggggtagagagctgaacaggaagagagaggaaagaggggaggggagggagaaagaggggaggggaa

SEQ ID NO: 6880 - DNA, 755 bp, Artificial sequence
  DNA replication origin
gtggcctgcccttccctcttcctggctaattctaatttcacccattcccaaatcttgccacaggcccactcaactccttggggatgtctccctgagcactcccagggccggtcagggtgtcctcagggtctgtgaagcagggcatgtgcaggaagcctcaggaggggaatgcagggcagcttggggggccagtgtgcagggatctttgttctagctccacagggccatggccgcctcttctctgcggcatcctggtgctccccatgatgcccagctgtgtccactggctgctgcagggtggagagggagaatgaggtggagggatggaggaatgcaggggtggggcccctcagaggcatgggccttgagggggttcccctgtttctccctcacagctggggcatggctgggattttgagtccctgagcctttgcgggtatggaggggagcctggcctctgggggagggagatatgcaaccatggggagcagcgtctcagtgtgggagttgggggatgatcctggatgagtctgtgtgctctgggctgtatctggaagccctaagatggagttgctcagcctgcagaggagtgggggaggtgagaggaacatggggagctggtgactcaatccctatttcctgggccagggagagattatgggagggggagtctcagctgaagttctctagaggcggagccacggaaagaggcttaggcttttgcaagaggcatcatggtatcatacaaggaagaa

SEQ ID NO: 6881 - DNA, 982 bp, Artificial sequence
  DNA replication origin
agctggggcatggctgggattttgagtccctgagcctttgcgggtatggaggggagcctggcctctgggggagggagatatgcaaccatggggagcagcgtctcagtgtgggagttgggggatgatcctggatgagtctgtgtgctctgggctgtatctggaagccctaagatggagttgctcagcctgcagaggagtgggggaggtgagaggaacatggggagctggtgactcaatccctatttcctgggccagggagagattatgggagggggagtctcagctgaagttctctagaggcggagccacggaaagaggcttaggcttttgcaagaggcatcatggtatcatacaaggaagaacttccatttagtgggctccctctctaaaacagggacctgaggacatggtggcatctcccttcagagttagggatgggctaacggatcactgcctcggaaagggggatgggccagcccttctccagccccataattagagatgttgttctggctgcctgaggtcaaggacctgggtctctagcatacctggggtcctgaccacatgagccaggacctgacaccatggttggagctctgagtcgggaattctacaagggaaacattggtgaccccgttggtgaccttgaggcccatgacaccaaacctgggctgcttctcacttgatgaataaccctgtgggcccttcccatcctatgaccattgggctcgggagtgaacctgaagctaccagagttaaaagcaccctcatgggaaagtcggggccccttctacttgaggaaatcccggcctgtttaatgggcacatgctgtagccttaagtgagtatgcaggatgtggcggaagcacacacagagccctcaggagctggtgccgtttcccatatctggcagcgacacctagggttggaaccctcagacgcctccctgcacatctatggctgtaccgctctgaacgtgcact

SEQ ID NO: 6882 - DNA, 740 bp, Artificial sequence
  DNA replication origin
tgtcactgccttctctgggcctcagggccccccatttcagggtcatgagcagccctgcccccgactagctcaaggtaactgtgaatagcagaggggaagagtgggctggagaggaggcaggaggttgaggcgagatggagtcaataagcacacaccacataccccatcccaaaaagaagatgctcacgcccatgcatgggcacacacacagccatgcctccacgctgctcaggcatctggacccttttttgtgggtgctgccccagggcacttgcaggaactagcaggagctctgggcaatcccacgggctcctctgtcattcagggcacagaatatggggaatgggcaccagggaggaaggggcaggttggggagaatgaatctgcccagccttcctccaaggggggtgggtctgtgggcaggtgcatgtggcagtgtaaatctgagggtgtgtgtgtgtgtgtgtgtgagggctcaacatatccgtttgtgtgcacgtgcctgcgtgttggggctggggtggggtgagggtctctaaccccccaggggcttgtgagtcttaggagcagatttctgcaagtgtctttgttcacagctgggtcttgggtgtgtgcgtgtgcgtgtgcgtgtgtgtgtgcatttgtatgcatcacatactgctgcatgtgtctccaagcctgactgggtccatgtgttcattcaggtgacccaaggaggtctgtgccccaagtacaggctc

SEQ ID NO: 6883 - DNA, 608 bp, Artificial sequence
  DNA replication origin
tctgtcattcagggcacagaatatggggaatgggcaccagggaggaaggggcaggttggggagaatgaatctgcccagccttcctccaaggggggtgggtctgtgggcaggtgcatgtggcagtgtaaatctgagggtgtgtgtgtgtgtgtgtgtgagggctcaacatatccgtttgtgtgcacgtgcctgcgtgttggggctggggtggggtgagggtctctaaccccccaggggcttgtgagtcttaggagcagatttctgcaagtgtctttgttcacagctgggtcttgggtgtgtgcgtgtgcgtgtgcgtgtgtgtgtgcatttgtatgcatcacatactgctgcatgtgtctccaagcctgactgggtccatgtgttcattcaggtgacccaaggaggtctgtgccccaagtacaggctccttcaccaccagaggtcacagaataggctgccacgactgagccgtgccaccaggctgagcagaagtggagggatgtggagagacagagaggaggtgatgaggggagataaggaggggggagaggcagccgatgaaagacagacaagcagagagagataaggtcggtagagtgacagcgaga

SEQ ID NO: 6884 - DNA, 1054 bp, Artificial sequence
  DNA replication origin
agaccccagctagaaggctgggggaggctgcatgtcaaactgcatcgcattcaggtgggggcttccagcttaggggcagctgcaaatgctcaggggagggggagggtaaagaggaagggggttggaatggggaggaatgggtacgggaacgggaacagggaggaacgggaggaaaggggaggaagggggaggaaaggggaggaagggggaggaagggggaggaagggggaggaggggatggggaaaagggagaagagtccgtgtgcagatgcagcagcatagattaaactgttgccagttgttaattttatatgtggagttgttgatcagaatgtgatttaattgtacagtataatccaggcttttggaataaattatgcagaaaactcatctataattaaacaaatcaaaaaaccagagacaggtgacacagcaggttcaccctcagagggcacgggtgggtgtgggcagctggacccagcagaggggcgagaaaggatgggggaggggctctgttcaagagcagacaggggcaggccccggaagggtcaaggcctggtagggagcaaggggctcggaacacccgagctctgcctctgtgggccttcttaccactcacacggaggcattttttgtcatcaaagccctgctgcctctcccagatggcctgtctggatcaaccctgttccactgggcacctataatcagtctgtggccttcccttcagcttggcagttcagccgctgcgcttcgtgagggagtgaggggtggatactaggggtgggcagcaggggaagcaggagggctggatgacaggacagcaggaggctggggcaggtgagcagtgtgagggagcaggcacagtgaaggccactgctgccaagtgcacggtgaagcaaacttggcaatggcggggccccacgtctcttgcttctctcatgataggctggccaattattctcccagctctggggaaggcaacaatttaaaataaagtgcaggctgggcatggtggctcacccctgtaaccccagcactttggaagccccaggcg

SEQ ID NO: 6885 - DNA, 792 bp, Artificial sequence
  DNA replication origin
gcctcctgggccagccctggggcagccaccatgctgccaacctctccgcaagctccccctgcccaccccacctgcctaccccatggccggccacacacaagctggacaggagggctgggacgtcagcaggactctggggaggtatattcactcagcaaatggcctgttcttccaggcgggagagcaggagcctcctggctcagggctcacagcccaaggcagaggctaacaagcaagagggaggatgtctgatggaatactagccaaaagaatcaccccaggaggggacgtggagatcagttgctgctggggggggtgcaatttcaaatggaggggcaaggaggtcttcacggagcaggtgacgtgtgtgtggagaccggagggaggtgggaggcccttggacttctgaggagagacagtttcaggcagagggaacagcatgtgccgaagcctgtgcagggactataggggcatgttcaggccacaccgaggggtgaggtcagggaagctactgggggtgcggccactgggtggacttgggttttctcttagtgcgacggagttgacagaggagggacatgacagcagggcactccagccgtgtgtagaggggaacagactgggaaggcaggtgccaggcagaaggtggaagccggtgagtgagctggcagctgcagaggtgcaggaaccctgatgggtgcccggccaaggaggcagtcggcagtgggtggattcaggcctattgcaaaggtggaacctgtagcacttgctgatagattggatgtgggtgtg

SEQ ID NO: 6886 - DNA, 843 bp, Artificial sequence
  DNA replication origin
tggagtccaggggaacagcagccaagggtccccccaaagtcctccacaccaggagggctgtgagcacctggcagctctgcatctcggtgacagcagcagcggctgggaagcctcatccctccctcctgcaaaagctgaggcaggtttttgggaagatgggggacccagatgagtgatgctgcctccctccaacagggagagccacagggagatggagacaggggctggaaggcccagacagacacacgtcacccaccattaaccgtagctacactgacgcatgccctgttgtaggcactgctccccatgtgtccactcaggagaggagcacgtactctggttgtcattaatctgctggtggtccaaacccctcaggcccctcactgcttctgcccaccctcagaggaagggagacgctggccaacaccatcgctggagcagagctgggctaagagggtgcagtcaggtgggccagctcagccgggtgctccacccagcactcagccaggactccacagaggaggggacagagaaacctgggggcactggagaacagggcacagaggcccagcagagaggacaaaagaggcgggcagggaaggataggtacagctcgatgaaagacctgaagaagggggacaggggaagagggagggaaagacacaaggggaggcaaagcagtgagggctgcccctcagccggcggtggtggcctgatgctggggagggcataactggaaaaaggaggcaggtgaaaggtgtgctcggactcaggtcccccacacccagccggacaagtgcacatacatgtgcatacatgtgtgcaaacatgtagcctcctcct

SEQ ID NO: 6887 - DNA, 1018 bp, Artificial sequence
  DNA replication origin
aatggaagttcagggctggtggatgcgttattgtctttcatttgccgtgatggaaatggacttcaatcatagtgcttaaaaaaagcaaaagcattatttttttgttgttctttcttcctcaaagccaagcacgagccaagccacaattatttttttcttagccgtttcatagctccttgagtgaaggtttaagtggatgtctctttccacctctcccgacctcactccctttccctgcaacgtgcagttggtcagatggcttctgggcctgcacgagtctcctctagaaggccgatgtgagaacctgaccagagtaggcacctatccctctgtccccagccagaagatggcgaggcgggtgtgacggcagcgacacacttccagctggacgctgttgtcgatatagttggagctaatttgggggtttgggacatgtcttgcaaactgtaattagagaatgagggtgggggtggggtgggggctgtgccgctctgagggtccagggggaggtgactaatggtacaacaacacagagggtttgctgtgacagccagtgcccttcagctgccctggtcccgcagacgaggatgcacattgatccttggagggaggaaggggcccacacatgaccatggccagtggaattggtgcttttgttgaactggtaagaaaggtttaggctgttgttcgggccagaaggttctgtggggctgctcagggatgggtgacctcccagaaccttctgctgggtcagtgtggccaggctgggatgacactttgatacaggtggatttccaaggaggagagtggaacccagcttcatggcactggagtgacaacccctcagtggggaaggcccctgatgagcaagtcattttctcattagtgtctgccagtgcacaggggcccagcttcacaagctgctggattttaagcaagtgtgggtttggggtctgctagctatgatttctgcaatcgctctggcagcatggctctctgcccaccaggcaaaatggac

SEQ ID NO: 6888 - DNA, 922 bp, Artificial sequence
  DNA replication origin
gatgatgcgagcaccttcttgctgtggccagtgccacagaggcagtgtcccctgttcttggcccccctccacctgaggagagagtaccctggagagcccagttgggaggtgaaggcgttggggtccgggcagaaggtgaatggtgggaaggacccctgcctgcgcctgctgctgctgccaacagagtaatagcttctcctggctctgccagcctccgcaggttttttggtccttctgagccttctcctcctccccaagagccagcaaactcgggctgcctcctacgggtgagcttagccagatgtgtctggggctgggagtggatgttcagtgcatgtggcctttaggacgtatcagtttcctgacactgtgcttcagccctatgtcagtgcccagaccccctttggggcacggtgaccaccttgcttctgttatctgtctccgggtctgaggagccacctgtccctggactccttcaccagtgtcctggcctggagactggggcatgagtcgtcgggctgctggtggccaaggggaagggtctggcctcggggaaagggagaggctggctctgcgtcatttaaaccagctctgcccaagggtaagagcccctggttctgccacaaaacctgccgactccagttcgtaggctctctaagatgagggaaaaacaaactcaggaaaaccgcctctctgggtctctctctccgtcttgtcgtctctctcattgcacagcctggctgtgctcaggcaggtgatcagttggcaaattacaagtgccgcacggacgtgtcctctgtcaaccgtctggatttttcacatgtgtgtttgggggttgcccagggagaaaagaatcgaatggaagttcagggctggtggatgcgttattgtctttcatttgccgtgatggaaatggacttca

SEQ ID NO: 6889 - DNA, 1217 bp, Artificial sequence
  DNA replication origin
gcgcccccccaaccccgccgccgccgccgccgccgccactgccccccctccccgcggcgccgcatcttgaatggaaacatggcggtgccggctcggacctgcggcgcctctcggcccggcccagcgcggactgcgcgcccctggcccggctgcggcccccaccctggccccggcacccggcgcccgacgtccgggcccccgcgcccgctgtggctgctgctgccgcttctaccgctgctcgccgcccccggcgcctctgcctacagcttcccccagcagcacacgtaagtggcctcggccggccgcgagaccccggccgagccttgcgccccgctctgcccccggtccgcgctactccttccctgcgctccgcgccagggcagaggcgctgggtccggctgcccgctgcgcccgggggcgacggccccaagccccgaaggctggcagccgcggtcccggcgctctggctgcgtcgcgaaacttccccgcggtgcccctgcttcccccaaatcccccgaatgaggcaaggcaagatcttcaagccccgggaggagttgggggggggcggtccgagcttgtcagctgattcccctgccgctgacccggtgagagggaaacccgggttgggtgagaggggcggccagcgacccctgtccggcggagttggagccgcgcatctgccccacgttccctccctggtgggaatccggcgctttacagccagaggtgagggacatctccacacctgccttcaagggccttttcctttagtggggagctgtatgctgatgatgcgagcaccttcttgctgtggccagtgccacagaggcagtgtcccctgttcttggcccccctccacctgaggagagagtaccctggagagcccagttgggaggtgaaggcgttggggtccgggcagaaggtgaatggtgggaaggacccctgcctgcgcctgctgctgctgccaacagagtaatagcttctcctggctctgccagcctccgcaggttttttggtccttctgagccttctcctcctccccaagagccagcaaactcgggctgcctcctacgggtgagcttagccagatgtgtctggggctgggagtggatgttcagtgcatgtggcctttaggacgtatcagtttcctgacactgtgcttcagccctatgtcagtgcccagaccccctttggggcacggtgaccaccttgcttct

SEQ ID NO: 6890 - DNA, 1551 bp, Artificial sequence
  DNA replication origin
catttctcaggccactgcagagtctgccttgggaaggcgcccacccccgacagggcacccaagaggaatgatgtcctttatgatggtcccctggggccatgggcacaggtattatatgtccagcaaacaggtaagagaggatatcacaggccagccctaccttgggcatgaggaagacagagatgctgggaacaggtctcagcaggcagggctgggaaggcagctgttgagctcacgcttgtcgactcctgagcaggacccctgcccccctgccctcccattgtgtccagaggtggcaggggggcaactggctcagtgaggaccctgcttgtccccccaaagagctggactatcgtctcccatagtccatcaggtcccacctgtccaccaggcccctggcccctgcgttgccttcctctgatactttttttggggtctcatggtttgggatctgctggcaaacctgtctggcccctgaaggctcattcaggtcaagggaggaggacacttcaagaaatgaaggaaactgttccctgtcaagccctggtttgctgggattggagaagccaaggcaggactaggcagcaagggaaggctgtcctaggccctatttccagcccctacccctacccttttcagtccaggggctactattccctttcaactgcaagccctccttgggctgacttgtgagtgggtgataggagagccactgataccatgaggtggggcatctggacatttccgaaccatcctgcccagctggttactatccctcattcctcgtgataggccaggtctgtgggcagttattgctgagggggtcctgccctgtgtcaagttggtggggagcattctctcatcctatctgcaccagaggcagagctgggttccagggtaacttcagtagaatcctagggatggtctcccctcattgtgaatgcttcagtttaccaagagattctccccattctcacttcatcctggaaatgggagtgggcacccacacaagcattcacaagcgaggacactgaggctctgaaagggccacaagctgtggagtcaaggttgacaccagccccagtcttctgcccacagcagggaagagccaggggcctccaggacagaaaggactgggttgtgcagagatgagcttcctggctctggaagaatctaaacagaggctgtgcaaactccgggaactggggcttgggacaggcctgcacacagtgcctgttcagcccagggaagcgaagcgagtggctgcagagggctgcatcctgccgtccccagccccccacaaccgtacagccgtgcccaggtttccgcttagggaaccaggaggtccaggccctttctgccagcagccgggcgtgcaagcccccgacagagagaaatcttaaagatagctagagccacgggggctgtaagttcagcatgcctccttttctggtctccgctgaagctgtcactccaccattaaacctgtgactctaggccttaagcctgttgaaggtcgagcccccaaaagggtcacatatgctcctgcct

SEQ ID NO: 6891 - DNA, 2059 bp, Artificial sequence
  DNA replication origin
aggttgagggacaggggggtgctgagtctccccagggaagagcactgaaatcttatttgccctggagaggaaaagaggctggagagggaatgtggccaggcaagtggcccagcagagggacctgcctttgaagcagtcaggggaaccagttggacccctaacccctccctgggatatgacagctccacctcccactcaggatgactgcttccattccaccttctgggcctctgctttcccttctgtacagcaaggcatccggactgggttagtgggtggcaggctcctgggagtctctaggctccgatcttctggagccctgtgttggacaaatgcacaggtttgtggatacacatttttgttgggagtgtgtgcccagagtaaagcacaaggcaaagtgggggtccaaagacatgcaggcatatgttatgtgatcaatggggtagggagtatgttcacactgggtaggggggtgtcccgagggtctgcttggtaagttcagcccagggtgagaggggtgggtaagtgtaggtatgagcagtagattggggtaggccaggcctgtgcctggggtctaagaatggaggggttggcatggggtccgggtgcaggaagaggggacagaggaggcccgtggacgtcagcacttgaatttccacctgccatagcccattcccatccttgcacccactcaggccccactgctaggggcaggcacaaagaaaacgattttctccagttaaggccaagcaggagatggagatggtgagaagggaacttcaaggtgaaatctgccagtatggcccctgggctgggcaagagaggagctcagagtgggcagggggctaaaaggaggaggttcagaggctctggggtatgggagcctgagagaaggaggggtgggggaaaggccaccttgggggccaagttgcagggagatgaggatgactcagggacatcagggacggatgaacacattgaggagaatgcaggcattgaataaggaaggggcttccaggcctggtccctgtgaggcccttggggagacacccactccaagcacctcctgagtcctagagttgtcttcagcatgggcatacaaaggcagctggatatgggttgcaggttcagggaagcctaagtgttgagaggccagggctagaccttggcctcgagtgccagtagagaatcaaacatagccagccacagggatgctgagcaggacggtggctgggggggttcctggcaccagaggcagctcccctcccaccttgaagaaggcaggcatctttcagaccagaagcctggtgccaggtgggaaccttcaccagaggaggtgttgccagtcaggggctcaggccacagtacacttgggcccacttgctgatggaagagcaggtaccagagtgaaggccatgctgaggccatgctggggcccatccaactgagcaacttcagtgccctgtcctgccagtttgaggtcaagcaggactgggcagcaggctcgggatgagggagcagcttgatgagtgggtccaggggctgcaggttggggcaggtgctcctgggcctggtgaggaggtgcccttgctccaggaaccccttccacctccagcaggagccaggtcaggccctgtccagctacccagcccttgctgcgcccagttcatctgcccctcatgtcaagtgtgccatagatgaccctgctgagacccccttaagaacaggaataggcacccagcatggctagcctggagcctccctcctccccatgtctgtggtggtcaagtaaagggcctggaggctgttgctgggagtgggatgcctttttagtgtattttgctcattgaagaaacaaatgggtcccccaaccagagcctctagaaaaatagctgtagcttcagaattgctttggcccctccaagagggcagcctgggggtccaggttgtgtgtggtggagtggcaggggaggtgagaggtgtgtattttctgccactctggcccttattagccagccctcccaggggctcatatctgttcccttaggcttgacacccc

SEQ ID NO: 6892 - DNA, 1558 bp, Artificial sequence
  DNA replication origin
cgtttggggcgcgggcggcggcggggggcgccggctgctgcggcggggccgggcggctgctccgcgcatgtgcacccgtccaggtggccctgccctactctgcggcgccggcacggccgcccccgggcccgcagggtgccaacatcggggcgcagggacgcagggacgggggacagggcacgggggtggggagaacacgtcgggtacacaggggggtagtaccaggagcctgagtcgtctggggctgctgcgagagccggtagcaggggaaggcagccagttctagtggagtcccaactcttctgtgcctgcaattcctttagtaatgcctggcctcctccagagcctcctttgaagtccaggtgcttctgaatgaggagcccattagcgtctggggctgcattcagtagaagccaagtggggctgagacattcatttcttctctcatgtcttcagtcaccaaacatatcagaccacctgttccagccaggctctatgctgggggcttggcacggaggaggggagcaagacaggcgatggcccttctccagggacttaactgcaggccccatactgccttcttctcagaaggggtaggggtggggataattcccagactagggcaggccatcctcgttcctggagaaggaggacctctggtaggggtgagaggagcatcagattcccaagggtgagaccttggatgcggcactgcccctctctgagcctctggggctcatctgcaaagcaggattacaatagctcctcctgaacagggtggcttcagggattaattgtggccttgcccagcactgtgcctggcacagaatagatgctcaataaaagtttctttccatcctgagcctgtcctccttttcacctcactgaagaagtgaacagaccagggcagggaggaagggtaactgggtacaagaaaacctcagtcgcctatgaccacaacctgattcatacgttcccgggctggctggtagagcacccttcccctgcagaggggggcctatctccccatcaccagggaggctagggaacctggcagaagaagcactgggtagaccaggattcacatgtgaccttggcggctctcttcccattgtgggccttggggtgtccatctggagcatgggtccagcatgcaggggagctgacactgctggccaaggctggtgctgcccatcccaacccccagagcatctggattcaccagcatctactgaccccaccaacacagccctgggttcaatcaaatcctaccctgcccttaaccgctgtgggaccttgagcacactcctttcctctctggggctgctggagggttcctacttcatagggttgctctggagatcaaatggcatgagggagcccagtttctaaaacccagtaaggactcctttggtggagagggtggagatgctcagagagaggaggagtgggcctgcgtaagaagccccaaaggaagggtgacaactacacccctggcctccctgcccactggttatgtgatttcatgtccacccagaagccgtaacaacctcacaag

SEQ ID NO: 6893 - DNA, 1220 bp, Artificial sequence
  DNA replication origin
atgtggctgactcaaagctggggctccagctgaggggtcagggaatgaggtgccttgaggagcagaatgggggaggcctggctgggcatggagttcacattcaggcaagaggccaagtgacagtaataacatttgagcacctgtatccagccatacctcaagttcacagacctggatttttaaactacttgtgccaataaattccattttacggctgaagtaacttgagtcttggtctttgcctcctgactcatggcctgaggcttcccaagcatagagaacagcatgggcacaggccccggactgagaacagctccatgctgctgttctggaattggaagtagctgctggggcaggaagcgtaaatggtggcgggccaggagcttccggagcagctgccttggccagagatgagggggtctgtggagtgagtggatcaggggttggctgagcaagaggggattgtgtgagagggggagtgggtggggccagcggaaaacgaagggggcagccagcacagggttccatcctgggaccaggagaacgtctaggagaccttaggaagaacagagccttgaagaggctaatcctaggggcaaagaagggagtacgagagtaggctcaggacacagccccaggtagctgccagacatggagctgggggagggcagtggggtctggagaagcagctcacctcgtccatcatggaatttgcccagtagggtctttggtgatcttggcctgagccagttctggggtgtggaagggtcacagccagggctgggcaggaggaagaatgggataagtatggatgaggctgaggacgccggggctcagcagagggggctgggaggcttgaacagcacactgcggacgtggacatgtgctccgcggactctctgagagtccctccccacctctgctgccagggctggggacaggaggcacaggaccaggcaggaggggcaggaaatcctaagagaagtgtcaggggactcaggggagcatggagcttgggggaggaccaggtgcatcccaggctggggagagagaccggggttgcagggcagaaagagctcttgaggctccagggaggagggagcacagcaagggcagaagcacagaatgagttggagttgggctgggtcaggggactgatgagagaggaggcccaggggttggcctgacggcaggcccaggaggccccagaaggcaagggg

SEQ ID NO: 6894 - DNA, 976 bp, Artificial sequence
  DNA replication origin
ctgagggctccagctcccagggagctcattcaggctgccaggccagacacaaaccctttgggtcccagcccacatttgcaaggtaaacgtgccccttcctataccttctcatctccaccataaaacagcccagggggcctctgtttgttgggtgtaattagctgtttctccctcacttgatcacaattagattccggtttagaagaaagcagccaaaggggtctctgtgctggggcctcttaggctgacctggggtaactgagtgcagtggctgcccccgaccctgcaaatccctcctctcccctagggaggacgggggaggagaggatgaaggaaggaaaggcaggaaagggaaagaagcaggggaagcagggggaggaagaaaagagggagacaggcagataggagggcaggctgactgggagtggggaggaggagagggaaaggaggaggaaggtgaagagaggagaggaagagggagcggaggagcccgggagacgggggtggggaggggggagaggacataccaacctgacctgcggggaggctggagggagggggagcccgggccacaggggagttgacgatggctgcaggagacagataaggttggggagaaaggcgcagtcactgatgggagggcagggattaggggctcaagggcctgtcctgggcctgtgggtggaaacccaggaagaagggcggctgccctagtgagatgggagaagggaggaggaagctctcgcttcagggtaccgctgtgcccttgttgagccaggagaaaggcctcccacacctacccatctccactgcacagtgagctgtctaagcagacccaggcctctggacctgggcagggtcaggagggacaagacagattccctgagctcagggctctcctccaatcaaagaagacaagttacaacccatcctccacgagcctggaatgataacacctcaacagacatgcatgtca

SEQ ID NO: 6895 - DNA, 1656 bp, Artificial sequence
  DNA replication origin
cctccttggataaagggagccccctgccttcctgggtgctagaaaggaaagaataagaaacatgaggctaaggacaggggctcagtagtgagatgaagtctctctaggttctgaaagcactggggaggtaaaggtttgagggcaagaatgagggtaagttcaggagacattaggacacatactttacgtatctacggtgcccctgtttttgggaacaaaaatgaagccctgcatcctctgtctgtgggtgagatgatcatagtgatcaaacctggaagatatgaaaggcagcggggatgtttgaaagaaaaagtctccctcccctgatcaaaaactcccctcaacctgcgtccccatatcccccacctccccatatccacctcctcattccctgcctcccacatccctcatcctgcttgggggaaaaaataccacagctttttcctttcctggagggaaacacttgcccaagagtcagacaggcctgtctttgaaacctagctcagctgcttaactagtgatccctagaaagtcactccacctctctgtgtctccgttttcctgagtctaaggtggggatattgagaacatccccacagggtcatggggttacagaaatggcagaacaaacaggtgtcgaagaaagacttagctcagcacaacccccatccacagtaagcatccactacatgttagattttctccccatggccaacccagtcacaaaggggagccaagggagcccctggacccagtccactgtatggtccagactatgcttggagtgtgggtggaggctgatgtggaaagaccagaagacaagaaggagagagaggctctggttctctggcggggcttctccgcaggctctcggggacattggactgccctccccacccaccaacaatagaggggctgctagggtcaaggagaaaggcgaggcaggaatggagctcccagtgtgggtgccttctcttcctttaccctcctcccctggaagcagagggtgagagatttgcccagtgcagagggccctggttaaggtggggtgggaagaggtgccagccaagctgcagatgggacggcctagggagaggagggatacctagctcgtgggtgcatacatccccctgtgctggttcatgggcattagtggggttgcctccctgtgcagatgcatgggcgtgtgtgagatgtgtaaacacctctgatggtccctgaggaaggggcaaggctggcagagggttatggggtagaaaggctcatccctctttgccttctccctccagctaggctgggcacatctgggcacataggaagtcccgggttcttttcttggctttgcaactgatcccgggcgtgaccttgggccaaacccttaactcgtgccctggggctctgttaacatcgcctcccaaaggagagaagaggccctactgaccactttccaggcctgcctcagggtccaaaggggaagggaaggaaaccggggtaaaaggggtcggcaccgcgaccttcgagaacccgcatgctgttctccaccaggtctctcagtcctccctgccccaatccccatgcccgcctccgcgaccctgtgatgcctcccttcttgcacaggagcagtgacctcagcacttacttaatcctctcccggcg

SEQ ID NO: 6896 - DNA, 919 bp, Artificial sequence
  DNA replication origin
tctcccggcgccgagctcagttggagaggctaggggtggtagtgactggcaggaggccggggcggggggaacccccaagcccggcgtctggggctgcgggtccgacccgagatccgccctccctgcaagccccgagccgctggccaggcccgctactgcgcaccagccgcatccgcgagcgctggctctgccggcctgagctagggtgggtagggccgggacccacggcggaggtggggccgggccgagcagcctcgggggatccccgaagctacagcgccttgcctccctgcacgctccgcgcccccggcctccgattggctgtcgggcctagagcccgcccagaattggaccgttcgcttgtcgctcgggtctggctccacccccagagggagcctagaacctggtcgcagtttttagagactaccctcaccccgtggcctgcgccgaagttgggcggaggacagtgggtggccaggcccttccgggccagaactcgggacccctgccagctacccgtgccaggacagactcaagcccccaaaacgcggatggatgtacagaggagacttggggagagcactggactgggagtccttgggcctgcactgaactctggctgactttgtgaccttgaagaaactgcttttcccttcctgaaccttggctttctactcagacgggtcctctggtgtgagggttctagacgaagatggggaatcttcgtctacagaagttgagagtggggtggatttattattgggcaccccgacccaggcaagtctacatataccctcacaatagcttccatccacggcatgatcagctcagggaaggagccctcagatactcctgatccgccggttttcaaagtagtttatgggagtcaccgggtagcctggtacaaatgcaaacgccc

SEQ ID NO: 6897 - DNA, 1041 bp, Artificial sequence
  DNA replication origin
ggctcctggggtggaaggcagtggtggggcaggtattcaggagtcccagaatgcagacaggaggaaggaacttgctggagacagcaagggagaagtagtcttcccagcacctccatgtcctcttccttggcctcaccttccaccctccctcacttggcaccaggccagttgcgataagcacagccacccagtcctccctgagtgcagaacacccatttataccttcttcctctctccttggagcttcctgagctcctgtcacatcaccatggccagcatcagaccctttggttgaaggggttgctgaggttcaggacagagtggatggccaggaatgctcagctcaggtcaagactctgtcttatcagcatcccctctccactgtcccttacctcaagtctgggaaatttgaagatgagaggcaggagccaaggtccttctcacattgggatcccagactgggctgagacagggttgtgagacgattgtgggggtaccccaagcaggaccaggccaaacccagggcctcccgagagttgcagaccatcaggtgccagcctgaggaaaggcaaggatctgcggctggcttcccaagaagagcctacttgctagcctggggcaggagaggggacaccaggacagagggggccaggggctggtccaaggttactagcaggcagggcagcaggcaggctagcgtagagtgctctgggcccagaagaatatctgggattgttggccacatcttgggggacgccgtgccgttagcatccatctgctccaatgagaacccaggctgagcccaccctgtgagttcctcctttagccggccagcccccggtttcccaatccacagtgggaattgaggtaagtgtgtgggggcggggagtgggagtgtcacagccccacacagagccttgctcctgaggtccgtctgcgctcagtcacctctggcccgtcaagccctcccaatgcccggcagctagcacgaagcccctgttctcccgtgcgcccctcgtggtggccgggaagggggcagag

SEQ ID NO: 6898 - DNA, 1589 bp, Artificial sequence
  DNA replication origin
tagcacgaagcccctgttctcccgtgcgcccctcgtggtggccgggaagggggcagagagccgcgcttacccctgaacgcagaggaccatgtccccgcggcagcggcgactccggagtggggactcggctggacggcggcggctggagggaaccagtgggcgcggagcgcgtgctgggtaggctcccggggcgcgcgggcgcaggacagggactgagaggcagtggcgcggaccgcctgcgagggcgaggggggcgggccagacgagcggggcggggcgagctgctgcctaatcctttgtctgccgcgttccagcccttcccggaagcagcgtcttcctagaaccgcgggctgagcggtggggcccgggcggggtgcgcgggccccgtcgccgggtctggggccctgagcagtgaaaggaaatactttgacagatttccaagaactttccaggaaaacggggcggggccccgcgagctgaccaatcgcgacgctgaaggtggagccgagcggtcggggagggccaatagcagcgcgtggacccggggctgaagctacccagaggggcaggtcggagagatcagtggggaaagaccgggtcggggaagttaaggaggggcccgggctcagcaacccgcgcccagattgccttctggcattctgcgtcgttggggaagggccctcttatctcgcggtggaactcgtggcagggcggggggcggagtcccgggcttgtcctccctgcgagcggctcctccaaggaggtctgtcggcgtgtgcaagcgccccgtgttgggacggccgctcctggaccctaggactctgtgtgtcgggtgtcggattgggtggcatggggtgagatctggagcgggacttagggcagggcggggtgcagaggacagttccagaaatgagtgggtccactgaggtcaagccggcggtcaccacagccagaaagatccagacaagaacgttttctttgaaagagttgaaggagaaagcacgccccaacttttcgaatcaggcagaccatccagtcttggctggcactggtttctggccggccctgccagtcaggggagaagagactacagatttgagaaagcaagcagagacagccccagatggcccggactctgggttggtaccacccccaccccccgccagaaaaaaaatgctgagagagagtcctgcaactcaaaacatagggagataatctgggagtagggtgatagaggttggggcgggatggcgggggcagagtagtaacactcgctcttatctacagggagtacttgctgcatttgatcctctacaactggtgttgctcccgttatgcggacagaagacagccccagggaacaaatgctaggaaatggcagggtaagagcttggtcccagctctgaatcagaagcccacgctcctaccaggaccctctccaccttttttcagttcactggattcactatggagcatcttgaaggactgtagggtctgtgaatctcctccaaacccttgggccagaagaactgtgggatttggagaggttgcagggtccactccccacccccatccccctcccagtgtgt

SEQ ID NO: 6899 - DNA, 1314 bp, Artificial sequence
  DNA replication origin
cttcattccatagaatacttccatggtggccaccggggaggggtctatcttcttggaacagttagctctttcgttatgttcttggacacccctgctacccctaaaaagaagtgtacctggctattgagaaattctatcattcacagaacagacatttttctgggcgggagtgggcagctatgattagtgagaggaggagcctaaaggtccgaaggtgggaaggggtggccataacccaggggagcacagtcaggcctgggaggagttaccaatcatgacactttgaacgaagaatcaacaagatctgttgattgcaagatattcttctattagtctggcttcccatgcaacaactatacaacaggtgctgggttggtggtgagggtttagaaagttgattttagcctggagcttgccttctgggagctgacagtcttataagggaaataagacaaaccgaacatagctccaattccagacaaagaaggaaaggagactatgggtcagggcaggcttcctggaggtgaggggctgagctgggctttgaagagtggtggtgtctgagagtgctagtgaaggatgacaccagggttttgacttagtagtgctagtgacagagatgggcaaatctgctgggattagagcatgtggtccaaatgtaggtggaaaggagaagtcctgcagttcctgttctttggtaagtggttgacttgggggtcacaaggtgacatttacaggcatcagaatgaatggattcttagggaggagagagaggaggaaagtttccggtaggagccagttcttagggctccaagggaggcagacacccaggagcagcagatgccgtgtcctgggtaggaacacgaagggcccaatgaagctcttccttactagcaaggcggctgttgattgttctggccccaaacattcaccactcaggccatctcagagaagcaagaacccaggaggtgtcagcggcctcagcccacaggggatccaggagagaggggcacgagtgcaccccacctggttccctcgtggcgactccatcctgcgggccctgggaatgcacagggtggctccggggacctttccgacagcactgtgggtgacactgggatgggtctgaaaatggtgtcgtgtcctccttttctggatctcccctctccgaccaggaggcctgtggccatctcggggcgcaggcaggaggcactggaagcggaagcgagtggggagtccgggtagagggagtcgcccacctgaccggcttcgccccctccggggtttgctgcagctgagggccccggaccagcg

SEQ ID NO: 6900 - DNA, 837 bp, Artificial sequence
  DNA replication origin
ccgaccaccaccccgtctgggaggtgaggagtgtctctgcccggccgccctgtctgagaagtgaggagcccctctgcccggcagccgccccatctgggaagtgaggagcgtctccacccggcagccgccccctccaggaggtgggggacagcccccgcccggccagccgccccgtccaggatggaggtggggggcagccccaacccggccagctgccccttccaggagggaggtggggggcagcccccgcccagccagccgccctgtccaggagggaggtggggggcagcccccgcccggccagccgccccatctgggagggaggtggggggcagcccccgcctggtagccgccccatctgggaggtggggggcacctctgcccagccacgctgtctgggaggtggggggcccctctgcccggccgccaccccgtctgggaggtgtacccagcagctcattgagaacaggccatgatgacgatggcagttttgttgagtggaagggggggaagtgtggggaaaggaaagagaaatcagattgttgctgtgtctgtgtagaaagaagtagacatgggagactccattttgttctgtactaagaaaaattcttctgccttgggatgctgttaatctatggccttacccccaaccccgtgctctctgaaacatgtgctgtgtccactcaggtttaaatggattaagggcggtccaagatgtgctttgttaaacagatgcttgaaggcagcatgctcgttaagagtcatcaccactccctaatctcaagtacccagggacacaaacactgcagaaggctgcagggtcctctgcctaggaaa

SEQ ID NO: 6901 - DNA, 965 bp, Artificial sequence
  DNA replication origin
cccacctccctcctggacagggcggctggctgggcgggggctgccccccacctccctcctggaaggggcagctggccgggttggggctgccccccacctccatcctggacggggcggctggccgggcgggggctgtcccccacctcctggagggggcggctgccgggtggagacgctcctcacttcccagatggggcggctgccgggcagaggggctcctcacttctcagacagggcggccgggcagagacactcctcacctcccagacggggtggtggtcgggcagagacactccttagttcccagacggggtcgcggccgggcagaggcgctccttacatctcagacggggcggcggggcagaggcgctccccacatctcagatgatggggggcggggtagaggcactccccacatctcagatgatgggcggccgggcagagacgctcctcacttcctagataggatggcggccgggaagaggcgctcctcacttcccagactgggcggccaggcagaggggctcctcacatcccagacgatgggtggccaggcagagacgctcctcgcttcccagacggggtggcggctgggcagaggctgcaatctcggcactttgggaggccaaggcaggcggctgggaggtggaggttgtagcgagccgagatcacgtcactgcactccagcctgggcaacattgagcactgagtgagcaagactccgtctgcaatcccggtaccttgggaggctgaggctggcggatcactcacgtttaggagctggagaccagcccggctaacacggcgaaaccccatctccaccaaaaatatacgaaaaccagtcaggcgtggcggctggcgcctgcaatcccaggcactcggcaggctgaagcaggagaatcaggcagggaggttgtagtgagccaagatggcggcactatagtccagcctccgcttggcatcag

SEQ ID NO: 6902 - DNA, 878 bp, Artificial sequence
  DNA replication origin
ctatttctttggcctcgtatgtgggtgagtggctgctcagctttcctgggtgcatgtctgctggaggtggtttactgggtttctctggcttatgttgtggatgtgcacctgcttggctggcctgggtctgggtctgtcattggcaacctgtagggctgtttctgaggcctggtatgtgcaaggctgcttgcctggcctgggggaatatgtcaggagctggggggcagacttagagctgtttctcaagcctgtgacatggctgcagctgctcagctggcctgggggtgcttctgtagagggtggcccacagggctgtttcatagacctgagatgcagacacaggattgcttagttggcctgggagcatgcctgctagaagtggcccatagggctgtttcttgaggctgggatgtggaaatacaactgcccagcaggcctgggggtgtggtgtgtctgccaggggtggctcatgaggctgtttctcaggtctgggatgcaggtgtaaggctgctcagtcagctcaggggtgtgcttactgggtgtggcttgcagggctattttcacatccaagagttgagctctttgctgcctggctgacctgggggcacacctgtgagggcggcctgtgggacttttctcaagtccttattgggagcataggacctttgggtaggccaggggcatgtctgtgttgggtgggaatgctgtggccatgtagccaggccactggccccagggaatattggctccttgtaggctcagggacctcttctgcttgggggagggtgggtaaggacatggctggctctcaagggcatgttcaccctgggtgggaatggaagactgttcttctggctgaaagtgtagcagcgggggtt

SEQ ID NO: 6903 - DNA, 975 bp, Artificial sequence
  DNA replication origin
ctcccggacggggcggctggttgggcagaggggctcctcacttcccagtaggggcggccgggcagaggcgcccctcacctcccggacagggcggctggccgggcggggggctgacccccccacctccctgccggatggggcagctggcctggcggggggctgacccccccacctccctcccggacggggcggctggcctggcggggggctgaccccccccacctccctcccggacggggtggctgccgggcggagacgctcctcacttcccagacggggtggctgccgggcggagaggctcctcacttctcagacggggcggctgccgggcggagaggctcctcacttctcataggggcggctgccgggcggagggtctcctcacttctcagatggggcggccgggcagagacgctcctcacctcccagacggggtggcggccgggcagaggcgctcctcacatcccagacggggcggcggggcagaggtgctctccacatcccagacgatgggcggccgggcaaagacgctcctcacttcctagatgtgatggcggccgggaagaggcgctcctcacttcctagatgggatggcggccgggcggagacgctcctcactttccagactgggcagccaggcagaggggctcctcacatcccagacgatgggcggccaggcggagacgctcctcactgcccagacggggtggcggccgggcagaggctgcaatctcggcactttgggaggccaaggcaggcggctgggaggtggaggttgtagcgagccgagatcacgccactgcactccagcctgggcgccattgagcactgagtgaaccacactccgtctgcaatcccagcacctcaggaggccgaggctggtggatcactcgcggttaggagctggagaccagcccggccaacacagcgaaaccccgtctccaccaaaaaaatacgaaaaccagtcaggcgtgg

SEQ ID NO: 6904 - DNA, 912 bp, Artificial sequence
  DNA replication origin
ccaaccagccgccccgtccgggagggaggtggggggttcaggccccgcccggccagccgcccagtccgggagggaggtgggggggttagccccccgcccggccagccgccccgtccgggaggtgaggggcgcctctgtccggccgcccctactgggaagtgaggagcccctctgcccagccagccgccccatccgggagggaggtgggggggtcagctccccgcccggccagccgcccggtccgggagggaggtgggcgggtcagccccccgcccggccagccgcccagtccgggagggaggtgggggggtcagccccccgcccggccagccgtcccgtccgggagggaggtgggggggggtcagccccccacccggccagccgccccgtccgggaggtgaggggcgcctctgcccggccgcccctactggaaagtgaggagcccctctgcccggccaccaccccgtctgggaggtgtgcccaacagctcattgagaacgggccaggatgacaatggcggctttgtggaatagaaaggggggaaaggtggggaaaagattgagaaatcggatggttgccgtgtctgtgtagaaagaagtagacatgggagacttttcattttgttctgtactaagaaaaattcttctgccttgggatcctgttgatctgtgaccttacccccaaccctgtgctctctgaaacgtgctgtgtccactcagagttaaatggattaagggcggtgcaagatgtgctttgttaaacagatgcttgaaggcagcatgctcattaagagtcatcaccactccctaatctcaagtacccagggacacaaatgctgcggaaggccgcagggtcctctgcctaggaaaaccagagacctttgttcacttgtttatctgctgaccttccctc

SEQ ID NO: 6905 - DNA, 766 bp, Artificial sequence
  DNA replication origin
gcccattgtctgggatgtgaggagcccctctgcctggctgcgcagtctggaaagtgaggagcgtctctgcccgcccgccatcccatctaggaagtgagaagcgtctctgcccggccacccatcgtctgagatgtggggagcgcctctgccccgccgccccgtctgggatgtgaggagcacctctgcccggccgcgaccccgtctgggaggtgaggagcgtctctgcccggccgccccgtctgagaagtgaggagaccctccgcccggcagccgccccgtctgagaagtgaggagcccctccgcccggcagccgccccgtctgagaagtgaggagcccctccgcccggcagctgcccctactgggaagtgaggagcccctctgcccggccaccaccccgtctgggaggtgtacccaacagctcattgagaacgggccatgatgacaatggcggttttgtggaatagaaaagggggaaaggtggggaaaagattgagaaatgggatggttgctgtgtctgtgtagaaagaagtagacgtgggagacttttcattttgttctgtactaagaaaaattcttctgccttgggatcctgttgatctatgaccttacccccaaccctgtgctctctgaaacatgtgctgtgtccactcagggttaaatggattaagggcggtgcaagatgtgctttgttaaacagatgcttgaaggcagcatgctcgttaagagtcatcaccactccctaatctcaagtactcagggacacaa

SEQ ID NO: 6906 - DNA, 1003 bp, Artificial sequence
  DNA replication origin
ttgggggtaaggtcatagatcaacaggatcccaaggcagaagaatttttcttagtacagaacaaaatgaaaagtctcccacgtctacttctttctacacagacacagcaaccatcccatttctcaatcttttccccacctttcccccttttctattccacaaaaccgccattgtcatcatggcccgttctcaatgagctgttgggtacacctcccagacggggtggtggccgggcagaggggctcctcacttcccagtaggggcagctgccgggcggaggggctcctcacttctcagacggggcggctgccgggcggaggggctcctcacttctcagacggggcggctgccgggcggagggtctcctcacttctcagacggggcggccgggcagagacgctcctcacctcccagacggggtcgcggccgggcagaggtgctcctcacatcccagacggggcggcggggcagaggcgctccccacatctcagacgatgggtggccgggcagagacgcttctcacttcctagatgggatggcgggcgggcagagacgctcctcactttccagactgcgcagccaggcagaggggctcctcacatcccagacaatgggcagccaggcagagacgctcctcacttcccagacggggtggcggccgggcagaggctgcaatctcggcactttgggaggccaaggcaggcagctgggaggtagaggttgtagcaagccgagatcacgccactgcactccagcctgggcaccattgagcactgagtgaacgagactccgtctgcaatcccggcacctcaggaggccgaggctggcggatcacttgcggttaggagctggagaccagcccggccaacccagcgaaaccccgtctccaccaaaaaaatacgaaaaccagtcaggcgtggcggcgcgcgcctgcaatcgcaggcactcggcaggctgaggcaggagaatcaggcagggaggttgcagtgagccgagatggcag

SEQ ID NO: 6907 - DNA, 1062 bp, Artificial sequence
  DNA replication origin
cccaagaaagatttactagggcgggcgccggagcctcctcatgcaggccccgcggggacctgctgtcgcccccgcccccgcccccgccctcgccctcttggccccggccgtctggtgatgttgtggggttcagcgccgccgccagaacggtcacggagcgcggcccccggccccctatcccgcaccttcgcagtcgcccggccgcagcgcccggctgcccggcagcacgctcagagccagcgccaccgccagcccctgcgtggcccacatcctcctcatcctcctcatcctcctcctcctcctcctcctccgctgccgccgccgaccgactgaaccgcacccgccgcgccgcaccgcctccaagtcccggccgcgcgccgtagctccccattggcggggggccccccggcgccctcccacatgccacttccccattggtccaggagccgcgagcccagacgggcggctccacgctgccctccctcattggctggtggtgtctgagccctagacagttgtcggccgctgattgaacccgggctggccgcaggaagcgactacagcagcgacggaagcggtgtgggccgccatcttgggtaagggcagcgactgtggctgaggctgggtactgctagctgaatggggttcggccacgccttacatctgttgagttgacccgcgtacccctgccctgggccccaggctccctcgaaaacccctgctgatctcctcgcccggactccgactcgtggtgcaggagttctggggtcagccaagacaacaggttaggcaggaagggcgggcggccgcaggcaaggctcaaagaggtttcttttttcttctttcattcgcgtgggcaacggatccaacctttgaaagcccacctgctgatcctccacctgaccggagcccgccgtgcataggctgataggagacgtgcggggtggacggactgcgggacatctgaaggaagggctcaaggcgcgccaagctcaaagctgggccgccactctagaccgtggagggaagcgcccgggccagatcatcggtcgaggacatggg

SEQ ID NO: 6908 - DNA, 1275 bp, Artificial sequence
  DNA replication origin
tctagggctcagacaccaccagccaatgagggagggcagcgtggagccgcccgtctgggctcgcggctcctggaccaatggggaagtggcatgtgggagggcgccggggggccccccgccaatggggagctacggcgcgcggccgggacttggaggcggtgcggcgcggcgggtgcggttcagtcggtcggcggcggcagcggaggaggaggaggaggaggaggatgaggaggatgaggaggatgtgggccacgcaggggctggcggtggcgctggctctgagcgtgctgccgggcagccgggcgctgcggccgggcgactgcgaaggtgcgggatagggggccgggggccgcgctccgtgaccgttctggcggcggcgctgaaccccacaacatcaccagacggccggggccaagagggcgagggcgggggcgggggcgggggcgacagcaggtccccgcggggcctgcatgaggaggctccggcgcccgccctagtaaatctttcttgggcctagaaaacattggtccgacgaagaaaagttgagactagatcccgttgaaaacttgtcctgaaatctccatcactcctgagttattgtccccaccaccatctagaggttaccgctccccgttcggcgtcgggagctccagggctggccgtgggtgctgcgccctgtctgttgggatcacgaagctgcacctctgggtccgctgttgtatttggaaattagcagcagcattttgatcatttttctcttcaccttccagtctctccatttatgaggtcacagtgagtcccgtctcaaggacacgtgttcaccatgggcttaaacttgatgaaaggagcagggagaagtcgtttataggtcattgggtgatgcttggtcctttgatgccctgggtgtaccaggggacccccgccacttggaaccgggttctgtctacctgtagacacctgagaaaaatcggtgatggaaaagctcacctctaatgattcatctccgtgtctcctattaaaattgctggcggagttcttttctggtggattggaacagcttggtgattgctgagcatctcccgtccctctcttttccagtttgtatttcttatctgggaagattttaccaggacctcaaagacagagatgtcacattctcaccagccactattgaaaacgaacttataaagttctgccgggaagcaagaggcaaagagaatcggttggtaagtagctggtgatcctccccaactggccctggctcatgttaaccct

SEQ ID NO: 6909 - DNA, 1500 bp, Artificial sequence
  DNA replication origin
tcgcgctcccgcggacgcttggcggacgatgacgagccgcgcccgctcgggctagagtctcgctcgctctgccgcttcatggcgctggcgcggcgggcgggcggcccgtaggtttctcacagcggcggcggcggaggcggcggccgaggaggcagcgcccccggcgccgccatcttggacaaaaggactcggcgcggcggtggcggcggggcggggcgggagcggcgccgaggggccgggcattgcgttatcaaggtgcgccgtcctgccacgtgactctgcggcgggcggagcaagacccgcgccgggcctgcctcatcgcgctgcgtcgcccagtgccaggtgaccctgtgagtgctgggtgagtgggaccggccgcgcgctctggcgccaccgcgcggcccgcatggccgatgcttgaggctacgcggagtgtagtgaaccctgagaggccggcgagacgacctaacgctttgtgctcccagccgtgctttgccgctctgggtccagctatctcctcttgcaggcactggagcccgcgctgattggagcaggagtggcagcttccatggccgttgggatctggggcattgacccagtcagtggtctctttatgtagtatcccctcagtcctaggactaggcttgagcaaaccccacatcaccctcgttggcatctcctgcctgggatccggcgttgacggcgccaaggactaatgcatgcctatccttagaccctgcccaggacccaaggcccacattctgcgcattctccacgtgcaggttcacctgcagcagtccccgaaaaggccgtgaggacaattgctgtcacgcaggtaataaccgaaagcagagacaagcctgcagttgcagttgatggagttggaatagactctttaacgccactcttgggtcccaccctcttctgtgggcagatagcaggctggaaaggtagggccgtaagagccaaggatgaagaggccatatgcacagatagtgccagcagttatcacaccttgccacgctgacccctcgctggccagtaccctcctgttcatcaccttcaggacgacctcttctccccaggtgaggtgagggaaagggtgcccaggtgctcaagcccattgaggaagctttcattctccaaggacagttgctggagccatggtagaacctgacccaatttctggcacagaatccttgcgatggggaagagcagaccaagtcatgccctcttcgcacaaagagaaagcagctcctggagtagctcaggcaggtgcagggggaaaggtcttggaagaaagcaatgggttccacagcagcaaggcctcctacaggcaaactgagcttaggagacacaagtgaagtgatctgaggcaagaccaattacttggaaagcactggttcttagtccgtcctttcaggtggtttctacaggtgtcttcattgagccacagctcacactaacaactgggtttcctaagcaccagtgccacagaga

SEQ ID NO: 6910 - DNA, 1660 bp, Artificial sequence
  DNA replication origin
gaccggctcttccaccagttcaagcgcttcggcgagatcagcctccgcctgtcgcacacgcctgagctgggccgtgtggcctacgtgaatttccggcacccacaggacgcacgcgaggcccgccagcacgccctggcccggcagctgctgctctacgaccgcccgctcaaggtagagcccgtgtacctgcgtggcggcggcgggagcagtcggcgaagtagcagcagcagcgccgccgcttccacgcctcccccagggccgcccgcgcccgccgacccgctcggctacctcccgctacacggaggctaccagtacaagcagcgctcgctgtcccccgtcgctgccccgcccctgcgggagccccgtgcccgtcacgccgccgcagccttcgccctggatgccgctgctgccgccgccgtgggactgtcccgggagcgggccctggactactacgggctgtacgacgaccgtgggcgcccctatggctacccagctgtgtgtgaggaggacctgatgcccgaggatgaccagcgggccacgcgcaacctcttcattggtaacctggaccacagcgtatctgaggtggagctgcgaagggccttcgagaaatatggcatcatcgaggaggtggtcatcaagaggcctgcccgtggccagggcggtgcctatgccttcctcaagttccagaacctggacatggcccatagggctaaggtggccatgtcgggccgagtgattggtcgcaaccccattaagataggctatggcaaggccaaccccaccactcgtctctgggtgggtggcctgggacctaacacgtcactggcggctctggcccgagagtttgaccgctttgggagcattcggaccattgatcacgtcaaaggagatagctttgcctatattcagtacgagagcttggacgcagcccaggccgcctgtgctaaaatgaggggttttcccttgggtggaccagaccgcaggctccgcgtggattttgccaaagcagaggagactcggtacccccagcagtaccagccctcgccactccctgtgcattatgagctgctcacagatggatacacccggcaccgcaacctggacgccgacctggtgcgggacaggacgcccccacaccttctgtactcagaccgagaccggacttttttggaaggggactggaccagccccagtaaaagctctgaccgccgaaacagccttgagggctacagtcgctcagtgcgcagccggagtggtgagcgttggggggcagatggagaccgtggtttgcccaagccctgggaagagaggcggaaacggagaagcctttccagtgaccgtgggaggacaacccattcaccatatgaggaacggagtaggaccaagggcagtgggcagcagtcagagcggggctccgaccgcacccctgagcgcagccgcaaggagaaccactccagtgaagggaccaaggagtccagcagcaactccctcagcaacagcagacatggggctgaggaacggggccaccaccaccaccaccacgaggctgcagactcttcccacgggaagaaggcaagagacagcgagcgcaatcaccggaccacagaggccgagcccaagcctctggaagagccaaaacacgagaccaaaaagctgaaga

SEQ ID NO: 6911 - DNA, 931 bp, Artificial sequence
  DNA replication origin
gtggctcggggcagctagatggacccagcggcccgggccttcggggcacggggtcccccacccgggaaactccagtggccggaggcttggcgggggtcttgggcctcgacccggggcctcagtggcttgatatttgaggatttcgtagccggggaagggagtcgtagggacacggagacttaactgttgcccctctgcgcttttggctctggatgctggcgccccggaggatgaccagagcgcggtgtggggttgggaaagtatttggaattttaggggcttctgtgtgtctaatccctaaggcgcatctggatgcgtctccccgaccccctctcctgaggtctgggaatttggcagactggggtcgggctggggcagaagaggcattgagagtttagcttccctgaggtaactggtgattagttcctggaaaggcaggagctcagctgggcacaagagagttaagcagagagctggatcctccggggccctgatgcaccctgacgaggagtggttttcaggcaaggaacttatcacaggagtgagtagtggcacacggtgagtagtgctagctgtcttgtcgttagggtgaggccggtgggagttgtggtttggggagtgtagaggagggttgataggctactgagattggagaatcagctttatgtgggtcatggtggtggcagcctgggagatgaacaaggaaactttgcagagtgggcttcctgatggagagtgacctcttactgcgtgggagtgggtgactcagatctgttaggattcctgttgcttgctagggattgtggctgactatattggtggctgaacattgaggtggatgcaactggaagggttatgtggggctggatgagtttgttcccacgtagaggacagtgtggacctttcttactccaagtcagagtggtgactg

SEQ ID NO: 6912 - DNA, 913 bp, Artificial sequence
  DNA replication origin
gaggtgaggagcgtctctgaccggccgccccgtctgagaagtgaggagcccctccacccggcagccgccccgtctgggaagtgaggagcccctctgcccggcagccgccctgtccgggaagtgaggagcatctccgccccgcagctgccccgcccgggaggtggggggcagcccccacccggccagccaccccgtccgggaggaggggggcagcccccgcccggccagccgccccgtccgggaggtggggggcagcccccgcccggccgccgccccatctgggaggtggggggcgcctctgcccagccgccccgtctgggaggtgaggagcccctctgcccggccgccaccccatctgggaggtggggggcccctctgcccggccaccccgtctgggaagtaaggagcccctctgcccggccgccgccccgtctgggaggtggggggcccctctgcccggccgccccgtctgggaagtgaggagcccctctgcccatccaccaccccgtctgggaggtgtacccaacagctcattgagaacgggccatgatgacaatggcggttttgtcgaatagaaaagggggaaatgtggggaaaagaaagaaagatcggattgttattgtgtctgtgtagaaagaagtagacataggagactccattttgttctgtactaggaaaagttcttctgccttgggatgctgttgatctataaccttacccccaaccccgtgctctctgaaacatgtgctgtgtccactaagggttaaatggattaagggcggtgcaagatgtgctttgttaaacagatgcttgaaggcagcatactcgttaagagtcatcaccactccctaatctcaagtacccagggacacaaacactgcggaaggcggcagggccctctgcctaggaaaac

SEQ ID NO: 6913 - DNA, 1249 bp, Artificial sequence
  DNA replication origin
tctcaatgagctgttgggtacacctcccagacggggtggtggatgggcagaggggctcctcacttcccagacggggcggccgggcagaggggccccccacctcccagacggggcggcggccgggcagaggggctccttacttcccagacggggtggccgggcagaggggccccccacctcccagatggggtggcggccgggcagaggggctcctcacctcccagacggggcggctgggcagaggcgccccccacctcccagatggggcggcggccgggcgggggctgccccccacctcccggacggggcggctggccgggcgggggctgcccccctcctcccggacggggtggctggccgggtgggggctgccccccacctcccgggcggggcagctgcggggcggagatgctcctcacttcccggacagggcggctgccgggcagaggggctcctcacttcccagacggggcggctgccgggtggaggggctcctcacttctcagacggggcggccggtcagagacgctcctcacctcccagacgaggtggcggcggggcagagacactcctcagttcccacacggggtcgcggccgggcagaggcgctcttcacatctcagacggggcggcggggcagaggcactccccacatcccagaccatgggcagccgggcagagacgctcctcacttcctagatgggatgacggccgggaagaggcaatcctcacttcacagactgcgccgctgggcagaggggctcctcacatcccagacgatgggcggccaggcagagacgctcctcacttcctagacggggtggcggccgggcagaggctgcaatctcggcactttgggaggccaaggcaggcggctgggaggtggaggttgtagcgagcggagatcacaccactgcactccagcctgggcaacgttgagcactgagtgagcgagactccgtctgcaatcccggcacctcgggaggctgaggctggcagatcactcctggtcaggagctggagaccagcccggccaacacggcgaaaccccgtctccaccaaaaaatacgaaaaccagtcaggtgtggcggcgcacgcctgcaatcccaggcactcggcaggctgaggcaggagaatcaggcagggaggttgcagtgtgccgagatgacggcagtacagtccagcctcggctcggcatcagagggagacccagtccagccttggcttggcatcagagggagaccgtgca

SEQ ID NO: 6914 - DNA, 1426 bp, Artificial sequence
  DNA replication origin
ctgggcaggctgatgtcatggcctgcagccccagtcaccagcggactctcctcccacaaaagaggtgctgaagctcctgaggcacatgttgaactctgatgtggggctctagagttccccaatcaggctaagggaagtgagcagagagaacaagataaagaatgggcacttccttataatggtttcctgggaaaagctcaccaccttctgagaagcaggagaaatgaccacgcagaccctgcaggcagaggctgtcagtctctgagcccgggccatggctgctccttgtgtcaaaggaaatgctaccaagtgtgtagcccgcctgcctggggcacctaagctgagggtttgaccatgtgcttgatgttcataggtaaaacaactgctgcgacctgcactggcccagcccggagtgcctgtgaggggccagctgcctgttctgccagtttgcctagagggctgggacaggcttggccctgtggataaggttcaaactcccctgcctgcggaaggaagaatgtgaagcagagggaaaggaagctgggattttgactgtctctgtgtgcccagcctgctctttgctggtgcagtagtgggatccacaaggtgaaccaccctgtgactgctgacttttcccaccaccaccttcgtggtgttcccatctgctggatccccctcccaaacatcagtccttgtcaggataccaaagtagctcttggcctcgccggtcttgtagccaagcttatgagcatagttgtcaccttccccacctcccaccaaaagtccgggattttcacgaggggagcgttttatctttgggcccctagaagagtgctttgtagtttgtaggtcctcagaaatttgaggtgaagattgaaccaatcatcaaggagcttacacttgacgtgggaatcacgtaagttaccgctaaaccacaaaggtagaccagcctcccacagccacaacctgggcactgagggaggagcctggaagaagggcattcccatggaacgtgaactccaggagggcagaaccttggttttgttcactctatccccagcccctagaactgtcctggcaaggagtaataataagtgttggatggatgaatatactcacggaagtgggaatgggtgggtggaggcaggaagcagatatttgcgctatgcagaagttggatccaccagtttcttccgcgagcccagactgggcttcagcttcctcacctatgcctttcttggttcccaagtctgttgcgaagccacagtgagagaaagtggcaggactaaaggtggtacaaatgccagaggctgatactgctgtgctgcgcctccctaggctgtacaaattctcctcagccccagctccctggtccccagcctggccctctactgcgggccactgggctgcctcccgtacccgagcc

SEQ ID NO: 6915 - DNA, 803 bp, Artificial sequence
  DNA replication origin
gcccctactcttccgggcagcccacttccgcggccaccggtgcagggcatgccccggggccgtggaggtgagggaaagaggcgcgagtcgcgttttaactccgcccccgtcccccaaggccgcgcctcgcagcctgggctgcaaactttagcgtcctttaagttacagacgtgcgtggggctccgtgaggaggtgggcgaagagaaaggctctgagtaaataggcaaggcccggggtgagcaggggctggaatccgaaagtgggaggcggcggccccccaccctccatagtccttccgccctctgctagcaccgaagtttagcccaggacgggggccgtttaagggcccggccctccgccgccgcgcacgtgagcggcaccaggaagctggctgggcgcagccttccctgaggctcgctggcaccggccgcacgcgtccatcccgggcctctgagcggagggggagccgaggctagagggagggcgcagtctgcccaaggtcagcggcagcggcagtttctgggcgccaagtgtgattggagtactccaggaagaggggcgtgaccagagctctagcgaagagacctgacattgtaaagctaggtttggcttctgatttccacagggggtttgagaatgggacgagggtgctttagagggaccggtaggctttccctgaggacggtaatcagggcatgatggttggctcagtggttatttcctgggcaggggtgactgttctttcagctcccagcactggagcgctcggcccctgccgcactggatgccagcagttactaaaa

SEQ ID NO: 6916 - DNA, 1046 bp, Artificial sequence
  DNA replication origin
gggagggcgcagtctgcccaaggtcagcggcagcggcagtttctgggcgccaagtgtgattggagtactccaggaagaggggcgtgaccagagctctagcgaagagacctgacattgtaaagctaggtttggcttctgatttccacagggggtttgagaatgggacgagggtgctttagagggaccggtaggctttccctgaggacggtaatcagggcatgatggttggctcagtggttatttcctgggcaggggtgactgttctttcagctcccagcactggagcgctcggcccctgccgcactggatgccagcagttactaaaagtgagcctggcatttcaggtgagctcccagaccttcttccttttctcttgaatataggggaaattcacgttacctctccacgtgccgaccaaggctctgagacccccaggtgggttttcttcccccccgccgttttctgagcagtttgggaagtgagaggaagagaaaggtagatactaagtttccttgaggagacaggaagtgttcagctgagatggcagatcagggtgagggcttgtcattcccaaggcaagtgggggcctagatgctgagagttttccagctttgggctcagagatgtccaacaaggatttaatgcttcaggcgttttggaagccagtcaccagagaggagagagaaagtggaaatgaggggctggaatcagactgtctgggcttgtgttgcctgcattttggtccacgtggctctgtttaatacctgtgttaccttgggcaagtctcttaacctctaactacttgaacctttagccttacctacctctttggattgctttgagggtgaatgaagtagctgtgtttcaacatttagacagtgcctggcgtatagtaagcattcagtggaagatttctcatcattatcaaagaaaattggaatgaaagttactggagacaagatgagtaggacaggcagaaaagagagagatactgatgggtagaagcacagatgggtgagactagtgggcaacacctcaatttcttg

SEQ ID NO: 6917 - DNA, 1121 bp, Artificial sequence
  DNA replication origin
cccacagtgcctccccagcaggtctttctgaattatgggagaggaagaaaagaggtaagagagaggacctggacctgaactatcctcatttagtgctttgtattcaggacatcaccctgtgccctggcttcagctagggattgggagcaaatagaagacagaagaggtcaggcccaggacgaaggctgatgatgggtcccactcccaggctacccagaggctggaggtttgcttagaactaggtggctgcaaatgcccaaaagaaggaggcaatgtgtgggccaaggacgggtcacatctcctacataagctctaggcccagcaagggatgaggtctggctgaggggccctgggccttgccttactgttcaccctgagctacccagtcctatctatccttctgtgccaggctggatacccaggcagctgcacagccagcaagcagctgttgcatcccacccgaggtagtggcgtctcctcactgggtgaagtgatgcatgctcatttttaattacagacaccaacatgcacctgcctgcacacagcagtccctgcaagtggggactcaaaccctggaggcccctcaggcagctggtcttcatggcacgtgcatgctttggggaggtatagcaagaggctgcagctagaaggtagcacgttattattctgcccggaaactttcctctcacccccaccaggctgccccaaagcttctggcccagaagccagacctgtctgttggtgctctggggccttgccacagcagcagggagagcctgcagaagggctggtgagcaccttcccctctctctactctcccctcacaccagcagagcccaaagctctgaaaatggcaggcaaaggagacagggagtaagacaggatggccagggagggaaaagaggaagcaggaagtggcagagagcaccccaggcaggagcctagggcattggcttggctacacaaatcggtagcttccctctggccctcaatttgcccaagtatgaaataaagggtctacagtcataccaccctgaatgcacctgatcttgtctgatctcagaagctaagcaaggtcgggtctagttagtacttggatgggagactgcctggaataccgg

SEQ ID NO: 6918 - DNA, 1799 bp, Artificial sequence
  DNA replication origin
caggaccctgggacgtgaggtaagggccaaaaaggtcggcagcggcagcggcaccaccaccaccggctcaccctacctggcgcgctggctctggcgcggagagaatcggagtggagcggggggcgcgaggctccggctcccgctcgctcgctcgctggctcgctggctctgcgctctccgcccgcccgctcgccccgccgctttcaatcgcggcccgccccgccccgcccccggccccggcccgcccccagcccctcctccgttcctccagacgccaggtctcctgctcccaacccagcctccgcctcctctggacactccgcgctccagcttttctggggacctcagggcctggagctgtccgcctcgtggtgctgaatccccgagcgctctcgctctgcgctggagcgggtgcttcgtggcccactccgccccatagtcagactaccacctagagagcataggtggggggcggggggatgccacggggcacggggtggggaaggtcactgcgccccgacaggtgcccatagtgctactgcagagtggaggagctggccttagtgcaaggggtgcctctgggggataggtaaaggggcgcgtgggagacgggtggagtctattctccccactcagcgatttcagctgggtccacatcccaggcctgagttggaggcatgtgtcctctgccacttttgagacctggagccagagtcactatgaggaaaagattgggggaagggagaggtcagaggagaatggggcctccccttccttcctgcagatgccctttaaacctgccacccactcccatgtaaaaagggtatttaagcaaggagagagcaacctgcaggaagggctgcagaaccaagtactagggtcaaccctgagggagtgttagggatggcaggggcatctgggaggggaggggcctagggaaaggcttctggaactggctgctgcgtaggagggagtgagagctggagcccaagcagagggaggacagctctgagaagattctcttgactcttccctcccacagcaggatggggaaggacgcccctgggtagagggtagtggataagctgtagtgccagactgtgctgaaggaatggggattagagagcctgtgctatctgcccctaacatgtgcacacactaacaagtgccaaggggcatggcatccctacacacattcccgacactgccctttcttccacaggtgtcagtggaagcaaggccagctcagatacatgctaatgaacatgccaagcccagacccctcaggcacacacacccacatgtgcgtgtggcagtccgtaggggtgcgggggtgatcaccaaggacgagctttttccctggacacagaaacctgatgtcctgctgctgtggaaagaatacagctttgaaacgaaacagacacataaaacccaaacaaacacaagccccatcactaacaggagacaaggtggcagtgggagacagacatgctgtcttccacctccaactctgccaccggctgctctcaccctctctggctgcctcagagcaacagctccctggggtaggtgagcaatgggccaggcctctggagcagaggggttgacagcaggagggtgctgaggtgaggagtcacacactccttctagccacactcccaacctgctcaacaagtcagcctcacaaaaggcacagggctgtaaacacagatatggctgtgtacagcatcagccagaaaagcccatgatgtggcctgcagcaaacaagctgcacagtcgcagcacatggacacacagtt

SEQ ID NO: 6919 - DNA, 922 bp, Artificial sequence
  DNA replication origin
aagctactgcaaggaagcttctagtttcccttccaattcacagcagcccatgagccccttttcagcaggaattctgggtcaccacctccggcctccctccctagcccccatttgggtggcttccacgtacctggatggagacatcactgtaggaaccgccaataacaccagtgatggcagtgggagcatcaccatgggtcgcataagagccgtcggggcagatgtggcgtgagccatcagcaccacggctgagtgaggcacgcacaaagtccagtgcctgctccagcgcatgtgtgtccttggagcaactgtcgaggatgtgtgcacccaggcgcacgccaggcagcaggtgcgggtcacggttgatgcggtccagtgcaaaaagcatggcctccaggcgctggatgccacggtgctcattgacaggaccacagtcctctgctgggccgcccttctggtgcactgggaacagcccacccagcaccaagtctccctccagggtcagcaccttcttggctgggccctcagccacagcaccccacagcagcagcagtgccaggagcgcaagcagcgatcccatggccccaaaggggatggatgggtcccgcagacctgggtctccaggggatgagattagaagcagcgaaggcaaagagaggaggaaacagggaccaggaaaggacagacaagaagagagatgcgaagggacccagctcctgcagagagatagaaagacagaaaaacagaccaggaaaagtggaacctgagagcagctgccccttctgactctgcctccccacgagcccctttcctaggtactcaaaagccagggagggacaggatggtgtcattaagtaggttgagaagctcctgggactcccctggacctgtctctcagccctggcctcagcttggtgagaga

SEQ ID NO: 6920 - DNA, 787 bp, Artificial sequence
  DNA replication origin
agtttgagaccagcctgaccaacgtggtgaggtcaggctcgtctctactaaaaatacaaaaattagccgggcatggtggcaggcgcctgtaatcccagctacttgggaggctgaggcaggagaatcacttaaacccgggaggcagagattgcagtgggctgagatctcaccactgcactccagcctgggagacagagcgatatcctgtctcaaaaaagaaaaaaaaaaaaagtgttgtgaatccaattttataaggaagaagctgtgacacagaaaagagaaataacgtgccatggtcatgcagttagtaagtgggagacctgactattaagcccctcagggttaacatcaagggtgagggtgtgtgtgtgtgtgagggtgtgtgtgtctgggtgtgtgtgtgggtgtgggggtgggtgtggggtgtgtgtgggtgtgtggggtgcgtgtgtgtgggtgtgttgggtgtgtgtgggtgtgtcgggtgtgtgtgggtgtgtggggggctgtgtgtgtgtgtgagggtgtgtggggtgtgtgtgtgtgtgtgagggtgtgtgtgtgtgtgggagtaatgagagtaagatgttctcttgcacagtctctaaaaatcgaccaccattatgtgaccagggcactttcttagcttctgtaaaagctactgcaaggaagcttctagtttcccttccaattcacagcagcccatgagccccttttcagcaggaattctgggtcaccacctccggcctccctccctagcccccatttgggtggcttccacgtacct

SEQ ID NO: 6921 - DNA, 1350 bp, Artificial sequence
  DNA replication origin
ggatcccaaggcagaagaatttttcttagtatagaacaaaatgaaaagtctcccatgtctacctctttctacacagacatggcaaccatccgatttctcaatcttttccccacctttcccccttttctattccacaaaaccgccattgtcatcatggcccattctcaatgagctgttgggcacacctcccagacggggtggtggccaggcagaggggctcctcacttcccagtaggggcggccgggcagaggcgcccctcacctcccggacggggcggctggccaggcggggggctgacccccccacctccctcccggatggggcagctggccgggcagaggggctcctcacttcccagtaggggcggccgggcagaggcgcccctcacctcccggacggggcggctggccgggcgggggggagacccccacacctccctcccggacggggtggctgccgggcggagacgctcctcacttcccagatggggtggctgccgggcggagaggctcctcacttctcagacggggtggctgctgggcagaggggctcctctcttctcagacggggcggttgccaggcagagggtctcctcacttctcagaaggggtggctgggcagagacgctcctcacctcccagatggggtcacggccgggcagaggcgctcctcacatcccagacggggcggcggggcagaggcgctccccacatctcagacgatgggcggccgggcagagacgctcttcacttcctagatgggatggcggccgggaagaggcactcctcacttcctagatgggatggcggccggacggagacgctcctcacttcccagactgggcagccaggcagaggggctcctcacatcccagacgatgggcggccaggcagagacgctcctcacttcccagacggggtggcggccgggcagaggatgcaatctcggcactttgggaggccaaggcaggcggctgggaggtggaggttgtagcgagccgagatcatgccactgcactccagccggggcaccattgagcactgagtgaacgagactccgtctgcaatcccggcacctcgggaggccgaggctggcggatcactcacggttaggagctggagaccggccaggccaacacagcgaaaccccgtctccaccaaaaaaaatacgaaaaccagtcaggcgtggcagcgcgtgcctacaatcgcaggcactcggcaggctgaggcaggagaatcaggcagggaggttgcagtgagccgagatggcagcagtacagtccagcttcggctcggcatgagagggagaccgtggaaacagagggagagggagaccgtggggagacggga

SEQ ID NO: 6922 - DNA, 953 bp, Artificial sequence
  DNA replication origin
ccgtctgggatgtgaggagcgcctctgcccggccgtgaccccatctgggaggtgaggagcgtctctgcccagccaccccttctgagaagtgaggagaccctctgcctggcaaccgccccgtctgagaagagaggagcccctctgcccagcagccaccccgtctgagaagtgaggagcctctccgcccggcagccaccccatctgggaagtgaggagcgtctccgcccggcagccaccccgtccgggagggaggtgtgggggtctcccccccgcccggccagccgccccgtccgggaggtgaggggcgcctctgcccggccgcccctactgggaagtgaggagcccctctgcccggccagctgccccatccgggagggaggtgggggggtcagccccccgcctggccagccgccccgtccgggaggtgaggggcgcctctgcccggccgcccctactgggaagtgaggagcccctctgcctggccaccaccccgtctgggaggtgtgcccaacagctcattgagaatgggccatgatgacaatggcggttttgtggaatagaaaagggggaaaggtggggaaaagattgagaaatcggatggttgccatgtctgtgtagaaagaggtagacatgggagacttttcattttgttctatactaagaaaaattcttctgccttgggatcctgttgatctgtgaccttacccccaaccctgtgctctctgaaacatgtgctgtgtccactcagggttaaatggattaagggcggtgcaagatgtgctttgttaaacagatgcttgaaggcagcatgctcgttaagagtcgtcaccactccctaatctcaagtacccagggacacaaacactgcggaaggccgcagggtcctctgcctaggaaaaccagagacctttgttcacttgtttatctgctgaccttccctccactattgtcct

SEQ ID NO: 6923 - DNA, 2221 bp, Artificial sequence
  DNA replication origin
cctcagggcagcgcgacgcgccaccacgaagatgccgccgtaggcgccgagcagcaggagggcgggcagcgcgaaggccagcagggcccagagcggccggaagggcccgaggcccccagccaggaccgagcagcgagcaggagcagggggcggtgcgggcggcgtgccgagcagggagagcgcgcccagcagtcccgccgcggcccacacggcggtgagcacgagcacaggcggcggccgcgagcctggccgcagcgggtgcacgatgaggcggtagcgtgccaggccaagtgcggccaccccgagcgtgcaggccggcagcagagcggcggagaggaagcgagcggcgcggcatggcgcggggcccaggcgcacgcggcccagcccgggcggcggtgcggccagcaggcccagcggcatgatggaggcggccgccagcaggtccacgacgcacaggtgcgccaggtagagcgcgtcgcgcagtcccggcgtgcgcagcaccacgaccagcagcgcgccgttgcccagcagtgcccccacctccacgacagctgccaggatcaaccccaacgagcctgcgacttctgaggcgttcagccctgtggagttggccatttgggctctcaggcttcaccctgcgctgggatgtagatggcagaatggagcctaaagctgcaggatttccatcacctgtcctctgctcctcttgtcccttgctcctccggcccctcacctcattggctgcccaggaggtggctccgacgcccaggctgccatcctcttgggggcttggccaggcccatggaggggtgcaaggatgagtctgctgtctttctcccctgccccagcccagctccagcaactcagcccctgtcggagatggtactggctgtcactctgatgttgccacacacggctggcaagggaggggcagggcctggcgccagccccctgggtcctagcagctgccagctgaaggctggaggctctgctgtggaagtgcttgggggtgcctctagggtggaggggtggaggacagagcaggcacagacttggagcctagacttgagagggttagagtgtgggctttggagtcagccagagcctgctctacctttctcagtggtgagaagtgccccccccatctcctgtcctgccccatcctcatcaatgggatgagcatttagctctcatattaaagggaaactgaggtaccagtgagacaaaagctgaagcaggaggacccttaggcatgccctggccccccaagagggctagttctctcagaaagaaaggaggctggaaaagtgagagaaaagcatagaacgtggcacatagtaggtgctcagctaatattaacttcatagagaataggtgctccatgatagtgtgtgagatgagtgagaggaggccttagcaggcagatgctgtttggttttttgttgctgttgtttgcttttgtttttgctgctagcaaacaggtccccttttggtaacagcaccctgaattttctttcctttttttttttttttgagacagggtctctgttgcccaggctggaatgcagtggcacaatcttggctcactgtaatctctgcctcccaggctcaaacgatcctcccacctcagcctcctgagtagctggaactacaggcacgagccaccacacctggctaaacaccctgaattttctttaggaaaccacccctccccaattctcaggacaggaaatttgggtgaacaagatccccacactctattttcctgattaggcacaaaacccagtcttgactaatcagtgaatgtcagggttccccaccccaatgtcgttggctcatggaaagccatgtaactcccgtggggcatatgcccccaggcaaagtcacccagtttcatggcaaaaccctatctatagtctgatagcttgcatttgtatctgaagcctcttcctcttttcacgggtatccagctgccttttcaacatttccccaccaggactttcactaatgggtatctcaaacttcctatgtccaaaacagaaccatgactcttgatccctccccgacaacctgctcctcccagaatcttctccatcttagtgtccatctcaggatgattccctctcccccacgccctatatccagtccgctgaggtctctggaatcctgccatttctcaccatcaccatcaagctggtcccagctaccaccacctctcacc

SEQ ID NO: 6924 - DNA, 1447 bp, Artificial sequence
  DNA replication origin
acggcggcatcttcgtggtggcgcgtcgcgctgccctgaggcccccacggccggcgcgcgggtcccgactccactcggactctctggatagccgcctttccatcttgccgccgctccggcctcgcctgcccgggggcaaggcggccctggccccagcgctggccgtgggccaatttgcagcctgctggctgccttatggctgcgcgtgcctggcgcccgcagcgcgggccgcggaagccgaagcggctgtcacctgggtcgcctactcggccttcgcggctcaccccttcctgtacgggctgctgcagcgccccgtgcgcttggcactgggccgcctctctcgccgtgcactgcctggacctgtgcgggcctgcactccgcaagcctggcacccgcgggcactcttgcaatgcctccagagacccccagagggccctgccgtaggcccttctgaggctccagaacagacccccgagttggcaggagggcggagccccgcataccaggggccacctgagagttctctctcctgagcaggagaaaggagggtggtttccgtgggggctcatccaacccctgcacaggtcacagcaggtgccctgctggatatctgggtctggaacaggaggagaaagggtgtctgctgcctggtgaggcccacggacttctgagagccaggaatcctgcggtctgggcccaacactgcatagcactgtgcataggccgacccttccttaggcctcagctttcccatctgcaccctgcagcatctctaagggcccctccagcataggtggtttgtgaaactcacaggtggtccccaggccaagatgggcaggtgtcacaaagaagagggccctaagggctcacaaccaaagtgatccgccaagcagggcagtatctgggttacagccacagcaggaagaaccactggagagacactcagaaggacttccctgacatctgcaccaaggagagtctggacaaagctactgaaactcctccacctgcttctaaaatgcccagaagacaactggaccagtttggtattagaagtaggaggctggacgacttcacccccaaagggtcctgaagccccagaactggcatgtggaaggggctgaggcctaattgaggttggtggattcacacatgggggtcctccaggacctcagctgcacccattttctggaggttttgctgcccacaacaccagtatttcacaacttcctggtcgctgagaatatttattcaaaaacagggattgaaaaaactgtacagagtgtctgctgctgagaactgggcccctgccccatgccactcccccagctacctggcagtgccccctctttggggtgccccctgacaagcccagccagttcattccagtcaaaagggtatcagtggaagcagcaagaaatctgcaggtggtggggagagaagcctg

SEQ ID NO: 6925 - DNA, 1104 bp, Artificial sequence
  DNA replication origin
tgccgcagctcagacccctgggccagaaactgcccccactctgagagaaagaactcccatagatggaggcagggtagggggtgcatccatgcgtctgggcgttagcggcgtttgggaccccagggtggagtctccttgggcgggtagggtgcagaggcagccccctgctggtggtcctgcctgcccctgcctgtacctcagctggcctcagtagggggagaatttctgccgctcagccttcttgctcccattagctgctgccatcttggcagtgtaggccgccaagcccggcggcggccctggggaagcaggtggtaaagccaagaagggcatgggcttgaggccgatgaagttggagagggagatggcatagggtgtgcccagcaggccagggggagctgtgggcagggccgtcaggggtggcgagaagggggcaggcaggtctgcgggggccgagctgggcgtccccccagaggtagacttggccgtctctagactggagagagggatatagaggggagacaaaggggaaagtgggagtgagagaggggcaatgagggcagagatgggcatgagattagatgaaaggcaagagagaggtagtgaacagagaacaataaggggaagatgggaaaggtggaagaggaagggaagaaaggacaagcagatatagcacgaggtgcagggagaaatggggtggccagagacccagggaaaagacacagcaatggagaatgagaggtggatatagaggggggagatggggcaacagagggtgaattaggcaaagaccatggggaattggagtagggttaggagaggcagaggtcgggcccagacagagagaggaggccagcttcctctccccacccctgcctttcttgggcacatgagaaccgtgacctgctcccccactgccgcccagcccgcgctcaccaggcagtgatgaggtactgggccagggcgatggagaccggagagccagtgatggtgacatgccgctccccagcgccctctgcttggttcccgatcttgatatgtgcccctgacatctgccggatctcgctgatcttgctgccctggcgcccgatcacacagccaatc

SEQ ID NO: 6926 - DNA, 920 bp, Artificial sequence
  DNA replication origin
cgggcctttctccaggcttacctcagctcaaaacgcccatcctccccactctctgtcaaaatccttctcaaacgccacctcctctgtgaagccctccgcaggcttccaagtcagatgtgatcactcaggcctctgtgcccctcaaagatgttgctgcaactcaaagaagtccccgctgggcatttctgagcctgtctttccactatacacagagctccagaaagaggaaatttgagacaagaccagggtcagtgtgcagggagaagagttaaggttcatggggcctggggacatttggaaccaaagatggggctgagggtcccggaggagtaatgagagtagagtgagaagacccagacatgagggccagccacatgggcagaggtaggacctgcctggacaggattcctggttcctttctcagcatccccagccctactcctgccgttttaccaggactaggagctccctaggtatgctgctggggtgggggatttgggctgtgctttaggttttcagagggtgggagcagagtgggtctcctcatggaagagggggactggaagaagggctggggggtggggtacgtttcacagagtcgagttgggctcagcctgtcacagctggaaaggtcttaccaatcacaagaggggctcgcggcccagagaggaagggaaatgtttgtaaggctacatgggagacaactggcagagctggagaacccaggggtctacctgtgcagctcagagctctttcctcaagatgtcagcgccactgggcaatggtgatggaggctggaggggcagcagtgatgggagtagggagggtggacagcctgtctggggacacagggtggggcaagccagcctcctcgtggcctgggcctgccagggtgtgtgggctgcctgctcccagccccc

SEQ ID NO: 6927 - DNA, 1349 bp, Artificial sequence
  DNA replication origin
ggcttcaggccggacgcccctacccccaacccgtggggctctgggagtggcaggggaagggtcgcccgagccctccaggaagcggccgccgctcggggcgcaccgcggcgcgcggggcggggcgggcggctgcggcactggggcggctggggcgggcccgccgctctgtaatcggatccggggagggggcggggaggggccgggccgggcgggccggggggtggggggggggcgcggagccgggctccgggccggccgggctccgcgcctgtcaaacccctcattgttcgcagctgatgtcactcgcagttgtgagcggccgcctctcccggggacaatgtgggactgagcggcccagccgccgtgccgccgccgccgccgccgcaggacagccccagcgaggtagggcgcgggccgggcggggcacggcgggccgcgaagtttgggggttcgcccgggggcagggagcccgcgcccagatccctcggttggggtcgcaggtttgtgagactgcgaggaacacgttctctgtcccacaccgctgaggcctgcacaggtgggaggcgctggtctgccagaggcgcccttggcaccagggaggggcttcctggaccttagatcccagatttgaggcccccatcccactcgctgtttctgtcctttgcgcctgctcctctctctgactcctgccctgggttctggttctgctccatctctgccctcacttgccactcccctgtagctcctggctgggcacacactccttcccatcctccgcagtcgttgggggagccagatacagacctccaggccaggggtgtatggagatgacagctgggggctcagagtggtccctcttgccccatagctcttcagcccttcagctctgacctagcttcttggctggggtcctggggggtgggggtgggaggctctgctactcacttcagcctggccctcatgcctgcctggccaggagagggaggtgcccgcctcctctctcccctatccctggcccgccatcttgagacctgtggcacccagtgccccacccggccccagcacccaggggagtggtctccaaggtgatgatgcacccagggccagttgcattcctttctccccaccaagcccaggatgctcatgttcgtgctgaaccagcaggacatgtgtccccaggggcttgccttccgccacaaaggctcttacaatccatgaactccctaggagctgagctcctgccctccctgttccctgggtcaccctcattgcctcaggaccagtacctgggaccctattctttccccatctgaaaaaatcccctggtcttcccaggtcctggagccccc

SEQ ID NO: 6928 - DNA, 832 bp, Artificial sequence
  DNA replication origin
tgcacattgtcatgtgcagctttgcatatacacacatgcatacatgagcctccacacaagcacttgcacacatgtggactcctaaccatgctaacctcactggctgggaaggtggggaccccatgggccagcccttgcaggaggcccttttgcaaggcttagggtgtggccagccctgaaagctacttggacacaggtttcagctggccccagcccagaagtgacccccagaaagggagggccaccgctttgccccctgcttttacccttccttctgggtgctctacacctcaggttaccaggcctgaggcatctcagccaagcttgtttcctgctctgaggcttgtggggtgggagccagagtggaggtcggtgaaataaagtgatgcaattagaccccaccggctcctgcttctaaagagcgccgcccctcccccacccctgggaccaacactgtgggcccctcccccaccccggcgggaccagatggtccccctgccctttgtccaccaggccagatggagaggaagggagattggattcccctccccacccacacatacccaggtgccaagagactcagctgtggggggaggtggaggtcagtgggaccaggctgagccgattatggaggagtgggggggaaggaatagttgcttccccgagggcggggggtgcccagcggacttgagaacagttcatcacccccactagtatcccttccccagtaaaagactcaacggagcccgttccttgcgaccctatccccaaaaggaattccgggggtagatttggggttatcacaggatcgggtgcacagggccacacggct

SEQ ID NO: 6929 - DNA, 1113 bp, Artificial sequence
  DNA replication origin
taactccattatacaggccagagaactgagccagggtggagatgttccactgagaagaagccacatggctctccgccggctctcaagccaaaaacagttccgaaaatctgggcggggagcgggccagagagcgctggggctctgcccccagcaccccctccacgcagacgactcggtaactgggttgcaggcccgcggctgcggagtgcgcaggcgcgccgagatggccgcgctcctggccgcctagagccggagcggcccgcggagctgcggaggcagccatggtcggggcgctgtgcggctgctggttccgcctgggcggggcccgcccgctcatcccgttgggcccggtgagtctcccgggggagggaggccggccggtggcccaggggagggccgtctttaccccgccccttgccccggcgccccggggcagagtcccgcggaagaagcagacgctggggccgcgaatgtgcatgtgcgcgcgtgtaatgtgtgtgcgcgcgcagggtctgcatatgttcttgggggtctgggtgtatgtgtacgcttgtgtgtctgcatggtgtccgtcagtgggtttctgcgcgcttatatttttggggggggggtgtgttcgttgatgtctgcctgcttgtgtcagcgttatgtcttccgagtgtatttctgtgtgcgtgtgattttaagggtatgtgtctacctgtctgcgtgtgtgcatttctgggggtttgtgtgtgtgtgcgtgtctgctttcctgtgcatgtgcctttcttgtgtgaatgtgtagtcttacggttgtgtgtatgaccgtgcttgagtatttctgaggatcagcctgtggttttcaaagtgtgcatctccatcagtctctctggcttcctgatgcctgactgtgtgcgtgatgtagagggtaccattacaagggattaattgcacacgggccagtgtgtgtgcaaagaggctgcatgtacatgcagggaatagcttgtgcaaaagaaaagcgtgtgggggcaagactcgtatttgtgcgtgtgtgcacctgtgtgtcattgtcaacgcatattccaatgacctaacccgggcacagtttaccctgccccccgcaaacccccg

SEQ ID NO: 6930 - DNA, 1254 bp, Artificial sequence
  DNA replication origin
catcttgagagcctcggggcggccccctttcctcccgccctatccgggggctgaaggaggaggcgcccttaggggacgggaccgtcctgagctcccggcgcatacctgggggcaggagtggcaggcgtgtcgtgtggggcggggcgagcctgtcagagcagggccagcccggagctcgcaactcgcggggcggcgctggccgcggcggccgctgcccggggacgggatccggatctaatcctccagtaatctcgctgaggcccgaaccagaggcgggcggggacatccgcgccgacgcggccgctggcgccgggacggccctcactgacggtcttcggtctccgccccgacatccggcctcggccacgtggtgggcggaccggggcggtcctgagcctgcgacctcgcaggcgacctcgctggaccctaagtccaggccacagtcagggaagggcgctgagaggcgagcgtgagcccagcgacaggagagtgaggtgggggccctggggagggatagagggactggggctccgtggcttgaaagccgggcaactgggaggcgttggggtttttcttgtttgttttttgtttttgtttttgcctttttttttttttaggagggcggggggagtacaagtctgggttcaaaccttgctcagctactctatgagctgtccttgaacctctctgagcctctcagctttctcctctgtaaagtgggcattctgagcacaaacttcatggggctcttttggggattaaataaggaaatgtgctggaagcagacagcccagcgcctgaaacagaatgggtgctccttaatgggggctccgaaacacggtatcctacccctgtgggaagtccgggagccgccgtggggacaggctgtgtgcaggagctcaccatttccagggtcttggaggggtagttagccattcactttgcccccagctcaccacgcgcagcgccatgaccagcaagggtcccgaggaggagcacccatcggtgacgctcttccgccagtacctgcgtatccgcactgtccagcccaagcctgactatggtgagaagacggtggttccagagcctgtgacggggcctaagggacggggactgtgctctaaaccagcctccaacccctgtcacccagctgagccccactctgctgtcccaaatggctccccaacccctccagccattccccaagtaaatagactgaggcagcccctccaggttagggaggaaccctttccc

SEQ ID NO: 6931 - DNA, 1003 bp, Artificial sequence
  DNA replication origin
tagggcacacacaggtctcaacaggcccagaggtacccagtcaggcgggggcgccacccagagtcctgcatacaccttgatgcacccacacccccctgcccagcacacagcacctaccaatgaagctgatggcctcagggaagaactgggagaggttctggctccagtggtcagagatggggatctgcttgtaggtgaactcgccgccgtgctcgaaggcgttgggtaggttgggtgtgacattgaggatatacttgatgccatacttgccgagcacgtccaggttggtggagtccttggcgcagccgaggtagaggtagggcaggatctggacagggaaggctggttggctggatggcacagggctgccgtctgactcggtggcactgctgggcagctctcggtccgactcgccgtcggagcagtcagagctgatgcgcaggccccccaggcccagcactgaggtgggtggcgagctgctcggcgaggaagagctgtccacgttggtctcgcagtgctcagagtactctgtttgaaacttgttgaaaccacctgtgtccagggtgagacagggcctgggtgagaggctggtgagagcccagatgggctgcacaagaccagagatggccaggactctgcacgccaaacaccacagcacccacggtcagcatgggccatgccaagcatgttacacgtgtgccctctctcgtgttctctccatctaaaccatgaccacttcacagataaggaaactgaggccccagaaggtgaagtgacgtgcctggactccaaactggtacccataacacttcggggcccccagccatggcaccagctttagggcacttgaggacaggccccagctaattcctcttctgcagctcccacgcacacctagcacccatgggtgttcagtaacagctaagtggtaaagaaaagcagacaaccccatcttagccagcacctctgggttggcaaactcctcttatagatgagaccacag

SEQ ID NO: 6932 - DNA, 1070 bp, Artificial sequence
  DNA replication origin
ggccgcccgcgctccccatgaaaaaccagctccgcggccccccagcgcgggcgcacatgtcgacttcgggggcggcggcggctgggggcacccgggcggggtccgagcccggtgcggggtcggggtccggcgcaggcaccggggcgggcgcggcgacgggggcaggggccatgccctgcaagagcgccgagtggctgcaggaggagctggaggcgcgcggcggcgcgtccttgctgctgctcgactgccggccgcacgagctcttcgagtcgtcgcacatcgagacggccatcaacctggccatcccgggcctcatgttgcgccgcctgcgcaagggcaacctgcccatccgctccatcatccccaaccacgccgacaaggagcgcttcgccacgcgctgcaaggcggccaccgtgctgctctacgacgaggccacggccgagtggcagcccgagcccggcgctcccgcctccgtgctcggcctgctcctacagaagctgcgcgacgacggctgccaggcctactacctccaaggtgagggcggcaccgagacgccttacgggatcggggcccccccgcgactccctgacgccccccttggaggcgctttcctctccacgcgctcggcctgcccctctgggcgccacgtcgtccccggcccgcatccgccctcctggagccgggtccccactgtgtggtttggcaggcgcggggctccctctgcgccccctttctcggcacgattcgagtgggtggaacaaactttcccctgcctggggtttccttttttttcctgttgatggggcgacagtagtgcctgggctccagtggagcccctcagaggtggaaggcgccgcctcccagaaccctaaaagcggcagggcgcccaagtccagcctagaattcgtgtttctggaaggccaggatcaggaagggcacctttcatagcaccatcctcacctccagcgcatggagaccatttgggttggggtctcctggatccgggaattgcttcttccaccggagaattgccgcctctaggaggcgcttggggcagggtatgggcaggc

SEQ ID NO: 6933 - DNA, 1116 bp, Artificial sequence
  DNA replication origin
cccgcaccgggctcggaccccgcccgggtgcccccagccgccgccgcccccgaagtcgacatgtgcgcccgcgctggggggccgcggagctggtttttcatggggagcgcgggcggcccggggccggggccgggcagccctgccctgggacggcgccccggccgcgcgggccccagccgcgtctccgggcgcccgcctcccgccgagctgcgcgcccgccgccccggcctcccggcctcccggcctccgtcccgcccgcccgcccggccctccgcgcgcaccgcggcctgacagccccaattaaacggcggctccggcggccgcgcgccgaggcgttctccggggggcggggccgcgggggccggcgcccgggcttaaaggcgcagcgcctccaccgcccctccccacggggtatgcgggcgcgctcgcgacccgagcccgggagaccagcggcggggccctcccccaccgcctccgcaccgttgccccctggactagctcggagctgactacgatccgcctagggaccccggcctagacgccctcatgggttcactctgcgcgtgctcccaagctcttctggacactgcgggaagagaggccctgggggcgtcctatgcctggcacccccaccccacattcacaacagcatagttttcctgggacggggcgtggtgggggggatggtcaagctgagcaacctctcctcctcccgcctgtcatcccattcattttttctgtcatcgagttcattcaacaaatgagaactgaacgcctactacgtgccaggcactgtgctaggcggtcaccgtttcagaggacctcatcgttcccctgacggtcacaggctccagacctgagggagagcgtctcacgccagcaggcctgatgggaaatcaggacctgggcaactggcggggtaggaagactcagggccgtgccaccttccgtgggcaggtgtggagaaatcctagaaaggaccagctttgggaagggatcgcgagccctttaagaaagctttacaagcggggtggtgacaggcgcccagtgaagcgccacgtgactttttccacggggccggtgggaggggaatgctcctttataatcagctttcct

SEQ ID NO: 6934 - DNA, 1600 bp, Artificial sequence
  DNA replication origin
ttcccctgacggtcacaggctccagacctgagggagagcgtctcacgccagcaggcctgatgggaaatcaggacctgggcaactggcggggtaggaagactcagggccgtgccaccttccgtgggcaggtgtggagaaatcctagaaaggaccagctttgggaagggatcgcgagccctttaagaaagctttacaagcggggtggtgacaggcgcccagtgaagcgccacgtgactttttccacggggccggtgggaggggaatgctcctttataatcagctttccttcccctgcctccctctcaacggaccaatcaacttccgcggtaggcgggcgcctgccatgcagatggccaatcctggccgaaagaggcggtggcggagggaggcggggcccgccgcggtttccacccagggcggggaagtgggcggggcctccgcccgccctgtgtgtcgatttgcaggcaggcggggcagcggaggtgaatggacccgcaggtagcgctagaacaaagcggctagacgcaggcggcgcgcttgcgtaggacctgcagtgctttccctacggagccagggtggcagcttgaggctggaccctgccgtctatctggtccattcttttgcctggcggggtgcccctccttggggcttaaccccccgactccgcccgaggctggtcggctctgagacaccttgcccccatccctgactgggggagcggtggtgcttgagggacggcctctggaaccccgaggatttgagctttccgctaacctctgaccagaaggcacgaaaaggggtgactcaggagcagtccccgcctgtctttcaagcgagggatagtctttcggaagagtttcatcctgggccacagggctgtatcccaaaggagcaggggtctctcccacagtcacattctcagagtgtgaaaggagaagcaactctccgcccaaggttgtcctgggggtcctgggcctgtggaaagagcttccagggcccaagatgccaagacccagattctgtcctgccacttgcaggtgtgtcctgtgaccttagtatggttcttccctctgggccttgggtctcccagtgtaggagagtgctagtgtggactgagcccaatccgtctatgaatccatccggctgggaggacgtggtctgaggacaggcctctcggctggcaggctggatgctgcttgtcagggatggaggcagcactcaaaaaagaggcctgagcaaactcccaggggagggtgagctgctgagcagtgcaccattcactcagcaagccttgctgagggcctcctgagtaccagcctgcctggagccggagtgacaacagtggagcctccatcctccactcaggcctggctacctctcccctctgctccaccatggggttggatgccggtctgggtgctctcccaggcctaccacaggatgaacacagacccctctttctctagggcagagactggtcttggtgttccctccccagacgggtccatggtagctcaagaaggtgtcaagtgcccaataagtcagggtgacatccctgaggggcaggccagagtcacatcaacagaaggctcatgctgtc

SEQ ID NO: 6935 - DNA, 870 bp, Artificial sequence
  DNA replication origin
gcccagatgaggtcccagtctacaagtgcagctggatgccccatttcagccaaggagctagcaggcctgtggggcctaggcacttagatggtggctgctttggatctgcgacattttctttctttttttgagacggagtttcgctcttgttgcccaggctggagtgcaatggcgccatctcctgctcaccacaacctccgcctcctgggttcaagcgattctcccacctcagcctcccgagcagctgggattacaggccactacacccagctaattttgtatttttagtagagacggggtttctccatgttggtcagggtggtctcgaactcccaacctcaggcgatccgcctgcctctgcctcccaaagtgctgggattataggcgtgagccaccgcgcccggcaaggatctgtgacattttcgaggggactgcagctggcaggtagccgcaggatgtctgtttatccagggtctggtaggagcccctgctcctcctttccagaggcttttacccctgtaggtccctgtggcctggggctgtgacctgcccctcagcacatttgtcctgaggggagtctgctgcggttcttctgctggagccccaggggaggaggcgagcaggaggcagtttcgtggggactgtgggctgagcagctgtgcggtggggatggggtccaagggagcacccaggggtgtggtgtccgtgaggggctgacggctgcgtgtctttgtgtggctgtttgtgttggtgatctgcgcacgtgtgtgtgtgtgggggggtgtgtgcacgcgctggggatgtgcaggggggcagcccccaggtggcagctttgtgccttcccttgctcactcattcagccacacagcc

SEQ ID NO: 6936 - DNA, 1002 bp, Artificial sequence
  DNA replication origin
tcaaggttgtgattgaggacggtgagtgcccctcacaggccagggtataggcttgggggtggactctgctgcctctgtgggtgggggaaggaggatgttggcccctggcctgccgggacctcaatttcccactctggaaatgggtgtgaggccatcctgacaaaggagagcctcacagggcagcatcagaggtgggcgcaattgtcacctctgttatgcagagcaggaagccgaagctggggtcagcaaatagagccctgtcctggggtcctgccacctcccagaggctgcatggatattcagatgggcctggccaggatgccgagctgggctgggcagaggggcaggggataagtgaatccagcactgccccttgtggctggtgccacccgcctcatttgttggtggcctggcctggctcagctgctgtccgaggggagacctaaggagatcctgcacccttctcttggaagtgcccccatgatggggagaagggatgagtgtctggctcatctgagagtaggatgggagggttctaggcttggctgggctttggccttgcccctgaggacctgggagctgtatagagggcagtgctggggacactgggacttgagctgaggcctgaagtggggagggtttggggaggcagaggattaaactgaggaggattgggaggtcagaggccagagaacattttttcacctttcctccatgccaatggactgtccctttgggtgaggggtacagactttgggactggggtgggccaggctccccagaggtcctcccagctcttctcattagccattcagcagcaggcactttggatggctgcctgaatgggcctggtgctcagctggctttccacgcgttgtgttggctcaaagcaggatctgccattccaggttttagggccttggcagtgctttgcccagggagtccaaattctgatgccctcagagactgggcaggggtcactgtggcagaatattagtgatg

SEQ ID NO: 6937 - DNA, 1710 bp, Artificial sequence
  DNA replication origin
ggaaaaagtaacacctacttcaggggctgtcatgaggattaaataaatgtgcccagcaggtagtaagtatacaacacaaagcatctaatggttcattcatacatttgcttattttgcaattattggccacctgccaatgttgggcactgttctaggcacaggggatacagcaagggcaaacacctaactactggtggagggaagacgataaacaaatacgtaaagatttgtgccaggtagtgataaaagcaaagaatgacccatggagagggtcagctggggagaccacgcagtaccctactttgtcacagttcatccagtgagggacatttttacagggcacatgaccttaatctttttcattaatcttggttaattcatttccaggaggtcaagtctcttgtggttctgtggaatcaccagatgctcctgtgggtgtggcttagtctgagctgatgtaacaagtagctctgtgttgctggcaccatctggctgtagcagggttcagtgtgggaggccttgcctgtgaactgttctagaaggcaagctgcagggctgcataacactccattttccactgtgagtgctggggggacagtggttagcagatgacataggcccagtcttcagggtgagcgcaggaagatgaatgagaaaacccttcaattctgtgtagctgggctctctggggatgagaaactcaggggttggggggcacagaggaggcctcaatgcaggctagtgagggtggggagcaagacagtaaatggagctgaagctggggccagatgccaggtaggccacacatttcatcatcacatctctcagcaaccccagcccaaaaagctggcctcctttccaatcttcccagccaaagtccctggacaagctgattggaccaaccagagtcagatgctcatccctgactcatcacagtggcctggaagatgccacatgttgactagttggtagcagcaggcaggtactggtaccagtaaggcaaggctgctggatatagacacagaaggtcattaggacatgggaagttcctcaccaggctctggccctctttcaacctctgggcctttgcacatgcagtgccctcttctcagaaaacctttctggctgggactagtaagtggctcacgcctgtaattccaacgctttgggagtccgaggcgggcagatcacctgaggtcgggagttcgagatcagactgaccaacatagagaaaccccgtctctactaaaaatacaaaattagccaggcatggtggtgcatgcctgtaatcctaaccactcgggaggctgaggcaggagtgaacccgggaggcggaggttgcagtgagccgagatcgcgccagtgcacttcagcctgggcaacaagagggaaactccatctcaaaaaaaaaaaaaaagaaaaagaaaaagaaagaaaacttttccctccactctgctgggctgtttcattctcccctctaggtttccaatcttcgccttctcctggcagcccctcacattgtctcggcgggctctcaccaccatacactccatctagtgggtgaaggcgggcctaggcccgtgagggcaaagcctagcggccatgatcaccccgaggtgcccaggaccccacgggaggcgctcaagaaacggcccctggggaagagctggcgcgcccacccacaagcagaccccttcctgggtgcaaacc

SEQ ID NO: 6938 - DNA, 1815 bp, Artificial sequence
  DNA replication origin
gcgggttcaggcccgggcctgagctgggggtcggggaggggcactcactcggcgtagcctgcattccagggtagcgtgcgtcctcgtgcggggctgcgcacgggccgggagtctgggcggcgcgaggcgtcggccgccccggggctggagctggagccgcgaaggaagcggggccgtcggtagggcacggggctggcatgcggcccaggcggccgcggcgcggggagcggctccccaggcaggaagcggcgccggaaccagccggcggacatggcgcggcggcagggggctgcccgcggagcgcggggcgctagggctgggccgcccgcgggaggaagaagcgggccgcgggcggagccgagggaggggtgcgccggcgggaggcggggccgggggcgcgcagacgggaggcgtcgccccccagccccgacctccgcccgggagtgcgtgcgcggctggttcgctgactccaggggtcaacgctcgcgaccgcctgaagaagcccacgccggcatcagccccatttgacaagcaggaaaaccgaggcctagagaggcgaagtcgcctgcccagcgtcccacagtagccagggaggactgttcacccacgcttgcggggcactggtggttgagaggaaaagtcccccacactccgcggggccagcgtcgcgcagatcctcggacctcctcctgctgggtggggacctgacgcaaggggaagatggggacaaaatgagctgggaggtgtcagacccccacattgagtaaatgccaccgagcacaggttccttcaggcggcctccaatcctctccaccccggcctgccaccctccaccccagacgggcttagtgggcaccttggctttccccgtcctgagaggctgctgccaccctcgaggacagtcttccaaatggctgtccctgcattcaagatgtcttcgcggaatagacagcaggatccttactggactgtgagtgagtgacggacaagagaaatctgtgtgagtgtaaaggggaatccgtggtcccccaaaggctccagctggtccgagttcagacctgggacggagggaagtgaaagacgaggaaccatcttgcggtctctcaaccactggctagctgtcaccaggcggtcagccgcagtgtccccttcacatctgcgagttaacaaagcactttgtcacccatttgtcactcaagtccaactccctgtgcaaaagtgttactttggccggaggcagtggctcacgcctgtaatcccagtgctttgggaggccgaggcgggcggatcacttgaggtcaggagttcgagaccagcctggccaacatggtgaaaccccgtctgtactaaaaattagccaagcgtggtggtgtgcgcctgtaatcccagttactcagaaggctggggcacaagaatcggttgaacccaggaggcagaagttgcagtgagccgagatggagccactgcactccagccagggcaacagagcgagactcagtctcaaaaaaaagagtgttacatcatatggacgattctgaggcccatggaggggaagtcttggacacccagggctgtactatttccattatgacaatgcagctgactcaatcctcgcccccagggcacttctcttcccctttcctcctccaggaagccagggcttgccaattaaaagcggctaaggctccacagcccagtgcctgcatatgagctgtatgaggagtccaccttcacctccactccctagcccaggtagacgctcagtaagccctacttcctcccagcagctagtcctgccccagtgggagttcctcg

SEQ ID NO: 6939 - DNA, 1434 bp, Artificial sequence
  DNA replication origin
gggcttcttcaggcggtcgcgagcgttgacccctggagtcagcgaaccagccgcgcacgcactcccgggcggaggtcggggctggggggcgacgcctcccgtctgcgcgcccccggccccgcctcccgccggcgcacccctccctcggctccgcccgcggcccgcttcttcctcccgcgggcggcccagccctagcgccccgcgctccgcgggcagccccctgccgccgcgccatgtccgccggctggttccggcgccgcttcctgcctggggagccgctccccgcgccgcggccgcctgggccgcatgccagccccgtgccctaccgacggccccgcttccttcgcggctccagctccagccccggggcggccgacgcctcgcgccgcccagactcccggcccgtgcgcagccccgcacgaggacgcacgctaccctggaatgcaggctacgccgagtgagtgcccctccccgacccccagctcaggcccgggcctgaacccgcttcgggtcctgcgcccgcctagaaagcgggaggagctgagtgacagtccccacccacctgtggacagccccttcttgccctcacctccgaatcctgacaacttcccggtcatcccgacccagcgttttccttgggattccgacctccccctcagagaagacaggaggtcgggaaggacctgcagcccaggggcttccaagatgaggcccagagactcggtagagttccagcattcggggctttggagatttcccctcgccctctacccccaccatctcaccctgggtatgacctgcgctgtatgggacagggctttgggctgcgacaggacaggggcaggaatggcaacctacccttaccgtctagccctgggtcaccaggtaggctccagaggagctgggccctgacttttaccttagccatgaggccagtgaagttaggaagcttacatcgtggttgtctaagtgtgtgttagggacagcactggggagctgttgccccagagggaggggtcttctccctgtgctggcttgggtccctgtgcccatggggacataggtgtgtccctggagggtcgcttaccatttcccggcctcaggattatcaatgcagagaaatctgaattcaatgaggatcaagccgcctgtgggaagctgtgcatccggagatgtgagtttggggctgaagaagagtggctgaccctgtgcccagaggaggtgagtgcagtctgagttcttggctggaatccctccgacaggctggggccacgacctgcaggctgaggttcttaccctgctgccccaggtcctagttaggttgcgtcaggggacaagtggggaagtcaggcagaggctgacactgagcccttcctgtgcagttcctgacaggccattactgggcactgttcgatgggcacggcggtcctgcag

SEQ ID NO: 6940 - DNA, 1096 bp, Artificial sequence
  DNA replication origin
caggaatgtgtgagtgtgtggcttttggctggggaagaagtggagattttgccccggggatctcaggaaatggcatctctgtatacccatggtcatcacaccagatccttggattgggaggatgagattgggttggttggattgttactaacagccatcactatcagcataacccctctcatttatccagcacctactgtgtgctaactgcttttacctgcatcatctaattgaataccctattggtccttggtgcaggggctggtttctcttcctattttgagtagcacttcccttgtctagatctcctgactgcagggatcttggaggtatggctggactttgggctgggactgtcaggcctgctggtagaagtgaactgtagggtagggtggggattgagagacaaagtagtatggtggcagaacaggcagcagctaaggtggcctcggttttccccaggatgaggtgatcgggcgggagctggaggcctcaggccagatgggcggctgcacagccctggtggctgtgtccctgcagggaaagctgtacatggccaatgctggggatagcaggtgagtcaccccttggagggtgggcaagggtgggatggggagggcataagcagcaatggggacaagcaaaggtggctggaagtggagggatagtaggaaggattgactggctgaattgtgtgtgtacttgttatgtgtcgagtgtggacagtggctgccggggagggcagggacctcaaaggccccgctaaagggctaagccttcacccttgcaggtcttaggtagtcatggagggctttaagggatcatcatggacagagctggatcctggtggttggaggagggactggtaggagggtggccatgggtgagggtggaggcctcctcctagacctctcccttctctcctcaatccagggccatcttggtgcggagagatgagatacggccactgagcttcgagttcaccccagagactgagcggcagcggatccagcagctggtaggtgcccttggcagcatggaggctgtgaagctccaactcctgggtccagggccataagaaggagtatgacctgag

SEQ ID NO: 6941 - DNA, 1416 bp, Artificial sequence
  DNA replication origin
gccgttggggctgaaatcgaagcagttaatcttgtccgagttttcgcggaacaccttagcgacgcggaagctccgcaacacgctgtcggtcagcttcatggcggcggctggggaaggcagcggcggcgcagggccggggcggggcccggcggcgagcgggcgggctgccgaggggccaacccaggcggggcgggcgccgcgccggcggctagcgggaagtcggccaacagttgggccgcctcctcctcttcttcctgcttggtcgagggtcttctgcctggactgtggagcctcgccgaccgttcgtcctcacagccacctcacggacaaccggcgcgtcgccggctcattgtgtccgccattttggggcgacaggcagaagctgagggcgaggagcctcagccgcggcgcacgccgggaaagggggcggggcgggaacggcggagcaaggcggggaggcggggtggtgacgtcagcgcggccgcggcggagtgtagtggcggggcgggctgctggcagggagcggccgagacgtgcagggccttcccgggggatcggaaggttgcggatgccttgggagccgggggcccttgcgcgggattgcaacccccgcgaagactctggcgcctcctgcaggcgtcccgatcgcaggctgcgtgggagggggtactgcagggtcgggtatgctgctggaggccggttttgggggtgactcaggtgagccgctcgcaggcaagcttgaccgctagtccaccgcagcgtccgcttagacagcttcgacctctttacttttttttttttttttggagatggagtctctcgctcaggcgcgcgccaccacgcccagctaattttgtatttttggtagagacgggggttcaccatgttggccaggctggtctcgaactcctgacctcacccgcacccggcctcgttttcttaatcgaggtagactttaggtacagtaaaaatcagcctttttaggccgggcgcggtggctcacgcctttaaacccaccactttgggaggccgaggcgggatgatcgcttgagctcaggagttgagaccagcctggccaacatgacaaaaccccacctctactaaaatacaaaaaattagccgggcatgatggcgcggctgaggcacgagaattgagaaaggcggaggctgcagtgcgccgaaatcgtgccactgcattccaggctgggcgacagagcagacggtttccccccaaaaattagcctttttagtggctagttttatgttctgacacccatacacagtcatgcagtcaccaccacattcaagatttggaagagttgcactatcctgtttgtagtcaacaggattattttaaaggttctatcatataagtgattatttgccttaaaagaaagtttatctctaacaaaggaa

SEQ ID NO: 6942 - DNA, 1797 bp, Artificial sequence
  DNA replication origin
gtcccctggacggtgccgctgctggcacccagcaaccccatagcagcagcccagtcagagtcagggtcagagccctggactccaggactgggcatacactgttccaggcagcccagcccccgcccaccctctcaggtccccctgagggtctctctcagcccagggccacccacagaagccaggcacccaggcaggaacggagcctgccagctcccggccagccttgtccctctcggctaactggccacccctctgcctcccactcctgctgacccccgggggacctgaagctggcagtccactgctgctccccactgcctggggcagagaagcattctccccatctgcctgccccccagggctccggccaccccatgcctgtgtccccagatccccaaggctcacctcagtggcgctgtctcctcaccagaggcactgcagtgtgggaactgtcccgaggagctggttctcagctgaaacaaagaggtgggggagaaagggggggcagcgggagagggagagggtgagtgagcgggcgaaggagtggaggctggagggggaagagaagggagaggatgagagagaagaggagaggggaggggagaacaacgagcctgccgcccaccgagagataaagcctgacacccagggactaaagggccagtagaggaggggagaggaaatggggagggggcaggggaggtgaggggccagactgagagtggggagactgttagaggggcgggagagcagggacagggtgaggaggtagagggcaagtgaggggcgtgggcaggagaggagcagggtgaaaggcaggttgcagggggctggtggctgatggctgagctgggcagaggggccccaccccgtcccatgccaggctctggactcaggggagaccagtaggacttgaatggcagaaggccatgcatgaaggggactggcagggaggggaacctgccagccgttgggtaaggggctgggctggtgggctggctgggaggactgcggccagtggcaaggcaacaaagacgtgaaaagaaacaacggcatctgaatggaggaatcggcttctgctgacccctgggtgccccagccctgagcatcccagccagagcttcctggagtgggggtggggggcagatacactctggggcggtccaggctctgaagtggcggcctgaggtggagaggagaggacatgggctgtgaggccaggcaggggtcccagtcattctttgagggctcagaacaaccgggacacacaccatgattgaccacacatgaggatgctggtgtcactgtcttttcgggaaggggatggttgatggggcctatcctgtgactgagaactgggtaggggaagccccctcttagggagagtgtgtgccctgcctccatcccagggaggagggcagggtagggagcacagggagggaggagagaagtggggatcaaagaggtagggaagcaggggagagagagcgggtggggggaaggaggctgcaaggggtgggcacggagctgcaagaccgccgaaccagaggctcccactccacaccccacaattctcaggctgcctaatgccgagctaatgaaggatgaaataatgagccacttccctgctgctgccctcctgctgccaagtgctgctgtgacaggcaagggcactgcctggggaagtcagctcggtgagtctgtgtgagcgttcgttcactgggagggaggacaggatggccttgagcagggccgtcccaaccctctcaccccaccaggcacagcccccgggccagt

SEQ ID NO: 6943 - DNA, 1453 bp, Artificial sequence
  DNA replication origin
cactctcagggctgtacctctctaggcagaaagggcttgaagaagcagtccagcagcttgaggaggctcatggtcaggttgcagttggttgaggcgatcacctccttcactgaggaccgaacgaaggagatggattcctgcagggagtaggcacccagttctcatggctggcagccacagtgccctgctgccctgccagggtcagacatacccgtggcctcactcacctccaggaagctgacaaagagggccttgaaatgctcctcatagggcttcagcaagggaggcagcttcctcagccagcactcgatgaagggcatgagccccaggatgctgggctccaggtacaccatgccacagcgggagactgtagctggtgaagccaccgccaggtcttgcacctcgaacatcatggtcattgcctggtgccaagacgaaccaaatgagtgggctggctgccagtcctcaggcctggagaaagggctgcagggctgcggggaggggctgcacatcctgtaagtgggcggtgtgggcaggctgtggggcaggggcagtgctgggtgggacaggaaccgctgggtcctcagctgataacgtggctctccctggagccctgaggaggaccccaagtcaggagattcctgaggttcgctgaccagactggggtcagagcattttggggtccctggaggcctgggcacatctgatgggaactgtgtattttgctccagagccctccacccctgtgcacatagacacaggtccacattgactgccaggtatttgcttttagaaggattcaagagctggactcagtgtagacccctgagatgctcttgtgcccaggccatatccctctttctctgacaactgctcctcacacaccagacagatccccgtggtgtctatgccatccatctcccagaccccgggcatactgccagggccaggtgcacacctgaccccacctgacctgactggggcaacatggctgaaattgggcctgggaggcaagaggcatcatcagccggggagcagtgggacaggcatcctggtgggctcgagcacaaaagaaagagggtctgtgtaaagggtgctctgagcaactgtgcgggacaccctgaggtgtgggagctcagggaggggcactaggagctgagcctaagctcctgctagcaggagggctcttgctgagtcagggtgacagcctgagatggacccatggccctgagagaaaggggtgagggggcagagtttggccagcatgatgcagcctccaggcccacccagccttggaggagagtgggcaggtggacaggtaggtgcacctctgtgagcttgatgatctccccagagctgaggcacagcttcttgttgtcatccagcaccgtgttcatgttctcaatccagatggcatccaccggcccatcgaacatgtaccacttcttgttgg

SEQ ID NO: 6944 - DNA, 930 bp, Artificial sequence
  DNA replication origin
gattagcaagtaacaaagacagcaaataggtggcaagggctacgggcagccctgcagcaggagaggggtccggggagggccagagttgggcttgggggcgattttacggaatgctgggggaggcctcactgaggaaggggggtcaagcagagaagtgagatgcaagctttcacataactggagaaaaattgtcccaggcagaggggacagcaagggcaaaggcctggaggtgggagcaggcctggcatcttaaggaccagcaatgaggggatgagcaggaggcggtgagatcagaggatgaggcagggcgaactgaggatggctttgcctaccattgtcaagacccgggctcttgcctggatgcgatgggtgagagaggaggagtgtggactgatggaatgatttcatgggtccctgtggccccaagcggaagatagaccttaggcaggtgaaggcagctgccaggagaccatggcggggctacagcactggctgggtgggcaaggacagggtggtgaacagtggccgattgggatgggttctcaagggagaacctatgggacctcctgacaggtgagctgtggggtgagggaaggggggatggaggatggcgccaagaccccgtcttgctgggagcacctggaaggatggagctgccattgcctgagatgggaagagtgcggggaccggggtactcgggagtttggctctggacaggtttggcctgagataccctgtggacatcccagggaagatgtggaatcaggcattcatgggagaggtctgggctgaggaggtagacttgggagttgccagcacaaagatggttttccccgtcagaggcgggatgggactgtctcaggagagtgtggttggagggagaggaggctggagaccaagccccagtccagccgagaatgggcagccagg

SEQ ID NO: 6945 - DNA, 643 bp, Artificial sequence
  DNA replication origin
tggctgacccggccaaggtcgaggtgaggaccaggcaggcaccctccccagtgcccacactgctctccgcatcctccccagccccaccaatttcaggccttcctgcccaaacaggccctgagtggggcttcctggaacatggaggtgccaggccctccagagcccagccttggtgcagctgagcccagtcttgttagttgaacccacacctggaatggtggctgagacggggatcacatgagagagccagggcaagacgagggagaaagagggcttctggtttgggccctgcatgtgagaacgcttgagggacagtgagcagggtgccctctgggaaccaaaaaccccaggtggaaggagggggaagtgtagcagggagccaggtgtcaggggcactggcaggggtgggtccaggcactaggcacggtggggggccaacatggagcttaaatttgttctgagggtgtaatgagccgtgtgggtgggcgggggacagacctgcactttggaatgggactgagcggccagtgtgtgtgtagcccaggctaaggagatggggtgagcaggacagaagctgaccctggccttgtagccacgcttgtagccaacaaagtctacagaaaaggctgggagcttccggagg

SEQ ID NO: 6946 - DNA, 733 bp, Artificial sequence
  DNA replication origin
ggaatggtggctgagacggggatcacatgagagagccagggcaagacgagggagaaagagggcttctggtttgggccctgcatgtgagaacgcttgagggacagtgagcagggtgccctctgggaaccaaaaaccccaggtggaaggagggggaagtgtagcagggagccaggtgtcaggggcactggcaggggtgggtccaggcactaggcacggtggggggccaacatggagcttaaatttgttctgagggtgtaatgagccgtgtgggtgggcgggggacagacctgcactttggaatgggactgagcggccagtgtgtgtgtagcccaggctaaggagatggggtgagcaggacagaagctgaccctggccttgtagccacgcttgtagccaacaaagtctacagaaaaggctgggagcttccggagggcagtcctgccacccagggagatgcagggaagctgggacagaggcggcagctgagatggagagagggggcaggttcagaggagattggtgggtcatgtcagtgtggcttggtgggtggttagatgtggggtgttgggaaagtgttaggagcatcaagcatccctcccaggtttggggttaggggagcgacagggggctaaaaggtggaagtgaggtgcttgtgacaagctagcagagccagacacccagagggcacttggccagctggactcggagctgaggcatgaggaggcccaggcag

SEQ ID NO: 6947 - DNA, 964 bp, Artificial sequence
  DNA replication origin
tgaacctggtcacccatccacctgtgcttctggggctccaagagcccagcatccttgccagtgttggcctaggaggcctagcctccatctcaggctgcagggctagtgcagagcctgccttcaaagacatcagttctcagtgagaccttgggtggcagcctggaatcctagaaggggctgagcagttggatgtgtgagcggctggggtctctggacaatacctccttggcaagtgggggctgtgatacccagggcaggccttcagggtgtttttgccccctgctttgtggagaggttcacactgaccactgaaatggaggccttagcacaaagcaggcctatgggctgtgggctgtgtatggatggccagcgaaaaccacagtgcccaggctcgtggcagcaaggataagaagcagggcatttggattcaaagagccagagtgtgcccgactcagggctctgggtcagctctgaggatgagggcacagggcctggcgagggctcagtaggagagaaggggtccctggaggaggtgaggctggtgctagacacagaggctggggaccctgaccagggatctggatgaggtggggatgaaggttcttaggtggaaacagtagtgggtaggaggagctggtggaagtgctagaaaggcttcgaatgtgagtgcctggggtgaaactggtggagactttgagtgggggaaagtcccactgactcccggcctgggggtgggagaggagcagctgggcaggcagaggcagagctgatgcttgggcgtccccaagagtgggggctcacctgggcgacagggtgaagttgatgagggtgagtttggtggagatctcgggcgtgtagtgtgggttgggcagcttggtggtgatgtacatcctgaagtcctcatggtaggggatcaccgtgtcccccagcttcagcaccgtgtttccctgctgcttgtacgtct

SEQ ID NO: 6948 - DNA, 749 bp, Artificial sequence
  DNA replication origin
ggggctcggaggagggtaggcgtgctgtgtgcattcttatgtattgtgagtctaagaggagagtgtacgccagtgaacacagttgtgagtttgtgtgtgccccacagtggaaatgtgtccacatgggtcatatctgtgcagggtaggagcctggcatgccggtgctacctgctctctctgagttggcgatgcccgagaggaagatgttgagaaaccactcaagggagtactggtacatggggtccacgttggccaggtcggacacacagaagaagaggatctgggtgcggatggccacgggtatgtactccatgcgcgtcaggtcgatgtccttctccgtctgctctgcaatcctgactttggcctgtgggtgtagtgggtggggggaggggtcaaagagcagaaggtagggggtttggggggcaggcctagggcaggcagggagaggtggggggcaggcccggggcactcccggggcaggtgggtgggcaggcagcagctgacctggatctcagcagccttcatcttggaggcttccagcaccttgatgagttccatgtcatctacagggttgccctcggaggagctgagccggtacaggatctggtcctcaatgtccttcagctcctggcgcatcttggcattactgataatcagctggttcttggcctcctccaggtcgggtcgctcctctgccactacctggcccagtagctggtcctctaggccactgccgggggcaggggaca

SEQ ID NO: 6949 - DNA, 1272 bp, Artificial sequence
  DNA replication origin
aggggcggggcaggctaggggaaaaggcggggatgggcggggctgggcgcggatggtgggagaggagggacggggcggggcggcgaacggaaggggcgggggcgggtgttgggcgctgaggcgcgagaggaggggatgggcggggcgcgcggccgttagcgcgcggccgttagcggtcggtttctactaacggtaggcgtcgccgcgattcccgaaggtcatagtccgcgtgacccacccccgtttgcgcgctcgcagtcttcgccggcgcagtcaccgcgcagggcggccgcccggaggtagctaccacggcctgtgtcaacgactaaagctccagtacagcggcgccctcagacagctgggagggtggctctggccgggagcggcggccggtgagctaccgcgaggaggagcggcggaggcgacctcggcccggccctgcactggccgcccggcaggcgcgacatgagcctggtctggcatccgcgggatgctccttaagccccttctccggctgttaacctccggggaacggttgtgaccacaccgacacgtattttacagataaatcattcttgcggcggcgggtcgaacacgtttatttattttttattttctcaacaagcttttacccagcacctgtccagtgaaacaacttgataatcgtttcgaggggcgtccgccgggttaggaagccactgcctggcagcttgtggaagcctcatttgcaaagccacccctcagatgttttgaagatcgtgacgtcttgtaactagcagtgtgtgcacagaatcctactcaaggaacgtcttggcccagcgatgcaaagaactgaagtttcaaggttttatgtctattgctggatggtcggggtagccccagtaactgggaactgctccgcagtccgctcacgtggacccctgtgggaatagcaaggtcaggacatgcccttctctctcctcttccagcctgtccagtgttttccttaaggaagaagccatcagatgtcattgcttctgcaactcctgggttagaggaggagacagaacaagcacaaagaaggggagggcagggtggctttggtttcttgaacagtaatttcctcagtcgtccttattcatgcagaatagtttaaagtccctgaagatattcccgatctccagccgtgatcggaggccatggatactggagtgtctctggagtgacctgattcacccagccctccttctaagaaatgctgtccttctcctctcccctgactagacagtcctt

SEQ ID NO: 6950 - DNA, 972 bp, Artificial sequence
  DNA replication origin
ggctctctccccacttgtcactttgctggagcctggggacctgcatttgtggacatctctgtacacatggcctgtgccctagctgggaaggtcttcccaatggggagctggccagtgtggcacaaaagcctgcactgggccaacaaggtggaaggagaagcggcaggtggacggcaaggccccagcctccttctctcctccgcccctcttcccgcccaggactgggtggagccactgccttataagtggtggcctggtggcagcagagcaaactacaaccggcggccagcgggaccagagggcggctctgcaggcaggcggcagcggtgccctcagttccccagcatggccccctcggcctgggccatttgctggctgctagggggcctcctgctccatgggggtagctctggccccagccccggccccagtgtgccccgcctgcggctctcctaccgaggtaccagcccctgcgtgccctgtttgtgtgcatgtgccctgtttgtgtgtgtgcgctctgtttgggtgcatgtgccgtgtttgtgtgcatgtgccctgtttgggtgcgtgtgccgtgtttgtgtgcatgtgcagtgtttgtgtgcgtgtgccgagtttgtgtgcgtgtgccgagtttgcgtgtgccgtgtttgtgtgcgtgtgccgagtttgtgtgcgtgtgccgagtttgcgtgtgccgtgtttgtgtgcgtgtgccctgtttgtgtgcgtgtgccctgtttgggtgcatgtgccgtgtttgtgtgcgtgtgccctgtttgggtgcgtgtgcagtgtttgtgtgcgtgtgccgagtttgtgtgcgtgtgccctgtttgggtgcgtgtgccgagtttgtgtgcgtgtgccatgtttgtgtgcgtgtgccctgtttgggtgcgtgtgccctgtttgtgtgcgtgtgccctgtttgggtggcttgggctcttgggtgcctggtcagctgtaggg

SEQ ID NO: 6951 - DNA, 800 bp, Artificial sequence
  DNA replication origin
gccaacctggttggatgggagcctgagctgttgtgttgcaccttgcctggggcccacgactttgtagctcctgtcctgcactgggcttatgttttcattcattccagaaaccttttcagagagtccctttggggagtgtgggggacaggagggaaagaaacctggtccttgtagccgttcgtctgctccctgccctgggcagaggacgtggggactcaggccagcctgagatcactgggaccagaggaggggctggaggatactacacgcaggggtgggctgggctgggctgggctgggccaggaatgcagcggggcagggctatttaagtcaagggccggctggcaaccccagcaagctgtcctgtgagccgccagcatggatgacatctacaaggctgcggtgagggacagggctgggtagggctggggtgggcaggcccactgggggctcactcagctgagagtgcggggttagtagccccagggaagtggtggggaccaaggagaaggcctacgtgccttcaacccaggccctcacagggacagtgattctggtgtttgaggatgcagaaggggtagggggttccgggtctgaagggtggtggaggaggttgcagctttcagcatcgtgtctcactctctgtttccaagtgtctgtggtctgtggcactgtcgctcagccacatgtctctgcatttgtctctggacgtttttgcctttctcttttcatctcttcctcctgagctgtctgagtccccattactgtctccctgtccccaacccccatttctgcccctc

SEQ ID NO: 6952 - DNA, 1910 bp, Artificial sequence
  DNA replication origin
agcccaacagccaggtgaggcactattatggcctcctttatcaggaggagtaaactgaggccaggaagagcagtgacttgcttcgtgtggcctgggagactcgggaccttctgtcccctcttcccgaggacccaggggcgatgcccagagctgtcaccacccggggtctcagtttctagcaggctgtgcagggtaccgccggcggcgccacgcaggtagattacgcaagcgagcacctcgcacgcgcgccctgagtggcccctgtcagtcacgcgcgggggcggggcgagggcgcaggaagaaggcggggccaagatggcggcgcagcgcgcggcgggggcgacgggcggcgggggccggggggcggtgggacgttgaccccgccccctgctgctgctagtctgcgccgggcggcggtggcggcggagacccgaacatggcgaccgcgcgcaccttcgggcccgagcgggaagccgagccggccaaggaagcgcgcgtcgtgggctcggagcttgtggacacttatacggtgtgttgggggcgcgggcacccgaagcgggggtggtggctggaaccgggagtccgactcgggggcttggggaggggtccgggatctgcagccccgaggagcgggtagaagggtctgcgattgcgaggagggggctgggacgggggatctaggaaagggatctgggccccgcaggtccgggagaagggttgctcggggcccggggaggcggtttggaaaagggtacgcgatcagaaagggaggctcgggttgggggcggcatctggggataaagggggcttggggaggggggtgtctagatgaggcggaacccctctagatcctctaggactggaggggccccggcctggaagaccgttacaggggtccaggaggaaggcgatggggagagggtctctgatggatggaatcagggaaaagggtcaggcttcgcaggccttgaagaaagagaaggcgtcaggaccctgatctggggagcctgaggtggtggttgagattttctctgagaagtgcaggagagacctggggagcagatgccttgggggtcgggcggagacaagaccggaggaggggtggagcccatctatggagaaatgggggtggtctcagtgctaaagcgcaggccctataagccttaggaatcttcgtgactttgggctgtgggagcgagatggggcaacaagctgcccacacacacttctaagctatgggggagacagaggacaaatagcgggtagttcccgactttgacggggttggatgccaggcctgtgagcctggtgggctgcctggcaaaaaccggccctggactaggcatagagcacctccctgcctcctcccctttgttcccgcagggtagggagtgggtgggggccttgggcctgcctgcacctcccctccctggccctcatcctaaccttccgctctgagggccattcttctggctcttttctcctttcctgaaggcaaggggaaggaatcaggcaggatgggaagaggagaggggtggatcttgaagcaacaggccagcctggagaaatggctgctcctcagggctggaggaggcttcagctccatgctgcagagaggagggggaaactaggtgcaggaggcgggtgaggtctctaagctgatggctgactggccatcagctatgggcacattcagccagagggccatcttcaaaaagctcaccctattctggactgcgcccctcctctgcatgtatgtcgggggaggtggtgatctagtttggaccctaccatcctctgtctccgggtgtgccgagttggacattattaacacacctaccttttgaacacttgccatgggtcaggcccatgtacaaagcattttacatgcattgccttacttggtcctt

SEQ ID NO: 6953 - DNA, 1165 bp, Artificial sequence
  DNA replication origin
tcctatcccggctggctctgcaccactgccctcccacctgccacacaaacccaccttcttctctgggttgctcagtttggacttgacctccttggctttctgaattgctttcagcacttccacagtgtccagctccttctctgtggtcactgtgtcatccagacagacctagagcatccagaaagtggctatcagcatggggactggtgatggctatcagcatggggactggtgatggctatcagcatggggactggtgagcatggcaggaggatggtagggctctgctgaggaggaggcgtgagcacctgctgtgggccaggccacgtgaggacaccataggctgagggaggctcagcctgctcagaggcggctcttcactactcatggaagtgacctgggaatgccttggaggggtccagggaggtctcacatctgtctctggagtccctcaccaagaacaggaggcagcaagctcttgggcagctgggactagggtaagggggcaacttgaactaagcccccagttagaggtgggaggcagactctcaaaagagcgatgggagagcctcctgggtaggggaaccagcggcaggagagggcagggcccccgcctgcaaatgtgggagggagtggtggctggcaggcagtggggggttgggtagggtggttgaatgagggaaggtcccaagggcctggacaggagctgacactctgtggcctgggagcttcccaaagtctgcagcccaggaggggaggagatggcatctcatggtcttgtgactgtgtggaggaaggggcacttgcggccacaaagagggaggtgggacacaaatagacttccaggtattttctgacctgggattttgggagaacagaaggtccaaggaccaatcagagcatcacggggactgctccaggcccaggcgatgggtgaacctggttaagggtgtctggtcagcatcgtggcaggtgcacagacaccgcgaggggcagcagacaccaggctgggctacactggcaaaggcaaaccctttgggtttacagtcaggcactatggccacaggttgtccaggagatatgaatattttaaggatcttatttctgaccctttcctagaataaacaatgttatcccagacagtaggggcaggagatgcaaggga

SEQ ID NO: 6954 - DNA, 1158 bp, Artificial sequence
  DNA replication origin
ggcccctcactgtgggatctgggtgcagcccttccttgcttgagcctcagtttccccaccctgccagagggagggttttaggaggtatctctgtgtctctttcagctctgagctgctcatccctgggactggggttctgaggggttttgctccatggctctgtggccccgagatgcccccgttccccttccccctgacaccttgctgggcctctctcgccctctctcccatccccacgccgacaggtgccggactgctgccctggtttctttggcacgctgtgtgagccatgcccagggggtctagggggggtgtgctcaggccatgggcagtgccaggacaggttcctgggcagcggggagtgccactgccacgagggcttccatggaacggcctgtgaggtgtgtgagctgggccgctacgggcccaactgcaccggaggtgaggactggggaggggcgggggtgggcctcctggcagcagagagcagcctggagaccccagccgggacaggatggaggcactgggcaactcctatcctcctttataccactgcagtgtgtgactgtgcccatgggctgtgccaggaggggctgcaaggggacggaagctgtgtctgtaacgtgggctggcagggcctccgctgtgaccagagtgagtgggtcccaatggggagggggcaggtggctactgaggaggctgttcctgggtctgaatgaccagagtcatcctcctgccccccagaaatcaccagccctcagtgccctaggaagtgcgaccccaatgccaagtgagtgggcccagcctggggcgggtgggtgagtggcggggagcctgggggtcaaggcacgactggacaggcatgggctaagctgctgctaccacccctcccagctgcgtgcaggactcggccggagcctccacctgcgcctgtgctgcgggatactccggcaatggcatcttctgttcaggtccagccacacggatgcccagggccctccctgaaattttggggtggctgtccccacagagcccccttcacttcctctaggcccagcccccctcactgtcccatctcaggactcacccttccctctgaccttttcctttctctcacgccctcctctcctgtcctgcctccggccccgtgcctgctcc

SEQ ID NO: 6955 - DNA, 1504 bp, Artificial sequence
  DNA replication origin
cgcgcgcgaagtcattgaggtatatgctgccctgggggcggggcacggggctgatgaagcagataggtggggtgctcggaagctatcggggcctgaggtggaggttgaacctgggttgggcaagtcagggtgcaggcagtcccggttcttcgggaccaggacgaggtgggcggggtctggggcggagtcagggcagggggcggggctcagtcctcggaaggacacaagggcgctgggcaggacaggcccacagcagtgggcgaggcccaggtcaagggcggagtcccgggctggactcagcaggaggcgccccctggctaggggaggtggggttcttgactgcgtgggccgtggggcctggggcaatggcgcgcaggggcggggcggggcgggatggagcggggcaggccagggccagggctcacctccctctcgctgaagcgcagtgggtgccctgagagggccgtggcgtacccctgctccagcaggtcctcgctccgcagccgccgacagccaaccacgtggtagcgaaacaccagctggcgatgcgcacgaatccgggccagctcatcctggagcagagtcgcgaggggagtggggtccctgactgccgcctcagcccacgcagggccaccaccagagcacccagccctgcccagcctcgctctgggggctgcatacctgcgacaggttgctcattagatctgcgtgcggcacgaagatggtgaaaggcccatcgcccttgagctccttatattcctgcgggaggcagcaacagcatgagtggaatgggagaagcctgaggcgtccatggatctcctggggaagacctggactcagagagaacaaaccagccaaccccctgaccagatggggacagaagtccagagaggggtgggacttgcaggtcacagaggcccaagctggccactcaccaggaggcggaggctgaagaatgaggcatgcttatccctcaggagctcctgggggggcgagggtcagctcagatttggggcggcccccattcagggcctggtgcctgtcccagcacctgcggcccaaggtctagccaaggcagacatgaggaaaggaaagccgcggggtctgagttggggtcagggctagtttcatgggtcatagctggggtcaggcccaggtacaatcaggggtcaggctcagtgtcatggtcagggccagaatcaggatcaaatcggatctttgccaagaccatgggtcaggcccatggggcacagccaagaccagatcaggggtctgacttgggcatcattaccaggccgactcgggcacggcaggtgaggccgtcccccacggtgtgggctgtgtcgcaggtacatgtcctctggccatcccctgtgcttttgcaggtggcatatgggctgcatcctccattgttctgagtcagggacaggagaggaaggtatcagtggctttcactacttctctatcccactcagccctgtgaaagaggccatgaaggcccctg

SEQ ID NO: 6956 - DNA, 960 bp, Artificial sequence
  DNA replication origin
tgggcctcaaagccaactgcagcctcctgggagcagccagggacttggggtggccacgaccacatccccagaaggagcaacctggataatggcccagaacctgacatcacgtcctgactgtcgtaattagcaatgttccctggctagagccagcaaatgtcattatatgggcttgcgggcagctgaaatctgattagaggggcctcactctccctgggctgtgggaagtgcacagagctggcagcccgatcggcagaggggctccccctcccactaatgttcctgagccccagtcccagctctgggcaaggtagaaaagtcagcatccatggcctcaaccccctagtctggccatacagagccagcccctctgggttggagtcctcagtgcccacatggtatcctcacacataatcccagggaggctgagagatgaggccagggggcagggcagggcagctgagaggagcagaggaggcgctgaattgtggggggccagacagtggtgttcctgcacgggttttgagcaagtgggaggctttgctttgtagagcatcccaaaagcagctgttctggggctaggcggtgaggagttgagtgactgctgccagggttctagcatggccttgtgtctgatggggcttagtggtgagggcctggagtagtcacgggctcagtatacctggtgggctataggagatagtgtaatgtaggcaggtgtaaccatgaggaggagctccagccaggggctctgccttaccctaactgcgtgaccctgggcaagtgacttctctctgggcctgtttgaccatctccagcactggaataagaggtgccattgtggggcgtttctgaggctcacagggctaggtccccacagagtgctcaggagccatagctgctgcagggatcatcatccccatcactgcctccctgcatctccttcctctagacctcctg

SEQ ID NO: 6957 - DNA, 2501 bp, Artificial sequence
  DNA replication origin
ggcgcgcggtgggcatggcgggtgcggggctgcgggcggccgctcggcgctggctgctgtgcggaggccacggcgggccgcgagccgcctcgtcctcgccctcctgccctgggtgcggccccccgggtcccggcgcccactgccccggcgtcccgcgctccgcgcccgcccaggcacccaccagcggcgccgacctcagcgcgcacctatgggctcgctaccaggacatgcggagactggtgcacggtgggtgagccggggcgggacgtgcgccggggtgtcttccgcgtggactgatggacggaccgagccccagggtgccgctcctccggggaaacacccagtggggctcgccagggccccggagcgcaagggccgggcggcttttcgcgagaagctccggccgttcatcccgggggcctctggggcgccccgacgcccgggggcgggcgggaggtttgttccccggctcggtctgcaggagctcggggctcctcgagcggctgccggagtgctgggcccccgccgacttccttcggggtcccgcctgccgtgaagccgcggtggaaacgcccccaaccccttgttctcggccaacccttagttggggcgggagagtgctgtggacaaagccagcgagcggcgccgggcggaacgggctcctagggacggccggaccaaaggggacaccggttggacttcccagacacacctcgatgtcgccctggaggtccggccccctctcagcccgggcagcgaaggctgggagaagccaagtcacccccgccccctggagcccagactagggctgcaaagggcacttaacctccctgtccctgctctctccctctgagaaatggcgtgaggaggctgaggccccttcttggagggggccggctggggcgcactagtgaggccccagagctgagagtgctggacatctgcctgcttgtctccgtgggtctagtggggccctgcttctgcagcagacagatatggtttgggtcgtgaccctatcactgaccagttgggtggtcccccagcaagtctcaccctctctcaagcatgaaacgcagtcctggggcctctctgtcccagggttgggtgatgactggaaccaggccaagcagggcaggagagcttccggaggaacccccaggggtgacgtggcttttgttgtctgataaaacaaagtagccctgtctggaagattctaactggctagacaggggttttcactccggctttgtggggtggcggagaatcacttcttgaccagtaaaggcaggatggtaaaggcccctgaggaatggtcattttgaagccttgggcatctgtccaccctcgaggtcccaggttgagtttgtgtctgtggaggggcggcccagcgttatttaagaagtctttgctctgggcccggagaagaccctcagagtatcctgagaagcctgccttggaggtttcagggaggactacggggatctactggacattgtcctcctgggcctgcctgcatctttggagcctcacagccctctaagctcctcttgtcatacaaggagcaaagtcattcccaccaagatcccatggtgagcaccagcaggagccagcttcacacctctgggcgccgaggtccgctttgggctaatgcccacgggctgagagcagtgcaacaggtccctcagtcccccagcccccacccacctggcctcagtgtggtgacattgggaggctaggctgagaggcagagtgattaatgcaggtggggtgacttgaatggtgatctcaaccccggtgcctgttactgggtggtttggagcaagtgacttcacctccctgagccccagtttcttcctccggacgatgggggaataagtgggactgcctcacaggatgggagtgaggattgaacaagacaagcctctaaggcatccacaagtgtcacggctgctagggagcagttggccctgggacctggcaccatgggcaggtgtgggagctagggctgaggagaaaggagggcaattgctggacatgctgagtgggacacaccctcagctgccccacccccaccccccacccacaccacctatggaagggaacaggcttctgtcgccccagagccaaggttcttctagtctagaaatcaggccaggccaccaggccctgtggctgtttccacatcctgctttgttcctgggaggactgtctgcccctgggcccctgggaacatccttaggggcagaggtgaaggcctggacctaaccaggactctgtgccagcaaggggctgcactgccgagcagaccctcccaggtcttctgcaccaagagtcacagtcacagttggtatccgggaactcagggccatgggaagggcaaggcccagggtcctagtgacacaccagaaccctgggccttgaggggtggctcagaagcagctccctagagcgttgcagtcaactgtctcacttgcatccaagtgaagactcctgtctacacc

SEQ ID NO: 6958 - DNA, 1820 bp, Artificial sequence
  DNA replication origin
cggctcgcggcccgccgtggcctccgcacagcagccagcgccgagcggccgcccgcagccccgcacccgccatgcccaccgcgcgccgcccgccgcccgcgctgccctcggccagcccgccgcccgccgcccgccgccctccgactgcgcgcccgccacggtggcctcgtgctcctcacggcggccggccaatgggtgcggcgcgcggagcccggcctgccaatgggcgcgcccctcggcccggggggcgggaggccccggacccggcggggcggggcggggcggggagggctccccagccccctcccccagccagtctccggcgcggtccgggaggactctgcgccccccttcggccgtcacgccggcgatggcggcgcctttccctggccccagccctggaagtcagcgggcctaagagcggccgtccctgagaggctccggacggccgaggcgccgagaggagacagccggagcgcgacgggtaccccccgggcccccgggtcctctgccgccctctccgctcccgggtccgcccgccctaccctgcgcctctggatgcttctgaccccagatcctccgctcctccccctagtcctggtgctctcctttcccggggtcctggtccccggtctctgggctcggactgactgcccactgaccagagcccgggccagtccactcactggtctaacaaataaagagcccttcccgcgcttcccggtgccaggcccacgctgggggaggccgaggggcctgcagggcagccgacgtccgctaaccaggtgactgggccgtgcgctgcagggttgtgggccacggtcactgcgcccgcttggttcggacctcggcaactggccgcactgacccgtcaactcccggtttcccggcgcacgcccctcgtgagatgctgtggtcttttctagcaacgtcgacaggctttccaacaaaattcctctttcctgcgcagaaccgctctccactcgcatttcttctgctcagatccgtattccgagcccgcacgcataccaggctgtgctcagggtccggaggaggccgacccagtagccgtgggccctgtcggaggggagccagctgggcgcgcgttgttttctgaggtggccgcgctgtctttcagggtgtgtgtacattcgaaactccactgaaccttgattgaagacctacagtgtggcagtccatggcctggggactggtaaggattgaggccgtaggatgggctcgagtgtggcggtgtccccagggccccagtgagcaagtgggtgtgctgggaacctggccacaagtgaacctcctccaggcgaggggatgccctgcagcatccagccgtcaaaacctcctgtagaaacgggagcgagcatcaagcctgtgtgtgtgcatgcttgggcggagtctacccggaggagaaagaggcttccgggctggccctccaaagccggttgtacaggcggcagctcaggctgctcactgcgggccctatgaccctttctggggccctgcttgctctctccagtctgcttttgtatattttgtgtccatatcaccaaatcgtctcattggttctaagctttcatttaccttccttagattgtctaatagttgtctcctttctcaaagctgttcctgcagtttttactttagtcctaggtaatggggtgacagcccctttcagttatcttcagcaagcacagcagcatgagaagacgcaattacaagtgaagtctcttaagtcagagccctgcttctacctggcatagtctcttaaactgtcagttaagagactacatataaacaatacacgt

SEQ ID NO: 6959 - DNA, 1583 bp, Artificial sequence
  DNA replication origin
gtgtccccgccccgcgccatcgctaggcgacgtgcgcttttgccgcgccgtgctgcccgcgagggcagctgaggtggtggtggcggccgccttgtcgaggcatcgcgcgcccgtgaagtgttcgccgtcagtgctgttgggtgcctggagccgcgtcccccgtcccgaaaactgtccttgacagtacttgcgcggcccaacggccgccggcgcccccgcgtctccatggcgacggcctttttccctgcgaggaccccggcggcagggctgccccgcggcgcctgcttggcgcgacgctctagcggttaccgctgcgggctggctgggcgtagtggggctgcgcggctgccacggagctagagggcaagtgtgctcggcccagcgtgcagggaacgcgggcggccagacaacgggctgggctccggggcctgcggcgcgggcgctgagctggcagggcgggtcggggcgcgggctgcatccgcatctcctccatcgcctgcagtaagggcggccgcggcgagcctttgaggggaacgacttgtcggagccctaaccaggggtatctctgagcctggtgggatccccggagcgtcacatcactttccgatcacttcaaagtgtaaggggggccctactgacccttggaatttaggggggctaccctaggcggcatccacaacagagagaattcccttggagaggggaccctggtgctcggctgtccctctcatccgcgtagaaagtccctcatctgggggctcccgaactcagccctctcacattgtggccggctttactgaccctcacagacccaggctgggccctcccgatagaggccagccaaaggttcactcagcctctctttcaaggctggtgtatctctaaatcttagaccctcctccgttaccgtcagccaggtgggatgcccacgttttggagagaaaccgttctgaggaacccgggcctctgggtcccagctggctctccggcccccaggttatgtattctgggttggccacaaacagtggaattctaggcactcccgggacagggtgggactgctgtcctcattcatgcaaccagcaaatattcacggcaccttgtttgtgccagacagcagaccgaggacacggttgttaccaagaccaggctgttgccttggaagagcccagagcgtgtcaagggagacagccacatcacgccagaaatacatgacagctggattagccctgggagagggaggcccagatgtgggagctcaggggaggtgcagctcaacgtggagtttggaggaggctaccttgacctttgaatgccaagtgggagccagccagatgaaagggtaggagaaagtgtttgtatatcctcagtgccctttcatccttgcacgtggcagagaccaaacagtaaaatgcagacacgtttgacacttttctgacctcagaaggactcaggacgtgtagaaggcagaaagagggatgggcaagagtttattcctgtttccttctcatgctctgtatttcttggtgtgtttgaagagactttctgttgtgtgtataaatagatatatctctgtgtggtct

SEQ ID NO: 6960 - DNA, 1235 bp, Artificial sequence
  DNA replication origin
cggctgcaggggcgcgcctgggcgcctcgccgcggcggagagcggcggcggccgtcagcccctggcaggcagcgcggcgcgcgtcagcccgcgggaggcgtgaaaggaaagtggccgggcggcggcagtggcgggcgcccaagttccccggcgcgccgggcccgccgcgcgcccctccccgcgcgcgccccgcgctccgcccgccgagcccccgcggacccgccccccgggctcgctccgggcggggcgcgaacccgcagctggggccgggcgcgcggccggtcggaacttcggagggcccgggcggtcgctgcgcggtggcggagcgtctagtggccgccgcaaccggtggctccgggccgccgttgtgaagtgagcgggcctctcccgcgccgcggcccgccgggcaccgccgctggaccccgcgccgacccggcagcgccccgacctgccgctcgggaggtccgcgaccgtttcgatttctgttcctaaagtccgattttggacgctgaaaaggaggctgtggaggggcgagcggcgtcctgggaagcaaggcctgctctgtgcggagcagaaacgccttgtgcgaacagaaataaattcccgcggaaaggatgtacgttatgctaagtttttcacaagatgtcagctgttcccgtagggtctaaaactaagccggcaggcacaggtcacccccagagcttgtgctcaaggagtggtggacgcttgggtcaggtgggggtgttcccagcgggtcgcccgaagcagcactggttgatggtcccaagtggtgtttttgagtcctgttagcagtgatctgtgtttgagaaccaagtaaccatcaaagagattcgaaaggaagtaagatggattttgtcaatccctgcgtatgtcttctcttgaaccacattttctaagatgtcattcttaattttattgcatctgggtaaaatgcctgaacgtgtaatcattaatttgtcaactggcgagaggatgaaggaagatgtgtcttcatgtgtacactttgaggcctgttgactagcgttttgaggcatttgttgaattaggccgtaggtagattcggagttaagatttgtttgcgatgtcagaaaagttacggcctggtagaaacggccagagatcaggaaacagttctgttattaccgttgtcattgactaactgccttatcttgggcacatttcttacccattgtagctttgattttccttatttg

SEQ ID NO: 6961 - DNA, 1533 bp, Artificial sequence
  DNA replication origin
tggtgccaggcagcttccagactcccacccacagcatccacccagggctgttccttctgtgggcctcctggaggatttatccagaggagaagcaacttgacccctgccacctctgcctcctccaaaggccatcaaccctgggaggcctccagactcctccactcctgaagtccaagactcggccaagcaacctggaaaaggcctccctctgtccctgaggcccacacagctgaaggcaaatggggtccctcacttgatccctgccaagagttggtccttgtcctggcatttctgctttttgcaccttctctctgtttctgtctctctgtgtcaccatccttgtccctgaagctttggttgccacggcaatccccatcacacccagagcactggcctggccaagagagagtgggcttgtgtttctggagcaggagacacagtcaacagcgacagtgcacctgggcaattgctgggggcagcagagcctgggaggttcccactggggacagtgtagtaggaaggacacttgggacatgcccatgcctcaggccaccaagactgtcatcgacaggagtgtcagcctcaggtactaggttaaggacaagcaaggacaggctgagggggacagtggccttgtgggtagtgctgcacagcagggaagtgccagcccaggggctggttcgcatcctggctctgccctgcactgcaacttaaatgtgcctcagcttcctcatctgtggagtggtgtttggttaagatcgacctcctgaggctgagaggatggaagagttcaagttcatcccatgttggtgttacctgccaggcagagagttggtgaggctgggctaattgcctccatgttccttcctcaacacatttgtgtttgggtgaaacctgagacatacttgggggtagacaaggggaaggtgtgtcctgggagtgcagaacacagggctttcctgtggctctcccaggggtgtgtaccctggactgtcccttctctgcactgaccatggcacagcccctgccagcctgagtccccttccctggctcctctgcccctgcccccaaacatgtgtgtaggtggggagaaggggcactggtgttgggacagtcatcagcaagagctatcccctcgcacggagtccaggggacctcccagctctcctccaccgcccccatccccggcacccatttagctctaatctacggggtccctactgggaggctcatggggcttagcagggcagggagggctataagcctcacctgcctttcctttcgctccctggcctgagggtgcctcagctccccgctcccacctctcagcccctcatcccccacatcctcagaggacagctcaccaaacccagcttggcccatgggaaacagtgtagggggtggccctgagctgaaaggcggctgctcgaggttggcaggctgggaaggactgactgcaggcacagcagggtcccccgcgccgtgcacacacctccatacccaccgcacaaccacgtacacgccagtcggcgc

SEQ ID NO: 6962 - DNA, 930 bp, Artificial sequence
  DNA replication origin
caagtcgcttctcctttctctgagcctcagtttgctcatcaccaaaactggcactaacagcagccctcacctcttgagaactgttcagactgcccacatccagcacccagcacacagcctggtgctgggtagcccctatcagcgatagccatgattattcatttccttcttccatggtgaaccacacggagtgggaacaaaggtctggtggctggacctggagctcctcaagggtcagtcctccctctggctgcagtccctggcacagggtgggcctattgtttatgttgagggagagactgggttggcttactgtggacctgaaggaggagccagaaggaaacccgatcccaagtgggcaaaggtcacttgaggctcaccttgtttaccctttcctccagtccaaccccagggaagccatggggcatgatgggtggggtgggatgggatcaggacacagaacatgctaatgaatatggtccttcactcagggaagtgccgtgcattacaactgggcatcagggaggagggacatttgaatggacacaaccagggcaggtagaggtttgggggtggggtgggaaatggcattcaggcccagagaacagcatgctcaaggcctgggtgtgaagagaaagtctttcccaaaggatagtccttgaacccacctggtctggccttttctccccatccatcttccgcaatctcaaccagggtcctcccacctgaacaacgtggcagcccttctgtcccccatccagcctctcctctgccctgctgtccctctgccccatctatcccgcaggagcccccttgagcctgtcatcctgcctggttgtaatagctttcaccaccttctcattgctctgtgagaagaccaaagtccaatggcctgtctctgtcacaagcccctttctcagctcaggccac

SEQ ID NO: 6963 - DNA, 787 bp, Artificial sequence
  DNA replication origin
cgccgcggcacacggaagtgcgagggggcggggccgagcgacctcacccaggtgccgccggccccgcccccgccaggccccgcccccgccaggcctcgccctgccaggcctcgccccgccagctgcaatcggggacagcgtccctccgcctctgcctgcgcgggacaccgagtctcccggtccctctgccctgcctggccctcttcgcatcctcccgccattagcgcgcagccagccctcagaaggggcccattttacagaggaggacgctgaggcccggtggggaggctccctccgcccgctggggcctgggaggggccggcgggggttcccccgctccccacacccacgcccgggactccccactggccagctggcccgcctctcctggccccactcctgctcttcctgttggctggagctcggacgcggccgggcgcggtgcccgccgccaagcccgctgtcccggctctgccccaaagactgagctggttagactccagggtcggaggttctcgctggtcgggcgctgcactgctcctcaggcggttctgggaactgcccctactcggactggcagttgcccctaccccgattggcagtcttctgctttcctgcccccacctttgagacctctctattgctcctggcaggcgcctgagcctcctttccagacatggaacttggttgtcagccataactccttcattcattcattcactcattcatctattcaccgagtgtcccctaggctcaaagtctagggaccagttggggttctagggag

SEQ ID NO: 6964 - DNA, 805 bp, Artificial sequence
  DNA replication origin
aagtgggagcagttccgatggtgctctccttctgccgctccaccaccagccaggaggacccccccccccgacctcctcccctcatctggtggagcccccacaacgggagtggcatctgggttgggggcgagtacagaccgtatcgggcaggggccaccctgggaggggtctcagaggggcggaggggtggggtgggaagggggatggtggagactggagccacgcccagcccagagacggatgaagggaccgagaaagactcttgagaccgaaagaagagacagcgaggaggaggcgccgcgcgggtcgggcctccagggacccaggggcgggaggcgaggcccggcgggcggcctggcctgggccccgcggtagagcggagaggcggctggactggcagggggcggcgagcgtgggccgggggcgcggctccgggaggacgggatcgagggggcggcgggcgggggtaggggtgtgggtgggggtggggcgatggagcacgcggagggcaagggacggacggatcgggtggcgagggacagaaggatcgggtctcggagaggcgcgcagggggagaacacagagtgggtggcgacagacggacggacacagggcccgggagagagtcgggagggacggacgggcccctcggaggagcgggagacacacgggcgggtggaggggccgggagcgggcagacagaaggacctcagcccccactgtctagcggagggacacacagacggacagggggacggagtcaccggcaggtctcggcgcggcgggactttcgctgaccgcggct

SEQ ID NO: 6965 - DNA, 963 bp, Artificial sequence
  DNA replication origin
cccctcgatcccgtcctcccggagccgcgcccccggcccacgctcgccgccccctgccagtccagccgcctctccgctctaccgcggggcccaggccaggccgcccgccgggcctcgcctcccgcccctgggtccctggaggcccgacccgcgcggcgcctcctcctcgctgtctcttctttcggtctcaagagtctttctcggtcccttcatccgtctctgggctgggcgtggctccagtctccaccatcccccttcccaccccacccctccgcccctctgagacccctcccagggtggcccctgcccgatacggtctgtactcgcccccaacccagatgccactcccgttgtgggggctccaccagatgaggggaggaggtcgggggggggggtcctcctggctggtggtggagcggcagaaggagagcaccatcggaactgctcccacttccccagttccctctctcttggggcaggggagagccccaccgagccccgccttaaacctggtcagaaggatctgctgtgagtgggcggggggtccccttctctgacgcctaccctgtatgcgtggaagctgtctccttgtgctaagtcactggtatctgggtgtgtgggtatgttgtgtgtctgtgtcagcttctgtgctgtctgtcactgtgggacttgcctgtgcatgtgtgtcctttttcgcatgtgtgacttgcttgtgtgtatgtgtgtatgtctgtttgtgtcctgaggctctgtgtgtgtcttttgcaactgtgtgtaccattcttggtgtgtttgttgtcaccagactcgtgtgtgtgtgtgtgtgtgtgtgtgtccttgcctgctagtgtgtgtgtccctgtgtgtctggaggtttcggtgttgcacactgggtatatcatggtgaccaactggccatgagtacgttagatctgttaattgtggaagcccctggtgttgggt

SEQ ID NO: 6966 - DNA, 1040 bp, Artificial sequence
  DNA replication origin
cccttctctgacgcctaccctgtatgcgtggaagctgtctccttgtgctaagtcactggtatctgggtgtgtgggtatgttgtgtgtctgtgtcagcttctgtgctgtctgtcactgtgggacttgcctgtgcatgtgtgtcctttttcgcatgtgtgacttgcttgtgtgtatgtgtgtatgtctgtttgtgtcctgaggctctgtgtgtgtcttttgcaactgtgtgtaccattcttggtgtgtttgttgtcaccagactcgtgtgtgtgtgtgtgtgtgtgtgtgtccttgcctgctagtgtgtgtgtccctgtgtgtctggaggtttcggtgttgcacactgggtatatcatggtgaccaactggccatgagtacgttagatctgttaattgtggaagcccctggtgttgggtgcctacccaccagtctcatgtgtgagtgtatctgtataagtgtgtgtatgtgtgtgtactcacgtgtggctctccctctgccactgagtttctgtgaccaggcccacctggtcactaagggaggggactgatccctggggtttcctcgttcctgctgtggagtgagctggggcttggtgagcaggccagcagagggaggctgtatggtgcatgtgtgatatgtgtggttgtgtgtgtgcgtgtgtgtgtgacagagaggtgtggtggtgtctgggcagctgtacctggctgatgggtggtgtgagggctatgcgatgggacagtgctggggtaagcctgggagtgtgtggccacggtaggagtgtgtgactggtgggacacagtctatgaaactgccggtgtatgcttggggagtgactgtgattgtggggaaccgagagtgcctgggcgtgggtgttagcggcaggagggggtgtgacaaggtgtgtggtgacagtgctgggagggaaggtgagagcccagtgtgggggtgtgtgtgtgagtgtgtgggagaccatgaggatgtgggtgtgcacatggagagggctagagggcaagtcttggggtttgtagtgttgtgacca

SEQ ID NO: 6967 - DNA, 1556 bp, Artificial sequence
  DNA replication origin
ctgtgggctggggcagggagtgggcatctgggactgatggaagctagaagagtagggggagctagaaaaccccctacacccatggcagctgggggcagggcccagcctgtcccagggacacgaagaaggtcagcacagttagggttgggctaagcattggccttcactgtgtggggcccagaggctggggatgaggagtgttgaggagtggtaaggacagtgatgcaaacagcaggggcctgagggctggagagcgaaaggtggatgggcctgggcgggaagtgtggttgagggtatcctgaaggcttaggagcaggacttctgcaggcatcagacagaccctggttgaatccttgctcaatatttactggctgtgcacacttgagccagggactggaccgttccccacttgcctcgtctgtgaaatgggcagatcacggggtgtggtgtcctgtgagacatgaacgatgggaaggagccactgtgtggggtggggtggagcaggaagacggaacagcaagcccagaggctcctaagcgggaaggaactggctgcttcgggaactgaaaggggtcagcgtggctggggcacaggaatgagggaaaggcagcgcctgcccgagaggtcagggaggtaacggtgatggggaggggggtggcggggggcaggctgcatggagcaggctgaggggaggagtctgggcttgtcagaggggcaatgggaggcactgggggcttgggcagggggtgacaaaatctgtctgaaaagccccgtctggtggctggaacagggggactgtcgggccggggtagaggatggagagcagtcagaagacaggtgcagagcctggggatggtggtggtgggagaagaggatttgagacttgaggacaggctgcagcggcagacgggatggccttattgtgtggggagcagggggagctgtctggcctgagccactgcctgagctcgtgcactcctagtggatgaggagcgctgggaggggaacggcgggggactggtgtgggcaggcttgagctcttctggagtcattcatgtggtgaagccagggaggcaggtggggccacaagcctgaagttcaggagggtctgggcccaaagtagagacgggagcctaaagccaggattggggaggagagggctcaacaggccttctaaggggtgggggagcatttgagaggcccacgaacaggactgggatggctgtccctcaaaggtctctgccaaggcacccaggagggcaggcttgtggtggctgagccgctgttttcacaacagctccggaagctttggatcatgtctatggccgtgttgggtaaacaggcagagcagagcaggcagtcgccaaggcctgaggctagatcagatgtctgcgtggtgtaggttgtgggctggggttgttggggtgggaggaggatcccagggtcctccagtgtcagggctggagaaagcttagaggtctccattgttgagacagggaggctggagccccgggaggggcagtagctggccagcctctgccagtggactcatgctg

SEQ ID NO: 6968 - DNA, 2098 bp, Artificial sequence
  DNA replication origin
gcccccgccccgcgcccggcctcggcagccgcctgtcgccgcgggagcagccgctatctctgtgtgtccgcgtgtgcgcccggtccccgcctgccgcaccatggagagctaccacaagcctgaccagcagaagctgcaggccttgaaggacacggccaaccgcctacgtatcagctccatccaggccaccactgcggcgggctctgggtgagtgcgcggcgccggccggggacgcggctcgggcggggcggggggcgtctgcggcggccagagtcgccgcgggctctgggtcgcgctgcgagatgcctagacgaggaaggtggcccgggcgccgtcggagggcggagacgcgcgcctcgcagggccccgggctgcaggcggcttccgctgcgccgcacactcgccctacgcccgggctcggccgcgtgggcctctggtcctccgtgcgcctcaggccggctcttccccacgcggatcgccggccgcgcagctgcatggtggcgcgggggatgggctcgcgactcgccaagtaccctctagggtgatgccgggaaggccaccattactgctgttctacagaacgcggccctcttaaccctctccaccacctggctgtgtgggcgccgccgggagtgttcccccttccagatggggaaacggaggctccgagttagtcagctacccaaagttacacacagggagatctgatttgagccccagcagtccgactctagagaccctgtttttaattcctcttgcaggagactcgggggcccggccttctccccacctcagactacgctcccctacccctgtctcctgccacccctgggttgggtccgagtttggagcagggggctgctgagacgccaggcagcggcggggctgattgggggaagaggggaggagggcggtggcacgtgggtgcagaaccctgggatccattgtgaaaaggaggtctaagatttgacctggggcgggaggaggcggagggcaaggagactgagaaggctgagcgccggaaggacggagttccagggccctagcgccgggagtgacgtcctggggcagggccagccaccaggtgctgtatctcccaggcaggagctggcgtgcctaggccccaagatccttccctggccagcccttttggcccagaaggtggacacccaaggagcctcctctgtagcggagacagggataattaatgagggccaccgtgcatgcagctggaggtgtccagtggggtgggtgagggggtcagtcagtgaattacttcagagcctgcttcccgctctgtaaagcggggacagtaatggcacttaaccacgctgggtggtttcaaggactccagtgctctacttggaggctgctttgaggccacagtgccagcagtgctccgggctcatgacagggttgtgagggctgcgtgatggatgatttctcgggaccttcccaaacaagctctgtttcagacagacaagattctggcttctggccaatttcattcaggatatattattaagaagtaaatctgttcacctttctgggtggatacgcattcaccctttgtgcctctaagacaccctgttctcagaagggattagatgtctttcaaagcccttcccccacccactgccttgcacactttggacctgttagctctcctgggtttgtgtcagtcttaccacttatgtggggtatcccctgcctgggcagggacctggcttactctcagctcccctttcaccagcctggcacacggtagctctgcaggccttgtattgcttatttggtactgttggacctgctacctttggccgtttcagggggtctgaggtctagctggagagaggcagcaattacccaactaagtagtattgcacatctgagcatctttcagggctagataaaacatgcagatgtttacagggttcctgagctgccaagtaggtatctggtatgacacagcatcatcgtttgttgcatcctgagaataaccctgtgagatagattgtgttgtattcacattttatagacgggaacactgaggctagtgtgttaagttacttgcccaggctgggaattggtggccatt

SEQ ID NO: 6969 - DNA, 1980 bp, Artificial sequence
  DNA replication origin
cctgcgaggcgcgcgtctccgccctccgacggcgcccgggccaccttcctcgtctaggcatctcgcagcgcgacccagagcccgcggcgactctggccgccgcagacgccccccgccccgcccgagccgcgtccccggccggcgccgcgcactcacccagagcccgccgcagtggtggcctggatggagctgatacgtaggcggttggccgtgtccttcaaggcctgcagcttctgctggtcaggcttgtggtagctctccatggtgcggcaggcggggaccgggcgcacacgcggacacacagagatagcggctgctcccgcggcgacaggcggctgccgaggccgggcgcggggcgggggcgcgttaagtcgccgggcggggcggggcggggatgggagaggcggggcagggggaggaggcggggctcggatcaccccaggccttcagccccgccccgcctggggccgcctcctgcccgctcccctcccctaggcgctgggccgctgcggactgcgaggttagcagttaaccacacacaccaataataataacataacgaacaactcaggattcgagtctgggctcctgactcgaaagcctctcagtctccctcctccacacagtcctccgtggacttgtcacggcgaatcccattttagagatggacaaactgaggcttggcaagggcaatcaaggtcacaaggctggtgggtgccaggcttggccccagccgaccaaccccaggcccaagagactgcaggacttaattttgagactgagtttcgctgttgttgcccaggctggagtgcaatggcatgatcttggctcaccacaacctccgcctcctgagttcaagcaattctcctgcctcagcctccctagtagctgggattacaagcatgcgccaccacacctagctaattttgtatttttagtagagacggggtttctccatgttggtcaggctgatcttgaactcccgacctcaggtgatccgcctcggcctcccaaagtgctggggttacaggggtgagccaccgcaccaggccctatttcttttttctaataattaaaaaacttgttttttctttgagacggggtcacccatggtcacccaggctggaatgcagtggagtgattacagctgcctgaagcctcagcctcctgggctcaagtgatccttctgcctcagcctcaaaagtagctgggaccataggtacacactaccacgcccggctaatttttgtatgttttgtagagatggggttttgccactttacccaggcaggtcttgaactcctaggctcaagccatctgccctcctctgcctcccaaagtgccggattataggtatgagccaccatgcccagccactcagggctttagagccctgcacaggggatggggattattgaaaatgagaataggatagtggtagccatgacaatgccaggtgatgataactgagaaattactaggggaagatcctttacaaattattagggcctagaaacactactgacttttagggagattattgggtttgcttccaggtctgtagggacaggggcacccaccactactgttatcagaccccatggttcccagaggtatgaagctccccagagtgggattagggaggggactttcatcacagacactgtttcattcaatctgcccaccacacttggccagtgaggtacatactgcctacaatgcctattttacagaggaagaagctccatttgacagaggaaagataaaggcaagaccctcaaacggatggctgggcagggagctaaaaccctgagagatccaagaggcaccagtggccgccctgtgtcctctgtgtcctccctgcattgcccatactcagagagctctggctcatgaggcgattgactgaatttgagtgagtcccccagctcgcctccaggtgctcctctgctggcctgacccccagatgcccaatcagac

SEQ ID NO: 6970 - DNA, 1175 bp, Artificial sequence
  DNA replication origin
gccgcacggtgcgctctccccccgggacccggaggaggcaggcggcgccagtgtctcccgcggcgctggggtgcggatgaaccgctcctccccgcgcatttctgggctgggggacagctcgggctcccgcgccggccccgactccgcgccggcctcctctgcgcacacctggaggaggccccgccccctgggagctcaggtgctagcgggcggtagctgctgcggtctccgagctcatcctcgtcaaggctcggccgggctccctggctgctccggagcggggcaggcgccccctgcttttctccggccctttctggaatcgggggggttggggtagcccgggtctgtagagagcactcactaccccaggtaactgcctgcagctggaaccgcgaatccagggcgccccccatcttctcccctgccctgcgcctggcctggcgtcgcggaaggcaacggggatggggggcaatatctccccccaccccaccccgcccccacgtgtgtttggaggcaggtacagggaagtcaaagccaaggtctttcaaaccgctcgtgttgttcaaggaaatagacggtgctgctgaaactgttgcctccagtctgggagctgaagggagtagtttattttttgataccttcgctggcttggatttagggtgggggagatttgcaaacggcagctcctgtctaaaggggaaaatactttatctagtggatgactgatatttttcatttagctttgtgctgcctgttaggagaagggcgtctgctttgttacttcacaggattcgatttatttgcttttgttcctatctgcatgttcctacggcgttttagaacgtttcagaacagtgactttaaagcgaaaataaagtaaaagctcagcgtgaattaagaaaaataagtgtttatgggaaggtgctccttacccaaagagaacacactagtcatcctcaattgttggggggcacctgggcagagagactggggaccagacagaagactctccagaggccttcctgagggggtgtctggtccgtgaggatgaaaacaaccaggctcttgtccttttttgtgctttgtttttggagactggagaggcgagaaatcgccctacggtctagtaacaatataaagctggcctgggccacctctcctatggctgcttctga

SEQ ID NO: 6971 - DNA, 1568 bp, Artificial sequence
  DNA replication origin
cacttcctgcaaatgaaaattcatgatgcttgggactcatttcctccacaggcttccgaaaacagaaaacatctttagggcttttttgcattttaaattgcagcagcatcagccaagccagcatccagagagacagacaaggcagtcagcctgcacccctacacctaggatagactgactggattatgccaggggcctccaggcctaagagggaattatctccgtgtaggttggtatccaggtgcacacaaggcagaaactcaaggaggctccctatgcgaagcccccgccagctttgggtcaggccatctcccaggcagatctcccaggcacctgccgccttccgccacagtctcctcactgaagcagaagtgagagaggtgacagcaaggtagagagatgggcgtttgcaaagccaattattgctaagtaaagagtcaaagcaagcacgggtctgaaagcctgagaagagggcaaagcgggcgagcggcgggcaatcggagcggggacgagtcgagtcatgtcaagcttctccctaggggagcgctcacccggaaaggcttccagccgacaggggttggggggcactggcggtctccaaaggggagggctggccaggagctgctccatcctccctcgacccagccccggccggcgtggaagctgcacgtggtgcccgggccagagctggggaggggagccccacagcggcagcggctccccgggcattgctaggttaccgacgtgtgcacagccggcgacgggagcgggaacgcacgctccacccgaacccctttccccgataccgaggccgggcctcccccgcgaggggatgggtgtgcttcacccaccggcgcggagggcgaaaccgggcaatcctagaattttccggatgccaccagggaccttcttcctagtcaacgagggggcgggggaggagtggaaggcgagaagaggctggcaagggggctccggctgaagacttgcggccctcctgccatcgctcgggggcgttgaaggaaagttgagcccgaggacactgaacccgaatcaccccgactcgccgcccctccggctgcaccgcgctccacacactccacggccgcccccaccccacaaatgcagaattaactctgacattcagggcctggaggggagcgcggagtggctgtcacgcatgtcccctctctgtgtagacgacaccgagctggcagcaccctctccaaccccctcaacccatccagcgccgcggggaagggggagggggctggaggaccatgacaggatcggatttggcagcgggtgcccgggctctggctgctcaccgttcgcgtggtccgcttgctgctgccgttgatgctgcatttttttcatcatcatcatcatcatcatccacgaacatttattgagcgactactgtgtgcagggcactgtgctgggcgttgaggcgggggcggaatggggaaggggatcaccaagaggtaggagccgcggtccctgcccttattctcgcttcagcaggggggtggggagggacggggacaaataacagaaaataaggataattg

SEQ ID NO: 6972 - DNA, 1435 bp, Artificial sequence
  DNA replication origin
tgccccgtgagcagagggcactgacagacttgacaggaagatgagggagaagcagagaaagtgagggaggaggagggaaggcaagggagaggaagggggaggagggaagatgagggaggagggaggagggaggaggagggaggagagggggagggaaaagaaggaggaggagggtagatgagggaggaggaagataaaggaagatgctagaagacgaaggaggaggaagatgagggaagatgagagaaaatgagggaggaggaggagggaacatgagggaggaggaggagggaacatgagggaggaggagggaagatgagggaggaacggaggaggagggaagatgagggagggaggaggagggaagatgagggaggaggaggagggaagatgagggagcaggagaagatgagggaggaggagaagatgcgggaggaggaggaggagggaagatgagggaggaggaggaaagatggaggaggagggaagatggaggaggaggagggaagatagaggaggaggagggaagatgagggaggaagagggaagatgagggaggaggagggaagatgagggaggaggagggaagatggaggaggaggagggaagatgagggagggaggaggagcagagatgagggaggaggataaggcttggaggggcctgaggacagatggacaccagaatgcccaggtggccctcagaggcatggggttttgcaagacaggcctgcggcacagccagctctgcacttgagcccactcttcccctttgggggctcagtcaccccatcacagagtgcagcagggctgacaacagcaaaagcatgtgtgtggtttgcctccctctcaggatggtcccaggttcaaagacaatgctatgtatgcaaaacaccccttaccagatgtgtgcgtgcaatcttagggccccacagcctctctcttctcaaagagagtcaagcatagcactgaagaggctagagctctatcacgtgagatatggatgagaaaggaaggaaagcagacacactctctggctgggggctggtcttgaggactaaggatcctgacctggcagcacacatccatcaccggcccccagagcgggggttgggggagaggtacactgttccccgggaggttccacccaaaacaaaaaatctggcctcacatgctggggtgggaggtagtaggcgtctccttggagatctccgtgaatcatagcaaacgggcgagtcatcgtcctccaagaatccttggggatgatggtagcctcggggcctctcagagtcgatgtttctgcctgggtatctgctgtagtagccatagttttgcctggaggtcagagaggagggcagtaaggttctaggtaacaagctctgtcactcaaccctgccagactgacatccatactcctctccccgcctcctcccttg

SEQ ID NO: 6973 - DNA, 1175 bp, Artificial sequence
  DNA replication origin
gccttgcggaagtagggcaggcagtgcgcgtagtcccagccgcgggcgccctggcgctgccagcgctcgtagtcctcggcgtgcccacggacgtagaccatggcattgagggatgaggagccaccccagacgcggccgcgtggccagtacagcacgcggccgtccaggccccgctgcacctctgtgtggtagcaccagttgtacctgtcgtcgcacaggttggccaccagggccgcgggcatgtggatcttccacgagagccgcttgctccccgcgagcacgtccttgggcccggcctccagcagcagcacgcgctcggcggggtcctccgtgagcctcccagccagcacgcagcccgccgagcccgcgcccaccaccacatagctgtactcgtcccggctctcagagcctgcgctggccagggcccgggcacccagggattgctgctgccccagggctccccgtgccagggctccaggccggcccaggcctcgtaggagacaccacatgcttctatctagtccaagtcctctgatccacggaggggaatgagatgactcacttctccctaaaacaggaagaggggctttaaaaatcttaactccgcatatccagggtatgctcaccaacggcctgccgggacagggtgcagcaggcccagcctgatgtggctgctcaaaggaactaggaggaggaagtgagggacacacaggaatttcagaactgttttgtatgtgccaggatggacaggcacaggccaggggatggggcagcagaaaggcccctcccccaactgaggggtaaaatgcttccctgtgccctgtgtatgaacctggagactgggctggagtctgcctgctggaaggcaggggggcaaagggctttccaagggagaaagaaaacagagtatttgtactcatcccttcaagacagtgggctcagcccctaccatgtgctaggcactgttccctgccccacccagttcctgcagcaatacacagaaagacatctgctctcaaaacggatggtttagggcctgggaaaaggacaagacttaaataactgaaggaagatcagcatgagaggcacgagactgtagagctcaaagcctttgacccgaggggccatggggagcactagagggatttgaagcaggttcaagatcagagctacac

SEQ ID NO: 6974 - DNA, 1074 bp, Artificial sequence
  DNA replication origin
cttcctgttcagcaaatacctgctgggtgcaaaggtgaaccacacatgggtgctggctgatgggtactcctggagtgaggatgagtgcagtgagaattattttcaaggacacaagtacccgccttgctgcggaagcccagatgaaaacagcctcgtctgcaagctcaagattgtgaactttgtcccatggtgctgaggaacaatggtacaggcttaaatggtcatccatttttggttttagaaaggccacctggttggctctgcagggcaaaatagagggctagtccctctgagacgagcgagcaggcagccattcactaacatgcgttcattccgtgagtatctgattctgtgctgtgggccaggctctgggctgtgctggcttttcagttgtgtgccagggcaggccctgctgtgagcttggtgttgttcggcacacaggctttgagacaaccagggtgcggaggttaggcctggagacagggttcatgagtcagactttctcagggggcagtggagaggagaggaggatagagccctggggaggagagcttgcctgaggaggtggggaggtctaaggggctgcagcaggaaagcccagtagtgagggaggagctcatggggtcagatggggcagagagaccaagggcactgaggctggttggtggcagtcacaggaagccttggcaaaaggataggggagggggttttgtaaaaagagaagggctgaggttctttctccccccaggggaagaagtgtcaggtgagggtggtctggaggtggctgagctgtaagaaggaggagtactcaggcaggggctgccaggcagagacccaagacccaggccaagtggctttcctgctgttctgggttcagaatgacactgccctggccccctggggcttagggatggggtgatacctggttcagtttcgtagttggggctgtggagtggaggagagggtgtgaagggccctgtagccacaactggaggttgaggtgggcaaacaggtgtgtctgcctgtcccctcgggggttttcccccctagctcagaaggccatgcctcaagtgg

SEQ ID NO: 6975 - DNA, 1511 bp, Artificial sequence
  DNA replication origin
gctggggctcggagggatgggccgtgtccgagcgctggcggagcacgggccgccgcggcgcgcgcctacccccgcgcacacgtgcatgcagtgagccaggtgcatcagctgcacccgccctcgggcttcgcgcgcctccgctggagcccagctagcctcgcggctccggggccgaccgggtcggaactgctgcgtccccattccggacgcagagagcgcgcggggcgccggcgccgccggttaaagtgccgcggggcaggggccgggccgcggccacccgctcctcccgctccggtcccgactgtcgggctctcggccgagtcgccccgggtgagtagccgcggaggcgccccgaccaccccgcagcagcgccgcccggccgctagcccggagaggcctgggggccggaggtttggggccgggctggacgccgagacccgggcccgctttacacaatcgccccgccgcgcgaagcgaaacgggtggaacgcagactgccgaagctcactgactcctttgagggagcgaattctttcagctacgcggggttagagcggtaggagtgcccgctgcccgaccccaggctttctggtaaatgtctgtttccaccaagtgagttcggacagcaacacctggggctcccaaagcggaagccgtcagcactggcgatttggagctgcggttctcaagtttccctggcccgggatctctagcgccgcctaaaatgagatccagacggcaggtccgggtcaggcccgggatctgcatttaacgagcctccacccacgcccccgtaattcgtgggtgggtggcccagggaccatcctttgagacacagtgggtttgggggaaagttcacaaaaatcagctgggctaacagtggagtcacagaggctggaactgctgcttcagccccctcggtttgcaaacgacagggttgtggtgaccaactcagggccatttaaacttgtaggcagaattagctccattctacagatgagaagacggaggcctagagaggggtatggaacttaggggtgtgttgtcagctggtgagaggctgtactaagtcaagcagctgttttagctgaggccctacttgtgtgccaggcctggcccacctgccagcttgattaaggcttgcatggactggggatcagccaggggtttgggctctggcatgcatacgtgtggagttgcaggtagcattttcagagaattgctctgtttcctgaccaaggaactcagttgaggttgtggccgcacccctgcctgggactgggccaccctgagcccctcattccacctctctgagttgctttgggccctgtggcccttgagaacattttcagctctaatagtcatcttcctgttcagcaaatacctgctgggtgcaaaggtgaaccacacatgggtgctggctgatgggtactcctggagtgaggatgagtgcagtgagaattattttcaaggacacaagtacccgccttgctgcggaagcccagatgaaa

SEQ ID NO: 6976 - DNA, 1187 bp, Artificial sequence
  DNA replication origin
cacctggctcactgcatgcacgtgtgcgcgggggtaggcgcgcgccgcggcggcccgtgctccgccagcgctcggacacggcccatccctccgagccccagcaggcgagggcgctgcgacctgccccagcctgggagggggccagcgggcccgccctctgttcgggtggcgggaatgggtcggcgctgcgagaggcggagccgagaaggggcggcccggcggcgccgggataaaagcgcagcgtgcgggtggcctggatcccgcgcagtggcccggcgatgtcgctcgtgctgctaagcctggccgcgctgtgcaggagcgccgtaccccgagagccggtaagcccccgccagcacctcttccctcatctcccggccctcgagcccagatcctgacgtcgtctgatccgccagtccaggctgccccgaaggcgtgcgcggactgccggctcaaggggcatgcctgcaccctcagggcagccccggacatcggcgtcaggttgcttgagtcaggggcgtgggaatcagacagacccggtctcagatgccaccctgtactgttggttctgtcatttatgctcaccaagttccaagtcccgaacggtaaaacgaagggcagtaccgaacccaccagggtctcttaaggtataacgacatggcctgcaattagcggcgaagggcctggcacgtagttattgttacttggggtctgctcacctgttggggcacaagaactgtttctccattagtaccccctccctttttggccatattgattgccatgttcactcgtgaaggcagttgcctttcttccccagtaccctgaatgatcgagggaatcttctgggtcactgaagagaaaatagctcatcccccaaataacctttgaaatgataccgctgccctcttagaatagcatatagcatcaagctccgtagtcacctgctggtggacaaaccccattcactgtttcctgatgtcttcagctcctatccttcccctctgtgtcagttcagaagccctcttggctctttgcactaaagggaagaattcatcccttttgctgtagttgctgcaaggccaacaatttgagcttggtagcatttagggttgttgcttggcctctcaccggccgtttgataagaactcagctcctggtatgatggctcatttgttaaaaaaaaaaaa

SEQ ID NO: 6977 - DNA, 1795 bp, Artificial sequence
  DNA replication origin
ggggcgcgggagggaagccgagggcagggcgcggcgctccgcactttgcgggcggctgctaggagagggcgtagcatgcccgctccgcccctgggccgggcggggtcgggggccgcggaacctaaagggggcgcgccctccgcccccgccgcgcgattctcctgcggggagggagctggggaagaagcagaaatctcagaaaggagcacaggctcgcggcggcaggcgggatcgcacgcggggcggatcgggctggggatgggactgggtgggagctcggggctctggctagggcagcgctgcgtgaccgcccgcagctgctcctccggccgcggcgcccgacaggggaaagcacggagggcggtgctgccaccacggcttgggcgcaccagcgcggggctcccggcatccggccgcagcgcagcggccccctgcgcgcccgacccaggccccggggctccccagcggccgctgccttcggagtccgcccggctgcggtgactggtggggaccgggatgtcagggttgagcgaggaagccaacgcggcgccgagtcgatcctgaccgggggacaccctggatttcgggataaaagatttctccgagcctgggggattgcctgctccccactccggcgcccaccgcactgggcaggaggcagtgagcgccggaggaggcgccttctcgccgccctcaggggcgaggagaaaggaagccggagaagcccctgcgcgttctgggaaccaggcttctccccgcctctctcgccgctgcccccaccccgggacccagcttgcagaacccctctcccccgtgcgaggtatggggtgtgattgggaactttgtggagccctcgcgcaggctggcggtaaagaccgaccggagtgaggctgagtcatccttgcccggccaagcgcaactccggtgaccccagcaaggagtgcgctcctaacgtcgccggggctcccggcgcaccagacacctgggttcatatttgcatgcctttctgcaaccagggctttgctttctgccccgtcacccgcccttggcctcagcatcctcaggttgcagggaagtaagggcgggctccagcttccgccaggtggtgtccggctaggagccaggccggctctcctttccagtagtccctggaaaaagttacccctgcagatgttgggcttgatctcagagttggcagcgagggagaaggactgctaccgagaggctcttagtgcttttcccgagtgcgggcagacccgagctcccctgggctctggcaggtcgcgctcccaccttggggggcaacgcaaggaacaggcccctctccaggagcgccaggtgcgccccgcccgcgggcagtgtctacagcctctacggatgactaaccggttataatgaattctccgcttctgtgcataccctccgcctgaggaagcgtgccagccctttccaaaccgagccaagcgcggcctgacccccgaggcaaggggtcccaggagttgaccctcaaattgggggttagaagaaaatgtgttttcctatcagaacgcgggatcgttcttcctaaatgaaagcatagtgaatgaaccagtgagtgagtgcatgctagctcttagtaagaccatccgtttcccacatggtatctatatgatgacgcccttcatgccttcactcattcatgtagtcaataactgtcaatcagcctctattgataggtacagtaggacatgctgggaagccagtagtgaacaaagcaggctctctgccctcaccgagtttatacactacgaagagg

SEQ ID NO: 6978 - DNA, 1610 bp, Artificial sequence
  DNA replication origin
tctcctccctccctctcctctccgccctccccgccccccccacccgctcctttttctgctccccaagtgagccgggcgcgcgagaggcaggcggggcggcgcggagcggagcaggcagccccgcgcgctcgcccaccgcccgctccgcgcagctccccgcggccgctctcgtcgccgccgcagcgggcgcgtcggagggagcccagcatggccgggccgggctcgccgcgccgcgcgtcccggggggcctcggcgcttctcgctgccgcgcttctctacgccgcgctgggggacgtggtgcgctcggagcagcagataccgctctccgtgtaagtgccggctcctgcgccgcccggggaggggaccttgccgcctgcgacccactgtgcccaagtttgggcgcctgcaggtgcggctgggcaggacccgccgcgggcgtcggcctcgccgctcgcacctgcctttcgggacccgcgtcgggcggcgaggccggggtgggatgctctggcccctgcccgcaggttgccgagtgagatctggagaggctcacctcaagtgacggcaccaactttggagcctggttaccgaatccaacttccatgggccgctgaatttcccccctctttgctctactgccgccccacttctttttttgggggggggatgggtggatttcttctgactgctatttgccaggtgatgcccagtttggggggtcgagtcctcgggcagtggttcgaatgaaactcagtggtctttttagagagcctgggagactttgcgcattcttaactccgcgacccccctcgggccccctcccgcgctgcgctttgcagttttggtgctggcagtttctaccaagccgctttttctatcttttcttcttttaaaacatgttacatcgcactgctccttcagccatagtcccatgtgtgcgtgtgcgtgtgcgtgcgtgttgactgtgacacgggtgttacatatcttcctgtgccccttctccctgtagggtgaagctctgggcctcggcttttggtggggagataaaatccattgctgctaagtactccggttcccagcttctgcaaaaggtaaggtttctgtggtggcaggaagcgatgatttttccggcacagaaaatggaggcagatttagttttccaaacaaacgtgagccccgagcagcatcagttatcggaggactctctgatccccgggtttcttggcattgtactatgcagtgacttcttcctaccaaccggttatttttagatgacacttgattctaaccacaaagaaaagcaggatactcactcgcactgtcctggctggggctcggaaactgagtgtttttgcatggctctcgtctccgtgtcggtattgctgtttcagtgccagagcagatgctcctcgggccaaaaaatgctaacttcatccaaggggcagactcagtgcctattttgtgatgcctttcaccttgcgttggaggcgtggggttcagtgtatcagagaaagacgctgcactattgtttgtcatccctgcagttgtacaatcccattattccccaatcatctagacccagggctaggatgcattacatcattgcagataag

SEQ ID NO: 6979 - DNA, 1415 bp, Artificial sequence
  DNA replication origin
ctaagtggtagaggtagtatttgaaaggtggtctaccaagctccaaggccctccttctttcattgcttcttcctttcttccttctttcttctccttcctttccttctgctctcatttctctctttctctccctctctcttcctttcttccttccttcctttatctctttcttctctctttctttccttccttccttctttcttttttttttttttttttgagacggagtctcgctctgtcgcccaggtcggactgcggactgcagtggcgcaatctcggctcactgcaagctccgcttcccgggttcacgccattctcctgcctcagcctcccgagtagctgggactacaggcgcccgccaccgcgcccggctaattttttgtatttttagtagagacggggtttcaccttgttagccaggatggtctcgatctcctgacctcatgatccacccgcctcggcctcccaaagtgctgggattacaggcgtgagccaccgcgcccggccccttccttctttctttctttctttctttcattctttcttcccctccctcccttcctttgttcctctcttcctcccttccttccctttcctccttcctctctccccccttccttttttctttttctctccctccctccctgatctttttttctttctttcccatttccctctttccctccttccttcttttcaacaaatatacactgaattcttaccaagggccaggcataggtatagtccctaggaatacaacagtgaataagatagatacagtccctcggtagatcttatatggaggtcatcaaaaaacctaaacaagtaaagaggaagattacacagtgcaacaaatgctaagacaggaataaacaagatgatattatagaaagacacttggggtagagataataacacctgccagaagaggtgccatcagagctgagatctgacgcatgggtagggaatcagtgaggcagggaagtggggtagtcagagaattgacgtgaagttgtcggggcagagcattaaccaaccagaggaaagagccccacaaaggctttaaggcaagtgaaatttgaagcacaggctgccaagtaccaggcttatactttcagatcattctgggtgccatgtaaaggaaggattggattggagggctggagtgaacctggagagaccagatgagcagcagtggtggcatggtgtggggtggcagaagtggaaggatgtgagacaacctgcactgccaaatcttagctcatcagagaccccttggcataggttttagagtttgagccatttaacagaactttctttgctctatagtagagtgcggatctttatccacattgcttaatgaagaagaatggaagattatacatgcaagcatccacagggaaaaaaatgaacac

SEQ ID NO: 6980 - DNA, 976 bp, Artificial sequence
  DNA replication origin
gaaaataggggcgtgttaagattgagacacctctaacctctagtacatgcatgtgggtaagtaaagtaacagcaggatctatgagtctggagcttagtggaggagtttggctgcagtggtgaacttgggagtcatcagcacataggtgacttttcaagctggaggactgaaagagatgacttagggagggagggcagtggagagagaaggggtctcaggaacaagtgctagggcatgcaaagatggaagaaggtggggagaggaggaatcaccagctaggaggaagaaggagcacccatgagggaataggaaaccgagggagccaggggtccaggagagctaagagaatgggtttcaagaactcatggttgggtgaatcagtaagatgagaatgggagggcaaacatctgactcggcctcaagaaggctcctgctggcctcaagaagagccctcttatggtggggaaggaatccaccctggcatctgtttgaggaaagaatgtcactagaaagcataatccaggagcactggagagtaactgaaggagttttactgtgcaggacaggaggaaaagtgagtgatgttcagagaggtgactcgagagagaaggtcttttaaaataaaagtattaaggattgcctgtgtgcttgggaatgatcccgtagaggggaaaggactactgatgcaagagagggaggtatcaactctataaagtcgggagcaaagtccttgaggaggtgagagaggggcaggagggggcacatgcagaaggactgcttttgacagcacagggacactgcatgagggcatcagaggaggggactgagagagggagtacagatgaggcaggtcagtaggttttgtgggaagatggaggcacccctttgtgatgctggtgaagctacaagtgcatgcactgaagagatggggtcatgcgctgaagaggtggagagggaaggtatgaggtaggtgttt

SEQ ID NO: 6981 - DNA, 1138 bp, Artificial sequence
  DNA replication origin
agagtcttctaaggctctgtccagtcctctacagtttactctgtgattaacttccttctccctcaccccaaaatacagaagagtgaaatctctgaccagaaagttcctggcacctaccttgggttctgtgaaaaaataatggccctggttttcaatgctgccaaagttaagaaaagttttcaccccttcattttaaagcagccataaagtgccatgtgtttaaccgcaggaaaaaaagggtctttttaactattgagaagtagcttttcatatccccaccaggggaaggaaagagcgggaaccaggagactcgtgaggactgcaaagatggtcctccctgggtacttctgctgctctcttctctccagagctactttgtgattggcctgatggtcagacctataaaatcccacactgctaaaaatgctgtccttttcctagaaaagcccttttttaaaaaaaccctccatccatcaggcctgctacctaatgacataaagagaggcagggagaaagaaaggagggaaagagcctcaaagctggggtgagggctttcccatctgggcacctacgaagacagaaaaatccctgtcccaaactgaaagccaaccacagacatcgtccaggcaggagggagaaagttattcccatttttatttctgtgctccagtagccaaaggtaccagggactaactaagaaggcaaggaaaggtctttttcaggcaactgctggttcaccttggctgggggcgaaagggaggatgatccgcccaggaggcccttctgggatgtgcaggggcaactatggagacagatggaggaaagagaggtagacaaagggggagaagagagagaccgggaaggaggaaaggaagggaagagggagaaagaaagtgagacgggaacaggatgaggaggaaagagacaggaaagacagagaaagatagggagagacagaaagagaagcagagagatagagacaggaccatatagcaaaggagtggcagaggagaggacggagctacagggagagacccgaggaggctggagggcaaggtgagaagacagagatgcggggcgggggcgagacgcggcactcaccctgcggccggcctcgttgttgtgcaggttcatgagg

SEQ ID NO: 6982 - DNA, 2422 bp, Artificial sequence
  DNA replication origin
gatggggccttctgttttttacttaattaaaaaagagacaggagagaagagaaaacaatagatttttatgaaagaggaacatggatccaattccaatagttggaaaatttctttgctttcacttttccacttaagagtgtatttgaagagaatgagctaagggaaaatttaaaatacctttgatgccaaaaggtgtgtgtgtgtgtgcccaccccaaagccctcagcacaccaaggacattgagaataattcttctttgtgagaatttgaccctgtgatggggccagtgtctgagaaattcaggccgccacctctgaccccctcctcaactcatttttctaagatgccagttgccttggaggcaccatgcacaattacttcatgaagggcccactcttcattttggagagtttctcatttttcatcatgctaccctttccttccagcttttgtccccatctgtctcttctttgtttccatgctgtgaaaagatatgtaaggaaggcaccatttgtaaggggtgtgaggatcggagtagatgtgggtttcacaggaagggaaacctaactgaatcagcagtattccaaccaggatgactgtatcctcaggcaattagccaaagaatacttttcaaactgacgtttaccctgcagtgaccaattagcttagagggatctcccaggtttgtattctgcggcataaaaggaaatgctcaagatagacttatgaaaaaagaagcattgtttgtgttttgtataaagccttcttatgctctgtatactcaaaggacagtgtcttattttcctctatccccagaggatcatttcatctcctcttcatctcctcttcctctagctactttgttctacaaatcccccatccagggccacagcattttctgtactatcaaattactccctagaagctgtatattgtcctcattcctttccattcccctgatgtgctctgcctctctaatcccgctagataggtgtaacgcatcacaggaactttctagatcctcctgccaaccaccagcacacaccttcaagtcattcattttgaaaatatgggagggggaggatatatggtaaatcagaaccatcaccattcacaaatggctgtgactggcatggagcagaagaccaagaatgaggtggcctgctggatgcttaaactggcatcgctgtcctcctgcagaatgacccttctcgttcagactgagtcctgttgtcagcttttcttgtgctcctcacttccccctcagaaaaaagattgttagcaagctctcaaagtaagtataggataaactgattgcggtacatgaatttcagcaccagaagaggcccctttccttgcatgtatttcagtacccttattttgcaattgaggaaagtgagcctgccccccaatcccacccctaccccacgcttcagctggctggatgataaccctttctctctcagattacagtacttttattaactagctcttgttacatgcagaaatgtctccatgtacaagcgaagtttagggtactctatgatagcctccagttttctccttacaaatagggtccctgtaactattatatggggagatattctttactagttttgggaagaagaaaacttctccctccctcttttccccataggttgtgcttttttccttcttgctgtcattctaacactttgtggcaaaggcagtgggggagtgggcagggggtgtctgcagaagtggcattgaagaacaacaggctgttttaaaagcagacactcattcttgaatgagaagtatcaggccaatgagcctgggatttaagaatagcaagcttcatttataactctctatgagctgatttagaattgtcctctgggaaagtaaagagacttgtcctgagaaatactttctgctgcatgaaggaagagggaggagaggttacaactgccagaggaggaggggacacaaggccaaaatgagtgtggcagaaactagtgtggccgctggcagtgtctcccttagattcaaggcctagcaaattctgtaatcctgccttatatgtaactcaaatgaaaataatacttaatattaaaataagtgtaaggaagtctacccatattctgagtgttccttcaatgacttctttcatgtgcatttttgcaaatagcaagttttgactattttcaaaagagttgcagagaaaatcaatccagcactgcttagaatctggcctgcagctctgaaatggctgagcagagatactggggatctgctactcctttgttaattgttgcttctgtgtgttttgggggatcttgcttggcttcccctcaagctgggcccagggcctggtgcgtgttaaggatggggcagcccgagcttttaccttattgatcccctaccccctacccccccatct

SEQ ID NO: 6983 - DNA, 1104 bp, Artificial sequence
  DNA replication origin
aagtgaggcgaaaagcgggaaagcaacacttgttctcgatcatagagagttgggaggcagctgaggccagacccgaggcctcctagggcgacactctccttcccaagcccagaagaagaggtaccaaccctgtgtccagctggccgagtcccatttgctgggctggacccgtggccccttccgtattgcagcggccggcggcgcagcgaaactggtcctctgggggcctccgagggcccctgctgggagagtggggtctggtggtcgggagggatgaagggagcaggggtgggagggagaggggagcagctgcccgcccgcccgccccaaggaaccgaggctcgcaggagtcctacctcaaggcggccaacagggggcagccggcaccgcaccgcggggaagaaaaggccgcggggatggctccgagttctgcgcgcatagtgctaaccccttgagcaccggagcgcacgggggaggggaggagaagacaggggactcttgggccgggcctcctggggagggtcttccgttgagagggtcggggggtggaggagacgaaggctactacgtcctggacccgagaacaactcccctacacacacaaacacacacgcacacacacgcagccaaggatccacacactcggacacacacacatttgtcggcccgcggttcgctgcgcactctccgcattgccccctcgaaactcccctggcagagtctgtctagaaactaaatctggctggttcggcagtgaatgtgcgaaggtggctggggggagggcaggggctgaggaggtgcgacctcaccgcaaggcccaagttacttccaaacagcgaattacccatttaaagagagaagagagaaaagagaggcgagagaggagaaggggcctcgataccagacagggattagaaagtcaaacagggccgtggggtctccagacttgaagttttttgttgttgttttttttaactttttggggggaagaggggttatttgcttccaggaaacatcttaatttcaattctaaccttattttctaagaaacttaaaatgggaaagaccagaaaaatggaaataggaatcgaagcttggaggaca

SEQ ID NO: 6984 - DNA, 942 bp, Artificial sequence
  DNA replication origin
cctgccagcgacgctggagttccagcttcttcaggcggttggggaaatggagggataggaagaggcgaagggaactcagttaacttccaacagggggtggggggaagtaaagaaaaaaagtggcagcgcactgaacacctaccttcatggcgagggggagggggcgcggggaggaagtcgccacccgagcgagcgcagccgaggaatccgagcggagcgaccgggttaagcctggggggacggtcaggagcagggctgcggagtcctccggcgcgcgtccggcgggcgcagtgaaccggagctgaagcgggcactggcgcccgggcctggactcccgagttggggcagagctgggatgcgcccaggaatggagggggcgcggacgcgcgcgagccggcagcaagggcagggcctggtcggggcgcaactagggagccgccggtccggcgagggcgcgcaggcaactgttccacggagaggcgctccgtttccaacgtccatcagcgacggcggtaattagggctttccaaccccaaatgtgggcgtgattgtgcaaaagaccttacgacaaataataataaaaagaaattcttcacaagagggtgaaaaaaatgtaccactactcaactgtggcccggggcgggggaaggggggcgatctgtgcgcccaggtgcccccagttcattcacaccacagattctgcaaactcttggcggctcacgcctcctgatctccagctcctcctctctgggtctgtagccgaaacgtctgcttccagacgctgatcctgcagccgcgagttagtgtggacgtctctgtacacacacagacacacaccccaacacacacacccccgctgcagctttggggccacagaacaatcaggcgcgcatggctttttctccgggagatgccgctgaaaacgcacaagtcgccatctga

SEQ ID NO: 6985 - DNA, 1541 bp, Artificial sequence
  DNA replication origin
ctgcagaacaggaaatagcactgtttgggctgtgtctatacaagcaaaggcaattggagagaagcaggtgattatccagataactcagaaaatagccattaaaaaataaaggtttgtggttgggtagccagtatttctagactggctgtatgtgtggaggaaatgcccaggttaacggcccttttcttcatagaataggatcctctacacgaactgccttggactctgggacactgggatgctagtttctccattcttcgggagcgccctttggcagcccctttcatagtcagctcatatcctgccacttcttggagctgctgcacgtaaggtgggtcccggagatccctgcccgcggggcggggctggagtgtctgcctaggaggcacatgctctcccgcagccagggaatctcagtctgcggccactgggcagaacggcaagggagagggggaagggcggagggacgcagcctgggggcgatttgccgggcggagacgctctttttcagacaccctcctcaggtgggcagatctcaggttagattcgaagactgtaaaatgcccacaggtcgggaagtggtcaaggtttacagaggagaaggttagaggaatggagactcaggaggtaaaggggagatgtcccaaggggagctttgagaaccttggattccctctccttaaggccgcacacgccctgggggaaagaaagcaagttggtgggaggcgggaggtgctaagcaggagcatctgtctctggcacttggtgggaagttcacactgccatctttgcgcgccaggaaggaggccagggctggggaagggtccagtcggctaggaaaattaaggaatgggaaggggctgtggagggtggaacggcatcgctggagcctgggcctgcgccctctggggtgtgggggtggaggtgggggaggactggaggaacaaaacaaaacagccaccacaccaaaacacctaggccacggatttttcgccttaaggtcaagtgcatgccaatggacggagaaaattgaatagtgtgtgtgtgtgtgtgtgtgtgtgtgtgtgcgcgcgtgtgtgtgtcttcacctttgacagctggagaatgcagacggcggaaaataactattacgctccagtgtgaggcactgtttgtggggtggggccctcggcgtgctggaggtagcggacacaaatccaccaaccctgcccctccggagtccccaaaaccacgggcatctggaagcgtctagaaattccggtgcccggaacccggttttgccaaacttcgcaatctcctcacctgagggcacccgccaagatctccgtggcaggaccacgcatcgcgcctcatgctctgggccggagccagatgagcaatcatgcatcccactacccaagtccctactactctggggactttgcaggaggtgagcgcctaaccctatccatcagccccagtgcttaagtatcctcccccagaggtaagaatgaggaggtcccccatgaggttccatgtcaaggcagcagtctccgtggagc

SEQ ID NO: 6986 - DNA, 1305 bp, Artificial sequence
  DNA replication origin
ggctggccgcctgggtgggttcagaggggagcatatttttttttaaaaaacccgtgtcagggaaaatgaagccgatttatcggggagggctaggggatggtgtatgaaaaggaatacgatgtgaaattgaactgaacggcatcccttctctcctcctccccatctcctaattatacaaaaaaagggatacttacgaaggtgtacctaattaaaaaaaataccgtacgagcctttgaaagatcgtcttaggacagtgaagattaagagctgctttggttcggggtaataaaatagcgctcgtaaactctccgttcggccctgccttatttattttgtacttaagggtctctgttctccttgccagagagggagggtccgctcttttaggagtggatcgattttaggcggctacctgcctttgctgtatgaaaggcaatttactccccgagcggtgaattgtcggttccctctgtgattgacagccacacctgccacttacgtgggtagaatggggaccggtggaacccaaagaaccaatcaatgctcgggagaggagggcagctcccacttgtcatggttagtttcctggttggctctttaaatcagtgattttacttaaccattggtttccacctggtatggggatacagctgtgagaggcagacaagcgggaagaaaactctttgaaaatggacttttagaagcaagtatatttgacctgtgtttccttgtcctccccatcccttacccaccacccccctgattattagttgtagtagttgcggatgccgaggccactggcttaaaaatgaaaatgaatctgtgtaaagaaggaattgggggagggggtgttagaattgcccacctatttctccagaattgcagtctttataagagacaacatgtaccgttgagctatccgggaaaagggtgtggcactttgtctcctatggtcactcttgtccttgtaaagtcacattgtttctcagtatacagtacttggggcttggctctactggatggatttataaggtatttttggagccggcaaacgttctttatggggagtcacatgaatagaagggattcttttagttctgacagttaactcaacttctggaagtgagggctgccttgttctcttttgcagaatgtcagttcggtggtggtggggtcaagccattttctttccggggagtagtagagtttgcctttttctcatgtaagccatcttgtctgtttgcttctgtgctttaataaaatacttttacagttttggcagggaggggtgtggaaggtgatggt

SEQ ID NO: 6987 - DNA, 1136 bp, Artificial sequence
  DNA replication origin
aggagccggcgccggagccggagaccgagcgagcaggagcgggaggcggaggaagaggaggagaagcggggcggggaacagggagggaggaaagaagggaaggaggaggacactgctcggagggccagggccaggcgcggggccgggcggggccggcggccgagggggcggcacccgccgcagtcccgagacgcgcgctcgcgcggcgctgccaggcgctgcgctcggcggggcccccacccggccggccggcacgctcgcccgctcgcagaggccctgactcacattcccagcattcccgaggagccgctaggggggacggggctggggcccgggcgcctccgctgggggcagcagaaagcgcccggcatgggcgggggtcttcgcagcgcctcctcccggcaggccgcggcgcgaagcacctgtccccaatcttccatccccgacgccccttcccgggtacccccctccaaaagctgccaggcacactgggaacttgtcaggtggctttggtgacaggggcagggatggcacttatcttttaagttaagcattggagtaaggggtcgtggttaccataccctggcaccgtccatcagctttaatgttccttaggaggttgaaagaatttcataagatcttcactttattgttcccccaaagaaaggacagaatgaaagataaagacaggaacaagagaaaagatcgcatccgtcatattcactgggtgcctcttctgtgccctgaaatgtgcttgcattgtcccaatttaaggtagaaagatgatgtctgagttgatacgcgcgcacacaggcagatacacacacacacctcaaggtaatgagcaagaggatttggacaagtttttcattggaaaaagcttccactcaacaagtctggagccccagctgctgccattttatattagggagggtactgggatagccatgggcatctttaaacttggtctctttcactgagtagtcaatttgcagggatagagcagtcatttccttcctgtcctgatgagtctgcttccagcaatttcagtggccagatctaaatttctcctgctgggaagctcagacaaataaagcaaatccagccatgggatgtttgggtgcgcagaggcatag

SEQ ID NO: 6988 - DNA, 1009 bp, Artificial sequence
  DNA replication origin
cctccgcccggcagccgccccgtctgagaagtgaggagcccctccgcccggcagccaccccgtctgggaagtgaggagcgtctccgcccggcagccgccccgcccgggaggtggggggccgcccccgcccggccagccgccccgtccgggagggaggtggggggcagcccccgcccggccagccgccccgtccgggagggaggtggggggcagcccccgcccggccagccgccccgtccgggagggaggtggggggcagccccccgcccggccagccgccccgtccgggagggaggtggggggcagcccccgcccggccagccgccccgtccgggagggaggtggggggcagcccccgcccagccgccgccccatccgggaggtggggggcgcctctgcccggccgccccttctgggaagtgaggagcccctcttcctggccgccaccccgtctgggaggtgtacccaacagctcattgagaacgggccatgatgacgatggcggttttgtggaatagaaaagggggaaatgtggggaaaagatagagatatcagattgttgctgtgtctgtgtagaaagaagtagacataggagactccattttgttctgtactaagaaagattcttctgccttgggatgctgttgatctatgaccttgcccccaaccctgtgctctctgaaacatgtgctgtgtccactcagggttaaatggattaagggcggtgcaagacgtgctttgttaaacagatgcttgaaggcagcatgctccctaagagtcatcaccactccctaatctcaagtacccagggacacaaacactgcggaaggccgcagggtcctctgcctaggagaaccagagacctttgttcacttgtttatctgctgaccttccctccactattgtcctatgaccctgccaaatccccctctgggagaaacacccaagaatgatcaataaaacaaacaaacaaacaaaaacctcttaactatgccatacgaggggctct

SEQ ID NO: 6989 - DNA, 1310 bp, Artificial sequence
  DNA replication origin
ctcaatgagctgttgggtacacctcccagacggggtggcggccaggaagaggggctcctcacttcccagaaggggcggccgggcagaggcgccccccacctcccggatggggcggcggctgggcgggggctgccccccacctccctcccggacggggcggctggccgggcgggggctgccccccacctccctcccggacggggcggctggccgggcggggggctgccccccacctccctcccggacggggcggctggccgggcgggggctgccccccacctccctcccggacggggcggctggccgggcgggggctgccccccacctccctcccggacggggcggctggccgggcgggggcggccccccacctcccgggcggggcggctgccgggcggagacgctcctcacttcccagacggggtggctgccgggcggaggggctcctcacttctcagacggggcggctgccgggcggaggggctcctcacttctcagacggggtggctgccgggcggaggggttcttcacttctcagacggggcggctgccgggtagaggggctcctcacttctcagacggggcggctgccgggtggaggggctcctcacttctcagacggggcggccaggcggagacgctcctcacctcccagacggggtcgcggccaggcagaggtgctcctcacatcccagacggggcggcagggcagaggcgctccccacatctcagatgatgggcagccgggcagagacgctcctcacttcccagatgggatggcggccgggaagaggcgctcctgacttcccagactgggcggccgggcagaggggctcctcacatcccagacgatgggcagccaggcagagacgctcctcacttcccaggcagggtggcggccgggcagaggctgcaatctcggcactttgggaggccaaggcaggtggctgggaagtggaggttgtagctagccgagatcactccactgcactccagcctgggcaacattgagcactgagtgaacgagactccgtctgcaatcccagcacctcgggaggccgaggctggcagatcactcacggttaggagctgcagaccagcccggccagcatagcgaaaccccgtctccaccaaaaaaatatgaaaaccagtcaggcgtggcggcacacgcctgcagtcgcaggcactcggcaggctgaggcgggagaatcaggcagggaggttgcagtgagccgagatggcagcagtacagtccagcttcggctcggcatcagagggagacagtggaaagagagggagagggagaccat

SEQ ID NO: 6990 - DNA, 1160 bp, Artificial sequence
  DNA replication origin
cgacgcgcgcacgttgagtggcgggggaaggcagaagaactgcccgagggaggagcggctccgaggaccgggcagcgcatttggggtgcccgctacagggccccccaagaggctgccaggtcgggagcgcagcctgaggccacggggggaagggggtgggtgggctgagagcagctcggcggcgagactggcccgccgccccttccccccacacccgtcgaccttgtgggcagaagcttcccagagctccttaggccggcgcgatggcgactgctgtggagacggaggcctgtcagccgacggatgcgagttgggaaagtggcggcggcggagacgacgagatgaagcaggcgcttccggagcttgagtcctcccaacaaaatggcggcggcggcggcctcaacatcgctgagcccagcggcggcgctgggcgtgaggagaacgcgggggccgaggccgcccagagcctcagccacgagcagcctcaggactcctctgaggcgggcgcggccgccctgcccagaggccccgaagagcccgaaaggcctgttaggaggagttttcagatccccaggaagagcagagaaaagaaaggtggtgcctccccttcttctcaaccccctctctctctcccctccatcttttcattagaatctttctatctcctcttcccacacccatccgagatacgtaaacacgcatgcagcgccggccgcctctcccctcaccgccacggccgcccagctgccgcgtttggtgcgagagaaagcggtggaaccacgctcccctgctgcccctccccgcggaagttggaagtagctcaggtttgaagcttgtccgtaaggctgcagctcccagagaggaaagatggtgctcggcgcccctccctcccagcccctgaaagcagagaagccgttgtgtcctcctaaggatgcttctgagaagtctcgctatggaaatagcccgtggccatggattctggggctttctccaaggccattgccaatgttctgaggaccatgagtgcttctccccgtggaaattcttcagttctgtgtgtctacttgaaatgtgcttgatgtcagcgtcctcccttatttagaaatctctattagtagatgtgatccatgcacactgctgttttccatcacacttcattt

SEQ ID NO: 6991 - DNA, 889 bp, Artificial sequence
  DNA replication origin
ccttgggttgctcattcacatttctgtgtgttggtcagctacgataaacacttctagaaccaattcaggccaccacagggagagaacggtaacccaaggtggtcagaagcatgggctctgcagtctccaagacctgggttcaagcccaagtccatcaaattactttggacaacttatacaactttcccagtcttcagcttccaacttgaaaatggatatgataagacttagacctcctagggttgctttgagaagtaaataaataattcctataaagcactgcgccaactacctggttcacaccaagtacataataaatgttggctttaaacatttgctgagtgtctaccatgtgctaggcattattttaggcatagggatacagcagaggaaaaaatatagttcctcttctctcagagcttacattagaaggtgataaattctatggagaaggacaaagcagggtaggggatcgggggtggtgggagtagctgatatttagtatggagtgcccagggcaggcttctccctgcaagagccggaagcctgtcttaggtggacaggatagctcatgcaaagttcctggggcacggctgaggggcagcaaaaccaatatggctggagtggggtaagcagtgagcaagagcggagagtcacagaaggagctgaaaccagatggcaagggtctcacagattactgcaaggtctctggattttagtccaagggagaggggaggccactggaggattccgagcagaaaacaaacctgacctaagttttaaaaggattgctgtcaatgttgtatggagacagaagctccaggtggcgagacgggggcagggaggaggtgaggaagttcctacagcagcccagatgagggatggcagg

SEQ ID NO: 6992 - DNA, 990 bp, Artificial sequence
  DNA replication origin
ctagtccctcctttgccctggtccccgagctggacccccactcccacctccgagttaccctgctaggtctcggcgtccccggcgggccctgagcgctccctggtctggggtatgcccagcgcacgggggcgcactgggcgcagcgcaggtgggcagtgccaccgccagcctcgactagccgtcgctcctgctggggaccctgactctgttccccgggtagccccttgagcgaaaattcccggagccacttccggggagggaggtgccacctgtcctgggacgcgcccctttcgctcaactttcttctccagccccgcggggcacccgcaggtcagcgtcgcgtcgggcgctgctggtggcggctcacagggccgcgggtcacttcgcggcgggggagccgggctcagggcgctccgggcggcgggcgccgtcccagcctgcctgaggcccttgtcccggcggctgcatcttgtaaaccgagcagccagaaaatcccgagataggacaccagggtggaggacgccaaggggttaaggtcagcgtgggtgcctcgcagccagagacgggtgagcgttttctgaggctggaagctgattgagccgagtggaaacgggttcccttgggctttgcggtggtggagagctgctcttgcactatcagcagccccatcacgggcttgaatgttgcggaaacagagcgccttgttcttagaggactcggcttgctggatttattgcctggcccaggcttgcttcccgcactgggcgaggacgcgagaactgccagacggtagttgccctgaatgtaccggtagaaacttatttttaagcgttccatgcactacccaggtataaccactttcttccctggggtgtggagaaggggagctttgctaggtctttgtcttagctgtgtagtcctaggcaagttacttcgcttacctatgcctcagttttctcatctgtaaagtggggatgataacagtacaaa

SEQ ID NO: 6993 - DNA, 1450 bp, Artificial sequence
  DNA replication origin
cagccagtgtgatgtcttcaaactgtagctcacatcccatcatgtctctgtctgaacctttcggtggacaaggtctaatgtctcactttgtccatcaaggcccctccagcctctttctccccttacctcccccgtccatggacttccagcagtgtgacctgtgctctgcctgggccagtacttcttccaggtgtctgtcaccacatcctgatcccttgctgcctggtgaggggtcagtcgactatctccctcatcagctcataagctccataaggtcagggatagtgtctatcttggtatccagtcactactgtccccagagcctagcacagtgtgtggcatgtagtagatgctcaaataattgttaaattgaatctcatgcaaagaaaacttttctctttgacaagcttgcctgggtagaacaccaggtgttggctggcggatctgaagggactgctgggctcagatgagggagcaggctcttcagagagaggagaagccctttgcttagtaaatgtaattacttgataaacacgcctggttgtcgtagggatcttctgctttagggaggaaggagaatgacaaaagggttcttggggaaaaggttgaggactaggggtctggacacaggagttgtccttggaaacggagtactggagagagtgtgttccctgaataggaaactggtgggtcataacgcattgagtctggggtcaaggaacccccagaagctgtagtgggatgaagttgcagctgttggaacagaagttggtttgctcaagatgcccagtttctggcccaaaaggtgggctgcaggccaggaagaggccacccagcactgcaaggctgagcacttgcaacagaaggcagaggttgctgtgaagtaagtctggaagatctgcatcccagctgctgctgtcactacaggtggtctcccagggagctctcaaccctcacacccttcctgcacctgcgcaagagtcttagtactttgggctgatgctctttcctctgtaaacaggggccagactgtgatcctctggctctgggggctggcttcaccttgctaagcttcgatttcttcatttgagaagcgggcccgcacaggccctccaccttaaaggctgtcgttaatgttaacttcgatcaagcacctaaaatgcaccgctggcacatggggggaaccgatgaattttttatttttagcatcagagtttacactttcttgagcccagtaactacagtctggggcattctttatttctgattttaagaggtggtgaagaccgtaggcgttcatctgttgaatgaatgaatgcctgcagaaactcgctttatttagagtcccatatttatttccgtatgcacgacccaggcccctcactttcaggctctgcgtccacctacaggccggcgattcctgagagcttgctgggcgccggggttcacg

SEQ ID NO: 6994 - DNA, 913 bp, Artificial sequence
  DNA replication origin
caacggctcgcagctggctgtggccgctggcgggtccggccgcgcgcggggcgccgacacctgtggctggagggtaaggcgagggcggcgggtttcttgccgtcgccaactcgcgggggacgcagcgcgcacaggtgctcgcggggaggcgagcccgcgccaacctgtctgctcttcgcggggtccgcggccggcctgggtctcactcctcccgcgcatcctcctggtttccctccccggacgcgtgtcctccggccctggccgagatgaaagcggctgcccgaccccggctttgtgttgctaatgaggtgcggccgccggccggggtcccattcagagggcgggcgtgaggggcggcggggctgggccgggcgccccaccctttgttcttggcccgggacctccttcgtcccagggctgcgtgtcccgggctgggatcccccgagccacccggaccgggttgcgctttggagagggaagggggtattctcccggactttcagtccacaaccctgctaaggcccgggcggccggagaggggacttggagcaccggggagggatgcgccccgctcttctagtagctttgttcctcctcgcctggggccgtcaccccactcctacccctcctctgactccgggacctcctgagaaacttcgcctcccggttcagcccttcgtcttgtgaaggtctcgcggctgatatcctccttccctgcttcgagttgcggatatttttccgccaaagggccgcgtgggtgtcatctgggtgaggtgcctgagacgagactggagaggtgcccagactttcgccgtgtgcattgagccgtcttcgtggaaccgagcgctcctttgacactgtctgggcgatgggcgcgggtgattgccattcccctctcagcttccctgctccc

SEQ ID NO: 6995 - DNA, 831 bp, Artificial sequence
  DNA replication origin
acgggcggtgacctagggcggcggcggcccccacctgggccggggcgggcacctgcgggagccgcggaggcgccagacctggggtcggccagctgggctctccctcgtcgcccaccagctcccgcgcctcacctgcgggctgtcctccagcgtctcctcgatgggcagcttgtcgatccccggcatcgtggcggagggagggcggtggcaggagacgcagctgccgcccacagctccccgcgccggcccgcccgccgcagctgaccccggcccgccctctccggcaagggctgcagccgtccccgcccgcacagccttctccaggcgccgagcggccgtgcgggaaatcccgccccctcggcctccctgccccgcctcccggcgcgtccattggctcccggggacgcccatccgcgctgcggcggtggtcgggaggttcccgtgcggcgctaggctctcccgcgagcgcgggcgtcggaagcggcggaggtggcagtgtctgccctgggatggccttccctgcacgcgcgcgtttgtatctaaatcgcaggggaccgtctcttcctcagcttgccggcgcgaggagccagagcctcgagttagggccacacgggggaatttggggcgggttgacttttcccgcaacatattttgtcagagaccttggagaaagtcctactgctggcgccttttagtttcctcagatgataacattcccaactccgctcgaagcgtccagtcttaatcccctccagcagaatggtgctgactaactcagatgtctgagatccgcagctgtgtcaataatagggctttctggcaaacttgtga

SEQ ID NO: 6996 - DNA, 1123 bp, Artificial sequence
  DNA replication origin
attatcatacaccttgaaggcaaggttaattaagtcctgttgtggggtttgagggccggaatttaatttttggagctttatttaaagtcagaagcggattgggtaataaaatgtatattgagaataagacggccttttgaccttttagggtctagggctgtaaagcgtctcagggttgccgccaaatgagtcatgaactggctgggtttttcatatttgatgaaaaagagcctaaacactaactgatttgggagaagtgggataaagaaaaaggagcattaaccttgactatgtctttagctccagccacctttttaagagtaaattgctgggcaggagggggagggctagtcgcggaatgaaactgtaagctggaccgggtgtgaggaggggaggtgataaaaagattatagggtggaggagcggaggctgaggaagaattgggacctagctcggcctggcgaggagcagcctggggaggaggggagaggtcagatgggtctgtagaaaaggaagattagaaagactcagcgacgcttggggttgggattgaggggagaggtgagagggaaagaaggagggtttgggatgagtcgcatcgggaacagagactagggagggaacaatgtgtaaaagaatgcctggacgtcaggcacctcagactgtttgcctattttacaataagaattatttagatcttgtaggatggaaaaatcgaaagtgccgttttctggctatttggaaccactgtcgagtttgtattggggtcaagcggcattgcagaagaaaatgaggcatttaggtttaggtcaggtgtgagttgaagaggttttaagttcttcagaacacaggctaagggagaaaaaggaggaatggagggtggaaggctgcccatggtgaaggaggcaagcccagagaaaagagagtagagacacgaagagaaggggtggggggtgcttgccccccaggaaagtggagaaggggtagagacatggagagaaggggtcagagagttcttgccctccagaaaagcagaaaaggtgtagagacacggagaaaaggggtcggggggttctggccctccagaaaagcggtacttgctgctaagggtgaaggaccaagg

SEQ ID NO: 6997 - DNA, 576 bp, Artificial sequence
  DNA replication origin
aggagcgcctctgcccggccaccccgtctgggaagtgaggagcgcctctgcccggccgccccatcttgggggtgaggagcgcctctgcccggccacccattgtctgggatgtgaggagcgcctctgcccagccaccccgtctgggaagtgaggagcacctctgcctggccgctgtgcaatcttccaagtgtgaagtgacagcctttctgcaggtgtacccaacagctccgaagagacaacgaccattgagaatgggccatggtgacgatggcggttttgtcgaaaagaaaagggggaaatgtagggaaaagaaagagagatcagattgttactgtgtctgtgtagaaagaagtagacataggagactccattttgttctgtactaagaaaaattcttctgccttgggctgctgttaatctataaccttacccccaaccccgtgctctctgaaacatgtgctgtgtcaactcagggttaaatggattaagggcggtgcaagatgtgctttgttaaacagatgcttgaaggcagcatgctcgttaagagtcatcaccactcccttatctcaagtaccc

SEQ ID NO: 6998 - DNA, 965 bp, Artificial sequence
  DNA replication origin
ggaagtgaggagcccctcagcccggccagccaccccgtccgggagggagatgggggggtcagccccccccacctggccagccgccccgtccgggagggaggtagggggtcagccccccacctggccagccgccccgtccgggagggaggtgggggggtcagccccccgcccggccagccgccctgtccgggagggaggtgggggggggtcagccctccgcccggccagccgccccgtctgggaggtgaggggcgcctctgcccggccgcccctactgggaagtgaggagcccctctgcccggccagccgccccgtctgggagggaggtgggggggtcggccccccgcccggccagccgccccgtccgggagggaggtggggggggtcggcccccctgcccggccagccgccccgtccgggaggtgaggggcgcctctgctcggccgcccctactgggaagtgaggagcccctctgcccggccaccgccccgtctgggaggtgtgcccaacagctcattgagaacgggccaggatgacaagggcggctttgcggaatagaaaggcgggaaaggtggggaaaagattgagaaatcggatggttgccgtgtctgggtagaaagaaatagacatgggagacttttcattttgttctgcactaagaaaaattcctctgccttgggatcctgttgatctgtgaccttacccccaaccctgtgctctctgaaacatgtgctgtgtccactcagggttaaatggattaagggcggtgcaagatgtgctttgttaaacagatgcttgaaggcagcatgctcgttaagagtcatcaccaatccctaatctcaagtaatcagggacacaaacactgcggaaggccgcagggtcctctgcctaggaaaaccagagacctttgttcacttgtttatctgctgaccttccctccactattgtcccatgaccctgccaaa

SEQ ID NO: 6999 - DNA, 1339 bp, Artificial sequence
  DNA replication origin
cagccaccgccagtcctcgcccggagtgaaggggcgagaggtgacggagacggaggggctctagacggccggcgggacagtctgcatcgcccctgctgagcggaggccgccccgggaagggggacgcggtccccggcctggcacgatccgagacggcggtggctgaggttctccgcgcgaggcgtggaggccggcggggcgcgggcagtggccaagtcgggactcctgggcacctggcgagcgtccccgcgaccagggcggggacccggctccgcaggccggtgcggaccgagcgaggcgcgacaccgggaggctcgagttcccaggcggcaggaagttggtccccggacgcctaggcttctgggccgccgctcagcacatgggccgcctcccctcagggtcgcccccgcgagggtcgcatctcagggacggcagccgcagctcccggcggacgagaaggtgggggagggagactggcccggaggttggggagaggccttgaggccccgggctggatccgccgcagcctccaccgatcgcggccgatggggcaagctcaagctgcgcccgacgaggcaggaaactttccgacctggtggggaaaacatcaaaacaaacggccgtcaggcgcctcagcccgcccgcctcagccgtcgccccctccagccagacccccgccagcccacaccgctaggcacgacctccgccgacctctccgcaagcaggctacgaggatttggagccaggacgccacgacgggtcctacctccctagccgccaccaccgcctcagcttaccttgccagcgccggccgccatagtgactctgactgaaacctacccggtgcaccgccacgggaacgcgcacccttcaagggccctcctaccccctctcccgcgccgtagtccaggaatgtcacgtgaacgacgccacggaagccgtgttggtagagggcagaaaaaagggcaaggtaatttttaacgggcctccaggcgccatcttagttaagggctggaagcttcaaacctcgggacaaccttaacgaccattttggttaagggcaagaacaatttgcgccgtagaaggtttttcaaacaaacagtgccaccttcttattttatctacttagcaagggggtgccaacttttactaaattttattctgtttaattctcgatgaaaatactagcgagcaaaagaacagacccagccaaaggagatggtcattagcagccatcttagctgtgggcaacacagtcacccgcagctaccttaagtgtgagccgccaaactccctgaagtcttaggatttgtgcacctaacagaaggaccattctccc

SEQ ID NO: 7000 - DNA, 1298 bp, Artificial sequence
  DNA replication origin
ggcgctcgagttcctggaccgtgagagcatcaagctcgtgtccatcggtgagttctctggccgggcccaggcgcccactgtggtgccgacccgcccccgcgcgtgcacccctgcggagggcgaggatttcccgcagcgcgcccccacctcggagataagggggagtcgtccccaggggtgggttatagggggcctagaccccctccccggtgtcttcccctgggatgggacctgttgtgatcgctccccgccatccgccccagcagtgcacctttggctggctaagggttgagggtttgggctggggtcacaggaggagaggtggagttgttgcatttctctacacctggggcgcccctatgggagctaggggactagaaaccctcgttcgctgtccccgggggcgggccctagggtcagatgctccgcggagtgctctccctgctgcgcccaggttggtgctctcagaggcagctgaatgggcgttggctcggaggccgggccgtgagacctgaggaggaaccgttctctgcgcctggggcctccctgcccaggtggagacagagacctggtaccttcccctgccgtcgctggaatgggtgtgggccccgaggttgcaagggtaggcgcgggtgtgtgtcctcgctctctctgctcccagctcagctctggccgcgcgccgcaggttgaacccactccttgctgccgaagttataatttagagatggtggtggtaacagtaattgctgtcttgtagggagcccaactagcgtccactgtgtaccgtcagccttctaagttatctccgtccctacgcatcctgccatctggggtgaggctagacccattttacagataagggggtccggagggttaattgacctgtccaaggtcagcaagtagggcccagctgagaactgaaggaagtgggcaacagttagaaggaggctttgttttcctctcctctcccaaacctacaccagggtcttcctgaaaggagggagggaattggtgtctcttgctggactgggccttctggtctggggaggaagaataaggatgaagtctcccttgtggtctgagatagttggaggcttcccagagggccacaaggctactgatagtgtgggctgtgatggtaggggctgtgatgtgtgtgtgcatgtgggcgtttgtgcagagaacgtgtgtacacacatagcatgtgtgtatagcatgtgcatatgcaaagagtttgcatgtacacggaatgtatgcagagaatgtgtatccacctacacgtgtgtatgggtgtgtgt

SEQ ID NO: 7001 - DNA, 1655 bp, Artificial sequence
  DNA replication origin
tggagttgacgaaagccacagaatgtgtcgaaaaggcaaaataataaaaataataaaaagatgaaaatagagaaagtctcataggcctttctgagcacacaaaatggttaatttctgtagagtcagtgtgagccatttattaattatttttttccagtaattcaaggtagtggtcaactaccactcttcataataacagctgctgctttctgagtgcttaaaacatgctgggccctgtgcattattttatctaaatattgccactaccctttaaagtgggtactattaccagaagctgagaggcccttgctggtctgagaaaaacaaattagtgctagaaacacaggtgattaatttctgttatttctaatttcctatattataacaatgttcttgataagaatttgttgaaattgggtaaaaagtctagtggttcgaggtcgggttgggggggcggttgggggaagggggtggttctgaggccagactcacttcgtgtcttgggaaggtaccacctctggaagcctcatattcctgctctcaggaatgggcacagcggtggtacctacctcaaggggctgttggggaaagtatggcaggtaattcttttaaggggcttaggacagggcctggcacacaagatttgcttattctatgtcagctattattcattataaactactttaaactcttagccaggtggagccactagggatttctgagcaggcgggagcagcggggaggggggcggcgagataaatgagggcctccaggtcccagctggagtaagacccccactttatttcctcttcctaaccacccagctcctggggcatacaaagggctcaaaatacatattctctgcatgcacagtatctagaccctctggcatcctcctcttcccccactcccccatgcctcactctgtcacctggcctcgctgtgggctcaggggcgcaaaccctgcacgtgcactgccctgcagccggcgttacacaatccgcatttctaaggcagccgtgaaacctgtgtcgctgtaggcgggggaccgcaagttgccggcgggtacctggctggacagcatcctgattcaagtgtttcgacacggaaggggcgcaagggcacgggagccggggcaggctggggaaagggaagctgaaaggctgctgggggaggggagtagcggagcgagatcttggggacggcgcggaggcggcgcgtgacacggagcaagatgctatctgggtgggcgagctgcagtccttctccaggaaatgggggaaacagggctgcaggaccccaaaatcctctcggcactgcgaggggcgcctaagggctgctgcgggcgcagggggtggggaggcgaagtagaaagagggtgcaggtcccgacccgtcctcactctgtcccccggcttcaagaggctggctggacccaggaaatggggcgccgggtttcgggcatctcaaacctatccaggcagcgggaggtgggggcagcgcccgcgcggggagcggagtggaaaggcaagtgcagatcgccgactctttccactcgatgcgccgctgcagggagacactgggggagaggtcacggggccatcagggcgccccatccccctaggagcgcaccaccgcccgcccgcccgcctccgc

SEQ ID NO: 7002 - DNA, 954 bp, Artificial sequence
  DNA replication origin
ctctgcccagccgcccctactgggaagtgaggagcccctctgcccagccagccgccccgtccgggagggaggtgggggggtcagccccccgcccggccagccgccccgtccgggaggtgaggggcgcctctgcccggccgcccctactgggaagtgaggagcctctctgcccggccagccgccccgtccgggagggaggtggggatgtcagccccccgcccggccagccgccccgtccgggagggaggtgggggggtcagccccccgcccggccagccgcctcgtccgggaggtgaggggcgcctctgcccggccgcccctactgggaagtgaggagcccctctgcccggccagccaccccgtccgggagggaggtgggggggtcagccccctacccggccagccgccctgtccgggtggtgaggggcgcctctgcctggccgcccctactgggaagtgaggagcccctctgcccagccaccaccccgtctgggaggtgtgcccaacagctcattgagaataggccatgatgacaatggtggttttgtggaatagaaaggggggaaaggtggggaaaagattgagaaatcggatggttgccgtgtctgtgtagaaagaggtagacatgggagacttttcattttgttctgtactaagaaagattcttctgccttgggatcctgttgatctgtgaccttaccccgcaaccctgtgctctctgaaacatgtgctgtgtccactcagggttaaatggattaagggcagtgcaagatgtgctttgttaaacagatgcctgaaggcagcatgctcgttaagagtcatcaccactccctaatctcaagtacccagggacacaaacactgcggaaggcctcagggtcctctgcctaggaaaaccagagacctttgttcacttgtttatctggtgaccttccctccactattgtcctatgac

SEQ ID NO: 7003 - DNA, 1251 bp, Artificial sequence
  DNA replication origin
cccctcacctcccggacggggcggctggccgggcggggggctgacccccccacctccctcccggacggggcggctggctgggcagaggggctcctcacttcccagtaggggcggctgggcagaggcgcccctcacctcccagacggggcggctggccgggcggggggctgaccccccccacctccctcccggacggggcggctggcctggcgggggctgaccccccaccttcctcccggatggagcggctggccgggcagaggggctcctcacttcccagtaggggcggctgggcagaggcgcccctcacctaccggatggggcggctggccgggcggggggctgacccccccacctccctcccggacggggcggctggcctggcaggggctgaccccccacctccctcccggacgggtcggctgccaggcggagaggctcctcacttcccagacggggtggctgccgggcggaggggctcctcacttctcagacagggcggttgccgggcggagggtctcctcccttctcagatggggcggctgggcagagacgcttctcacctcccagacggggtcgcggccgggcagaggcgctcctcacatcccagacgggccggcggggcaaaggcgctctccacatctcagacaatgggcggccgggcagagacgctcctcacttcctagatgggatggcggccgggaagaggcgctcctcacttcctagatgggatggcggccgggcagagacgctcctcactttccagactgggcagccaggcagaggggctcctcacatcccagacgatgggcggccaggcagagacgctcctcgcttcctagatggggtggcggccgggcagaggctgcactctgggcactttgggaggccaaggcaggcggctgggaggtggaggttgtagcgagccgagatcacaccactgcactccagcctgggcaccattgagcactgagtgaaccagacaccgtctgcaatcccggcacctccggaggccgaggctggcggatcactcgcggttaggagctggagaccagcctggccaacacagtgaaacccgtctccaccaaaaaaatacgaaaaccagtcaggcgtggcagtgtgcacctgcaatcgcaggcactcggcaggctgaggcaggagaatcaggcagggaggttgcagtgagccgagatggcagcagtacagtccagcttcggctcggcatcagagggagaccctggaaagagaggg

SEQ ID NO: 7004 - DNA, 1146 bp, Artificial sequence
  DNA replication origin
tgtggctgctgccggggagccccaagccttggcgggtccttgcggcgaataggagtctggtcaggcgtcaggctagtccgacgaagagtgggtaggtggaagccttccaaagagcggcggttgtctgggagccgtctcagttggccgcgacccgggcgcatgcgcggggcgggcggtgcgccttgggtagcttgtcctctccgaccccgggcgctgagggcctctgtacggcgccgcgtagggtctcggccgcagaacgtggccgagaggcccgggcgagacttcgggaccgtgtcctgagcgctctccatgcgcccggcgcgaggtgagcgctaaatagtggttgttgaaaaatattgaaagccacccaagtgctcagcagtaaggatattgagctttttaaagtgattgatttagtccaaaaattgtacgtcgcacgcccactgtgcacgacccagtgttttagggccttgggaaacagcagtgaacaagatagcaagattcttggagtggacttttgttggggtggggaggggaagtacagataaagataaacgagttacataattgtcatagaaaaaggcaaatgctacgaagaagaaagcagggacggggcatgggggtggggtgcggtgttagccgagaagggcactgggccaacccgattgagatttgagctaagccaggaagggggcaagggtgtgagtccggtggctgcctggaggaagatctttcccagcatggggaaaagctagagccgaggcccagcggtgggagcgagactggcgcgtgagaaagagctaggctaggcctgtgtggtggcggggattgagcggagggagaatggcaggacatgaagtcagaggtgtagagggagcagtcctgcaggtgaggcagagccttgcaggctgctctaaggactttggccttactctggataaaacgggaaccatagcaagattttgagcagaggaatgatgtagcttgagtagatgttaatagactcactggccgccgtagggatggagaagcgggggagtagggagaatcagatttattactaataggtcagattaggagcatccctgcgcagccactaaaaaaggctgactctaggccgggcgcggtggctcatgcctgtaatcc

SEQ ID NO: 7005 - DNA, 1247 bp, Artificial sequence
  DNA replication origin
accccgcgggcccggcggcgcgtggggcggcgcgtgttgacagcggcggcggtggaaccgggcgggcggcgggagtcggcgcctcgggttcctacctcgcgtccctaggcggcggcggccgggcgtcccgggatggccttcatggagaagccgccagccggcaaggtgctgctggacgacacggtgccgctgacagcagccatcgaggcgagccagagcctgcagtcccacacggtgcgcggcccagcgggcgggcgggcggcgtggggcggccccgggccgcgagggggctgcgggctgcctggcgcgggccgggcagggtcgtcggacggagaccgggccacagggtgggcggccctggccgagaaggctgtggcgcgccgctgggtctgggtcagggcccctggggcccaggcgaacgctgaggcccggaggggccaaggatggggaccgcagctcccggcgccgcggggtggaaggagctcggcggcgaccaggaaagcgactccgagttggggggcgggggcgggggctgcgggattcccgggctcaccttggactaggggagcaggaacgagaccgctcaggaccatccacttctgcccgccgccagccttttcctttttgaggccgtgtaatttcctccttgcagctgagggtctgggtgatggggatgagggtgtgccgggccaaatgaagtgtgactccagagcctacttgttgggacagcagagtgtaagtggctggggtctgcagccccgtttccaggtcagccgcttggccctggtcccgggaagtggtgggggcggcagtcggggcgctgttaagcaggtgtatgaatgtgcttctctaacttgctctttagtgggcagtggtagcattcatttgagtttaaaatccactcgagtagcataaaggagtaataggtcctcatagtaaacattggcagggttcatttctgctacatatacggtcttttatggggctttaaaaccgtggttgttttcatttgcttgtacctttttttttttttgaaaggcccactatgcattataatttccaagcaataaatctaggaaccagcaagaaacctggagctatcagctagtgggacttttttggaaaagtaatgagtgaggagagagattccttcaattgtgatgttttgtcagtccaccgaatcagattcagactcagaggcttgtttgtttaccattgcagtgtgtttggggggtcatcatctggag

SEQ ID NO: 7006 - DNA, 1609 bp, Artificial sequence
  DNA replication origin
acctaaagtagaggtgaaggccagggagacctctcaaaggagaggggagtggtgctggttcctgatagggtggccaggtaaaatactggatgcttgtatctactgcaatatttgggacatacttatatgaaaaaaatattcgttgtttatctgaaattcaaatttaacagagcatcctgtattttcatttgctaaatctggcaaaccaagttgctgatgaataaactggagttagctgcatgaattgggggaagaaagggaagggcatgcctgagagggaacagcatgagtgaacatctggaggtcagagatcccgtaattcatctaaggaaacgaacattgtccacatgctggagtatggagtgcaagagggcgggaggcagtgcagagtatgcaccaaaccatcacatagctgttgagtacatgctaagtgccgggtaccaggtgaagttctagggtgcagttatgagctaatgggacacagcctctgccctcaggaagctcacagtccagctgagaagcagcaaggtggagagagggaaggacaggcactgtggaagttatagctgggggaactcagcctccctgggaggtcagggaagacctccctgaggaggtgacaatatgctgaaggatgaggagacaggtatgctaaggggtggggaaagagagatctaggtcaagggaaccgcataacggaaggccctgaagtgagaaaatgagcagtgggtcccaggacctaaaatgtggccagagaggctgggcccagagagagaggagaggggaggaggaaggaccagtgggcagggatcagaccacactgcagggagtttcaactggaccctgaaggcaatgggtgccactgaaggagtataaagcaggcagggtgacacacagcttcgtgctcttagagctgactcatgctggagagaggacgacggatgggcagtgtagggtcagggcggagggaacggggaacaccaggagggggctactgcagaggtccgagatggacacattgctggcttggtggtggagatgaagagggagaaggagaaatggatccaggctgcactgagggggaagacttggcagggctgggttctctggcactgggaagtgagggggagggaggagcaggcatgactcaaagcttctggtctgggcagatgggaggacggaggcgccatttgccgagctgagctggggacttgggaggtttgggggtggtgaggagagttcagatttgcacatgctgagggtgaggaggctggcggtagaccctggttcgatgggctgtgaggaggaggaaactgcagggagccggcagaaccatgttccagtctctcctgccacacttagtcacgtggcctggatcaataacttcacctctctgtgcctttgccttctcacgtatcccgtgggaggtgggggtattctgccctcagagctgtcgtgagggtgtggtggcagcctcctggttcacgccttgttgtgccctcccacactgtagtagggttgatctgtgggaccataatcatatgtgtgtcgcttttgaggctgggttataaaagacattgtggcttctatcttgctctctcttgggtca

SEQ ID NO: 7007 - DNA, 1229 bp, Artificial sequence
  DNA replication origin
cgggctcagtcgtcccctctgccgccgccgccgccgccgtcgccgggcgcgggctcgcttgtccccgcgctcgcgctctccggccgcgggcatctcccggcccggccgcagcagccgccgccgccgcgcagtgagtggggctggcgcggggcttgcggggccggggtttgggagggccgggtttcaggagacgtctgcgccgagcggccaggggagcggggctgaggaggatctgggcgggggctcctggaacggggcggcggcggggccgcgttgaggggaccgcgcgtcccgggctggcacgagccagcagcggaggtgcccgcggcggggcctgggcgggggttccggggcccgcccggcggggatgcgcggtttctgcgggcccgggttcggagccccgcggcgcgcccctcgtccgggcccggagcatcgcccgccctacccctggccgggtcgggttgcgggggcttcgctggcggggcagcagcgaagggcggcccggacggagatatttggggtgtgctcgaaaatgattgtttttgggagatggcgcttattagccaccaattgccctagtttaaagcttgaggcaggactcaaaaccctgcctttgggattttctgccctgaagagactctcagatcgcagctgagttctttatgcctagatttgtgtgtgtgtggtggcgtttttaatgcttgatgtcagaggtgataaatggccatggtaatggggagccctggcagcacctgctgggctgacagtggtggaggctgtgtctgggggtgggacggggaaatgaaacgtgacagagatcctgtttggatattctgccgaagttaccatgtttctgttcaagtataccagttctagaacaagttgatggatccaattttaggactttgtgatagaagaggtttgggtggcaaagtgacctgggatgacccggctcggctaagaatatttggggtagcctaagtatctcttctatatccccctggcatgttctttttttcgctgtcacaaatgccctattacttgaatcatcctgggataggagagaagcttggggacagcatgtagcacagtcctgagcccaagattgagatgttttcaaatgaacgaatatgtagctaggaaaaggaaaatgtgtttgtcagcagggttggtaggttgagagtattttctctttggccgaaaccatcagtccatactgatacttgatt

SEQ ID NO: 7008 - DNA, 971 bp, Artificial sequence
  DNA replication origin
agggaggtgggggggtcagccctccgcccggccagccgccccgtctgggaggtgaggggcgcctctgcccggccgcccctactgggaagtgaggagcccctctgcccggccagccgccccgtccgggagggaggtaggggggtcagccctccgcccggccagccgccccgtctgggaggtgaggggcgcctctgcccggccgcccctactgggaagtgaggagcccctctgcccggccagccgccccgtccgggagggaggtgggggggtcggccccccgcccggccagccgccccatccgggagggaggtggaggggtcagccccccgcccggccagccgccccgtccgggagggaggtggggggggtcagcccccccgcccggccagccgccccgtccgggaggtgaggggcgcctctgcccggccgcccctactgggaagtgaggagcccctctgcccggccaccaccccgtctgggaggtgtgcccaacagctcattgagaacgggccaggatgacaatggcggctttgtggaatagaaaggcgggaaaggtggggaaaagattgagaaatcggatggttgccgtgtctgtgtagaaagaagtagaaatgggagacttttcattttgttctgcactaagaaaaattcctctgccttgggatcctgttgatctgtgaccttacccccaaccctgtgctctctgaaacatgtgctgtgtccactcagggttaaatggattaagggcggtgcaagatgtgctttgttaaacagatgcttgaaggcagcatgctcgttaagagtcatcaccaatccctaatctcaagtaatcagggacacaaacactgcggaaggccgcagggtcctctgcctaggaaaaccagagacctttgttcacttgtttatctgctgaccttccctccactattgtcccatgaccctgccaaatccccctctgtgagaaacaccca

SEQ ID NO: 7009 - DNA, 1425 bp, Artificial sequence
  DNA replication origin
tggggcggctggccgggcggggggccgacccccccacctccctcccggacggggcggctggccgggcagaggggctcctcacttcccagtaggggcggccgggcagaggcgcccctcacctcccagacggggcggctggccgggcggagggctgacccccctacctccctcccggacggggcggctggccgggcagaggggctcctcacttcccagtaggggcggccgggcagaggcgcccctcacctcccagacggggcggctggccgggcggagggctgacccccccacctccctcccggacggggtggctggccgggctgaggggctcctcacttcccagtaggggcggccgggcagaggcgcccctcacctcccggacggggcggctggccgggcggggggctgacccccacacctccctcccagacgtcatggctggccgggcgggggggctgaccccccacctccctcccggacggggtggctgccgggcggagacgctcctcacttcccagatggggtggctgccgggcggagaggctcctcacttctcagacggggcagctgccgggcagaggggctcctcacttctcagacggggtggttgccaggcagagggtctcctcacttctcagacggggcggccgggcagagacgctcctcacctcccagacggggtctcggccgggcagaggcgctcctcacatcccagatggggcagcggggcagaggcgctccccacatctcagacgatgggcggcagggcagagacgctcctcacttcctagatgtgatggcggctgggaagaggcgctcctcacttcctagatgggatggcggccgggcggagacgctcctcactttccagactgggcagccaggcagaggggctcctcacatcccagacgatgggcggccaggcagagacactcctcacttcccagacggggtggcggccgggcagaggctgcaatctcggcactttgggaggccaaggcaggcggctgggaggtggaggttgtagcgagccgagatcacgccactgcactccagcctgggcaccattgagcactgagtgaacgagactccgtctgcaatcccggcacctcgggaggccgaggttggcggatcactcgcggttaggggctggagaccggcccggccaacacagcgaaaccccatctccaccaaaaccagtcaggcgtggcggcgcgtgcctgcaatcgcaggcattcggcagactgaggcaggagaatcaggcagggaggttgcagtgagccgagatggcagcagtacagtccagcttcggctccgcatgagagggagaccgtggggagagagagagggagagggagagggagagggagagagcgttttctttttctctactttttttttttttagacagagtcttgctttgtc

SEQ ID NO: 7010 - DNA, 1327 bp, Artificial sequence
  DNA replication origin
agccccccacccggctagccgccccgtctgggaggtgaggggcgcctctgcccggctgcccctactgggaagtgaggagcccctctgcccgaccagccgccccgtccgggagggacgtggggggggtcagcccccccgcccggccagccaccccgtccgggaggtgaggggcgcctctgcccggccgcccctactgggaagtgaggagcccctctgcccggccagccgccccgtccgggagggaggtgggggggtcagccccccgcccggacagccgccccgtccgggaggtgaggggtgcctctgcccggcggcccctactgggaagtgaagagcccctctgcccggccagccgccccgtccgggagggaggtgggggggtcagccccctgcccagccagccgccccgtccgggaggtgaggggcgcctctgcccggccgcccctactgggaagtgaagagcccctctgcccggccaccaccccgtctgggaggtgtgcccaacagctcattgagaacgggccaggatgacaatggcggctttgtggaatagaaaggcgggaaaggtggggaaaagattgagaaatcggatggttgccgtgtctgtgtagaaagaagtagacatgggagacttttcattttgttctgcactaagaaaaattcttctgccttgggatcctgttgatctgtgaccttacccccaaccctgtgctctctgaaacatgtgctgtgtccactcagggttaaatggattaagggcggtgcaagatgtgctttgttaaacacatgcttgaaggcagcatgctcgttaagagtcatcaccaatccctaatctcaagtaatcagggacacaaacactgcggaaggccgcagggtcctctgcctaggaaaaccagagacctttgttcacttgtttatctgctgaccttccctccactattgtcccatgaccctgccaaatccccctctgtgagaaacacccaagaattatcaataaaaaaataaatttaaaaaaagaaaaaaagaaaaaaagaaaaaaaaaagattggcgaatgagcatacttatggtttggtaaatagaggtaatgattcctctcagttctgtttgcatgggggttgtggagctaggtcagcttcctcctgactgtctttgaagtttcactgacaattctggacactcagattccagctttccaagctttcctattggccactgggttaggtttcatactgcttctattggttgctgtgatggggtttgtaaatggaacggaggcaaatcatacttgtaccctactattgtcatttatgtgaaaagttgtctaga

SEQ ID NO: 7011 - DNA, 1302 bp, Artificial sequence
  DNA replication origin
tcccagtaggggcggccgggcagaggcgcccctcacctcccggacggggcggctggctgggcagggggctgacccccccacctccctcccggacggggcggctggccgggcagaggggctcttcacttcccagtaggggccgccgggcagaggcacccctcacctcccggacggggcggctgtccgggcggggggctgacccccccacctccctcccggacggggcggctggccgggcagaggggctcctcacttcccagtaggggcggccgggcagaggcgcccctcacctcccggacggggtggctggccgggcgggggggctgaccccccccacgtccctcccggacggggcggctggtcgggcagaggggctcctcacttcccagtaggggcagccgggcagaggcgcccctcacctcccagacggggcggctagccgggtggggggctgacccccccacctccctcccggacggggtggctgccgggcggagacgctcctcacttcccagatggggtggctgctgggcggaggggctcctcttttcagacggggtggttgccaggcagagggtctcctcacttctcagacggggcggccgggcagagacgctcctcacctcccagacggggttgcggccgggcagaggcgctcctcacatcccagatggggcggcggggcagaggcgctccccacatctcagacgatgggccgccgggcagagacgctcctcacttcctagatgtgatggtggctgggaagaggcgctcctcacttcctagatgggatggcggccgggcggagacgctcctcactttccagactgggcagccaggcagaggggctcctcacatcccagacgatgggcggccaggcagagacactcctcacttcccagacggggtggcggccgggcagaggctgcaatctcggcactttgggaggccaaggcaggcggctgggaggtgtaggttgtagtgagccgagatcacgccactgcactccagcctgggcaccattgagcactgagtgaacgagactccgtctgcaatcccggcaccttgggaggccgaggctggcggatcactcgcggttaggggctggagaccggcccggccaacacagcgaaaccccgtctccaccaaaaccagtcaggcgtggcggcgcgtgcctgcaatggcaggcactctgcaggctgaggcaggagaatcaggcagggaggttgcagtgagccgagatggcagcagtacagtccagcttcggctccgcatgagagggagaccgtggaaagagaggga

SEQ ID NO: 7012 - DNA, 955 bp, Artificial sequence
  DNA replication origin
gaggtgggggggtcagccccccacccggccagctgccccatccgggagggaggtaggggggtcagccccccgccaggccagccgccccgtccgggatgtgaggggcgcctctgcccggccgcccctactgggaagtgaggagcccctctgcccgccagccgccccgtccgggaggtgaggggcacctctgcccggccgcccctactgggaagtgaggagcccctctgccaggccagccgccccgtccgggagggaggtgggggggacagccccctgcccggccagccgccccgtccgggagggaggtgggggggtcagccccccgcccggccagccgccccgtccgggagggaggtgggggggtcagccccccgcccggccagccgccccgcccgggaggtgaggggcgcctctgcccggccgcccctactgggaagtgaggagcccctctgcccggccaccaccccgtctgggaggtgtgcccagcagctcattgagagcggaccaggatgacagtggcggctttgtggaatggagaggcgagaggggtggggaagggattgagaaatcggatggttgccgtgtctgtgtagaaagaagtagacatgggagacttttcattttgttctgtactaagaaaacttcttctgccttgggatcctgttgatctgtgaccttacccccagccctgtgctctctgaaacatgtgctgtgtccactcagggttaaatggattaagggcggtgcaagatgtgctttgttaaacagatgcttgaaggcagcatgctcgttaagagtcatcaccactccctaatctcaagtacccagggacacaaacactgcggaaggccggaaggccgcagggtcctctgcctaggaaaaccggagacctttgttcacttgtttatctgctgaccttccctccactattgtcctatgaccctgccaagtcccc

SEQ ID NO: 7013 - DNA, 1252 bp, Artificial sequence
  DNA replication origin
cacctccctcccggacggggcggctggccgggcggggggctgacccccccacctccctcccggacggggcggctggccgggcagggggctgtcccccccacctccctcccggacggggcggctggcctggcagaggggctcctcacttcccagtaggggcggccgggcagaggtgcccctcacctcccggacggggcggctggcgggcagaggggctcctcacttcccagtaggggcggccgggcagaggcgcccctcacatcccggacggggcggctggcctggcggggggctgacccccctacctccctcccggatggggcagctggccgggtggggggctgacccccccacctccctccgggacgggcggctggcggggcgggaggctggcccccccacctccctcccggatgaggcggctggcctggcggggggctgagcccacctccctcccggatggggtggctgccggcggagaggctcctcacttctcagacggggcggctgccgggcggaggggctcctcacttctcagacggggcggttgccgggcagagggtctcctcacttctcagatggggcggccgggcagagatgctcctcacctcccagacggggtcggggtcgggcagaggtgctcctcacatcccagacggggcggcggggcagaggcactccccacgtctcagacgatgggcggccgggcagagatgctcctcacttcctagatgtgatggcggacgggaagaggtgttcctcacttcctacgtgggatggcagccgggcggagacgctcctcactttccagactgggcagccaggcagaggggctcctcacatcccagatgatgggcggccaggcagagacgctcctcacttcccagacggggtggcggccgggcagaggctgcaatctcggcactttgggaggccaaggcaggcggctgggaggtggaggttgtagcgagccgagatcacgccactgcactccagcttgggcaccattgagcactgagtgaacgagactccgtctgcaatcccggcacctcgggaggccgaggctggcggatcacttgcagttaggggctggagaccggcctgggcaacacagcgaaaccctgtctgcaccaaaaccagtcaggcgtggcggcgcgagcctgcaatcgcaggcactgggcaggctgagtcaggagaatcaggcagggaggctgcagcgagccgagatggcagcagcacagtccagcctcgg

SEQ ID NO: 7014 - DNA, 1161 bp, Artificial sequence
  DNA replication origin
agggggagggcggacagctgcctttttaaagcgatggggttttctgttcggcttcactgccctggcatttgcagcggtgaggctcaccgtctgcggctcctgttcgcgcctccaacacagcgcattcccccgccgggaaacaaagccgagcggcctttgcactccggctacattgagatttaattttttttttttttctttttcgggctttcattggcccagtccaaggctggggaaagtgggggaggggaggaatgtcgatcccaggattgcgaaatctagcccttccgagccccgcatcccctttcccggcgccacgatggatcggtggcggagtttccccaactcgcagcttctctggagaaggttcccgcaccccggtttggccgcggggagggcgcaggaagtgcgcctcttacaccctgcagggtgaaagcagcgccgcggggccggactgatttcctggcagctacccggggagcggctgcttctttagcaatcggggagaggcgtccgggggaaatgggaggactaggcttatctgtaatgagttttgtcccttggctctcggtaagaagatctttatcgcttagacttctaagcgccctattttacattcttaacgctggggctaaaagtgggggaggcgggctttcgagtaaatgtgtaactgagccaaggtaattagccgtttgacattttttgcctaatttttctgcctgtgtttcaaagcgatcttgacgtgggattgttttgttttgttttgagacggagtctcgctccgtcgcccaggctggagtacagtggctcgatttcggctcactacaaccttcgcctcccgggttcgggcgattctcctgcctcagcctcccgagtagctgggactacaggcgcccgccaccacgcccggctgattatttttttggtggttttttttgtttgttttttgttttattttggttttttttgtagaggcggggtttcaccgttttggcaaggctggtctcgaactcctgaccttgtgatccgcctgcctcagcctcccaaagtgctgagattacaggcgtgagccaccgcgcatggttcttgtgttttaaacgtgtccctgctgtttcatcccaacacggcagggtcctccacccacccaaacatcccaaccgg

SEQ ID NO: 7015 - DNA, 1105 bp, Artificial sequence
  DNA replication origin
gcagcacagcccgagagccggcgggcggcggcggggctgagcgcggcgcggcgtctccgggcttcaggcaggcagctccttccagggccccgggaaggaaggaggcatgtttgcgagaggggaaggggaggggagaggcagggggagcggagagccccccaaaatagaaacggccggaggaaacggaggaaaacacaaaggatctcagaggggcgctggggcgagggcgccttcagtccatgctcctgaaagttgtggctccggcgcaggctgggaaggaacgaagagcgcggggctggaaactggccatgcctccatacaggaagtaacatgtgagcatggatcctggcagagactttaaagccggcgagcgaaggagcgagcgaacagggggcgcgcggtggcggcgggggcgcgcagcccgggccagctggcggcgggcgcgcgctctccgcgttcttaaagcagccgcgcttggctcccgccttgcgctgggtccctcggctctgctctctccgcgcggcctctactgggacagtttggggactgggggcgattgtagcccgtgcgcggagagaggagggaggctgccttctggggccggcttgttttttgctggattcccgttgttcgagctcttaaaagacgccgcacggtgctcgggtttggcgagatcctccgcgcagctcgcggatcccggacttgaggggcccctcgccctggcgaggggaaagggggagggcggacagctgcctttttaaagcgatggggttttctgttcggcttcactgccctggcatttgcagcggtgaggctcaccgtctgcggctcctgttcgcgcctccaacacagcgcattcccccgccgggaaacaaagccgagcggcctttgcactccggctacattgagatttaattttttttttttttctttttcgggctttcattggcccagtccaaggctggggaaagtgggggaggggaggaatgtcgatcccaggattgcgaaatctagcccttccgagccccgcatcccctttcccggcgccacgatggatcggtggcggagtttccccaactcgcagcttctctggagaaggttcccg

SEQ ID NO: 7016 - DNA, 1440 bp, Artificial sequence
  DNA replication origin
cgccggccgccgactccgcgccctgcccgatcggctctctcctttttaaacggaaagcagcctttctccgccgagaggatcgtccccagcgtggctctgcgttcccggtcactttttgagattttccggggggcgctcggcggcttcccggattccaaggggactcgggccgccgagcgcggggggcccgtggagcgggcgagccggggaagcgccccggcttagcggaggctcgcacggaggcaagaacttattcaacaagtttacctccctgctttcctcttttcgatgtgcgttttcggacatgcggaggttactggaaccgtgttggtggattttgttcctgaaaatcaccagttccgtgctccattatgtcgtgtgcttccccggtgagtgccggccgccgaggggatgcggccccggccggcgcgcgttggggatgcggagttgtcgcctgggcgcggagctccggcgcccgtccgggagaccctggagagggtggagggtggcccggcgcccggataggagaaaaggattgctccgctggcttggatgatgtttagggaggcaggctagtggtcgaggaaggtggaggcaggggctggccggggagggggctgggggacgcgggggtctgctcccgctcccttttgggggtcctggggagctggaatcgggagaaagggggacttgctttgctgactcgtcgccgatcgggagaactcgagttgtggggcggttggggagactgaggccatggaaaggatgcttctgtgggtttggggggcccgggatgagccccctcgctctggcgggtattgaaggaactcagaaggtgggggtttgctttgctgttctccatccctttgggagggctaggtttcggggaatggaagtcggaggctggctgcggaggactgaggatgtgtggggagcagcctgcgttctgggtcgggggcgtcctccctctctctgggggctggggcgcgggcagcacttcggtgccggcgtgaggcagcctccttgggcgcagtgagacggcagggcgcaggcggtttcggagagatccgtgtctcccctagccccggcccgtggccctttccctccgctgctctgctcgattggattgcctgggtctggacgcggggagggggcgggggcggtttcggcggccggggcggtttcggcggccgggttgctgttcgcgccggggctgatttttttcctgtctcgcgcgccctgcctaccttcatctttgcccttttgcaggctgttcgcggctggcagacccagtctcgctcctttctggccaggttaagacaggaacaatactggccgttgataagaataaatcaccgcacgtaacggtgtgcggctcggcgaccctccacttccagctctcagctggcagttccccctcctctctcccctggggagggc

SEQ ID NO: 7017 - DNA, 998 bp, Artificial sequence
  DNA replication origin
gaggagcgcctcttcccggccgccatcacatctgggaagtgaggagcatctctgcccggccgcccatcgtctgagatgtggggagcacctctgccctgctgccccgtccgggatgtgaggagcgtctctgcccagccgccccgtctgagaagtgaggagaccctctgcctggcaaccgccccgtctgagaagtgaggagcccctccgcccagcagccaccccgtctgggaagtgaggagcatctccgcccagcagccacctcgtccgggagggaggtggggggatcagccccccccgcccatccagccgcccagtccgggaggtgaggggcgcctctgcccggccgcccctactgggaagtgaggagcccctctgcccggccagccgccccatccgggagggaggtgggggggtcagccccccgcccggccagccgccccgtccaggaggtgaggggcgcctctgcccggccgcccctactgggaagtgaggagcccctctgcccggccaccaccccgtctgcgaggtgtacccaacagctcattgagaacgggccatgatgacaatggcggttttgtggaatagaaaggggggaaaggtggggaaaagattgagaaatcggatggttgccgtgtctgtgtagaaagaggtagacatgggagacttttcattttgttctgtactaagaaaaattcttctgccttgggatcctgttgatctgtgaccttacccccaaccctgtgctctctgaaacatgtgctatatccactcagggttgaatggattaagggcggtgcaagatgtgctttgttaaacagatgcttgaaggcagcatgctccttacgagtcatcaccactccctagtctcaagtacccagggacacaaacactgcagaaggccgcagggtcctctgcctaggaaaaccagagacctttgttcacttgtttatctgctgaccttccctccactattgtcctgtgaccctgccaaatccccc

SEQ ID NO: 7018 - DNA, 1316 bp, Artificial sequence
  DNA replication origin
tatagcacatgtttcagagagcacagggttgggggtaaggtcacagatcaacaggatcccaaggcagaagaatttttcttagtacagaacaaaatgaaaagtctcccatgtctacctctttctacacagacacggcaaccatccgatttctcaatcttttccccacctttcccccctttctattccacaaaaccgccattgtcatcatggcccgttctcaatgagctgttgggtacacctcgcagacggggtggtggccgggcagaggggctcctcacttcccagtaggggcggccgggcagaggcgcccctcacctcctggacggggcggctggccgggcggggggctgacccccccacctccctcccggatggggcggctggccgggcagaggggctcctcacttcccagtaggggcggccgggcagaggcgcccctcacctcccggactgggcggctggatgggcggggggggctgatccccccacctccctcccggacgaggtggctgctgggcggagatgctcctcacttcccagacggggtggctgctgggcggaggggctcctcacttctcagacggggcggttgccaggcagagggtctcctcacttctcagacggggcggctgggcagagacgctcctcacatcccggacggggcagcagggcagaggtgctccccacatctcagacgatgggcggccgggcagagatgctcctcacttcccagatgtgatggcggccgggaagaggcgctcctcacttcctagatgggatggcggccgggcagagacgctcctcactttccagactgggcagccaggcagaggggctcctcacatcccagacgatgggcggccaggcggagacgctcctcacttcccagacggggtggcggccgggcagaggctgcaatctcggcactttgggaggccaaggcaggctgctgggaggtggaggttgtagcgagccgagatcacgccactgcactccagcctgggcaccattgagcactgagtgaatgagactccgtctgcaatcccggcacctcgggaggccgaggctggcggatcactcgcggttaggagctggagaccagcccggccaacacagcgaaaccccgtctccaccaaaaaaataagaaaaccagtcaggcatggcggcgccgcctgcaattgcaggcactcggcaggctgaggcaggagaatcaggcagggaggttgcagtgagccgagatggcagcagtaccgtccagcttcggctcggcatcagagggagaccgtggaaagagagggagagggagactgtgggga

SEQ ID NO: 7019 - DNA, 921 bp, Artificial sequence
  DNA replication origin
cggcactttgggaggccaaggcaggctgctgggaggtggaggttgtagcgagccgagatcacgccactgcactccagcctgggcaccattgagcactgagtgaatgagactccgtctgcaatcccggcacctcgggaggccgaggctggcggatcactcgcggttaggagctggagaccagcccggccaacacagcgaaaccccgtctccaccaaaaaaataagaaaaccagtcaggcatggcggcgccgcctgcaattgcaggcactcggcaggctgaggcaggagaatcaggcagggaggttgcagtgagccgagatggcagcagtaccgtccagcttcggctcggcatcagagggagaccgtggaaagagagggagagggagactgtggggagagggagagggagagggagagggagaagagggagagggagagagggagagagagggagagagggggagagagagggagagagagagggagagggagagggctcttaagggtccatcatgttttggagtctaaaagttgggacccggtgtgggggcacaacacctgcaatcctagcaccttgggaggccaaggcaggaggattcttgattggcccaggagtttgagaccagcctgtgtgacatggtgagactgtctctgcaaaatataaaaaattagctgggtgtggtggtgcgtgcccgtagtcctagctactcggagagactgaggtggagtgtatcactcgagcctgggaagtcgaggctgtagtaagtggcgatcgtggcacctgcactccagcctaggcaacagagcgatactctgtctcaaaataaaatggaagaaaaaagataaaacaaataaataacaagctataagttgtccctgcatgtaaaacaaaaattgttcctgcatgtgaatcacagtcttt

SEQ ID NO: 7020 - DNA, 1134 bp, Artificial sequence
  DNA replication origin
ctcgctctactacttcaactacctggactcgaccgcgtacccgccgtctgagctcctcagcggccacctcttcccgtctggcctcctcaatgcgcaggcccccgccgccctggctgctcaccccaagctctttctgctggagaacgccaagctggccggcctggctgcggacaagttcccccacccggctccctatccccataaggagcgcttgccggcgccgctggagcaggtactgaaggaaaactcggccctgactgccgagcgcggaggcgtcaagggccacagcaagctgccaggaggctccgcagatggcaagcccaaaaacttcacctgcgaggtgtgcggcaaggtgaggcccagggttcggcgaggggggccgggaggggcgatcggcggcggcggcttccttggggcagcctggaatgcccctttttcaagctgaggagctccccagtagttgactacccaaactgggagcctcgttgggcctcagtttcctattctgtaaaatggggatgcccttgtcagcggccacacagtattggtgtaagcaggagtttgggcagcactttacaaactgaaaaaggctctggtttctgaagggggtgttggttgggggaggtaggctgtggcccccccggggctgattgtaggccctcggacagacgcaccacaaggccccccatgtctttccataggtgtttaacgctcactataatctcacccgccacatgccggtccacaccggagccagaccgttcgtgtgcaaagtctgcggcaaaggctttcgccaggccagcacgctctgcaggcacaaaattatccacacccaggtacgtggcccccgggtcgggcctagcccgcgcgcaacccccagaatcttagtgataacaccggggatacgatggccaaagattatcccttaccctctagggttgagtgggggtgggggggatgtcccttccaggtgttcccgaggtggcctctccttactgtgcactcgcccctttcctcaggaaaagccacataaatgcaaccagtgcggcaaagcgttcaaccgcagctccacgctcaacacgcatatccgcatccacgcgggctacaagcccttcgtctgcgaattttgcggca

SEQ ID NO: 7021 - DNA, 1014 bp, Artificial sequence
  DNA replication origin
ccctgcccgcgggcagcgcggacggcgccaggcccagctcggccttgcagcacacgccacagttggttttgcacaagccgctggcgccgcacactggggcccccccgccgccgccgccgccaccgccgccgccgcctccgccgccgcccgcccggaggctgcttttccagagctccgagtaactgagcagtgtctttgacggcacctcgtagcctaggggctggagggggatcatacagggcagcggcgagcagaggttgagcagtttcttgccctggctgccgtccgcctctagcgctccaggccggggctcaaagggcgcacggggctccgacgtcttggccatgatgcgctcgatggaaaaggccagtgtcttggaagtggccggcgacgctccggcgcgcgggcaggccgggggcaccatggtctccagggaagccgagcttgccatggcgcgcggagctgagccgagccaggctgggccagggcgcagcctctctcctctaagtctgcattccggaaaaggcaggggggaaaactgcaatttaataagcacctagtcgggcccgggtcacccatttgcattcaaatgaacaggggcaaaacaaagtgcacccaagggtaccaaattaccgcccattaacccggcgcgcaaaggaacccaccagcccctgccctgggactttgaaagggggaagaagggggagggtttacaaaagaaaagggggggggcggtgagaaaagagtctcaaattaacccccctgagcccttccctggacccgggcctctgccacgcgtgctgggagctggacagtgaaggggcaaagttaaagaggaccggagagccacctcgcatttacctctttcccccaccaccaaggagatgcgttccgagccatgcagcgtgtctcttctgtcacattttgatggcaaacatcttcccctccgcgtgagatcactgtcttttacattcagctgacatcacatgaagtcacttgaagtggaatgacatg

SEQ ID NO: 7022 - DNA, 883 bp, Artificial sequence
  DNA replication origin
cggcatctcgggggcctcggcgccgcgcaggtgcgcctccagctttatggccagctctgggtctgaggctgggggagactaaaccgagagctggaagactttcggagatcctaatagatcagaattgttgatttatgatcgggtttctgaggcaaagccgagttctgcttctggtttagggctgcgtgcggggaggattcggagggcagctctcccagctgatgggtacttactgtttgtataattgagaaggtcccatctccacctgtttaaggagcagattgaaacagcagaacctccccctggatcctattaaaacgtttttcctcctaaggccattcagtcgaaccaattttccgaagtgattcatagagctgaattctgccaaggcagctctttcacttttagccactaaagcaccgcgtggaaccgggttttgtgtttttctaaaataaagagaaggattatcagagaggagagggagggggcctgaagggggacgggcagagacttagtgtggccagaggtacaagcagagggaagaaaagacccttttctagacaggccccaagtaagttcggaggaattcagcgttttgtgcctggcgcacaaaagcagcgcgctccgcgcttggtttggaggggctgaattcatctgtttgcagaccattccacctgcgtatcacaacaaactgctcaaagacgctccagcactttcaacaggccgggtgctcttggcgacaacaaaagtggtcgaggctgagggttcttacggaggggggtggtggtggctagcaagagagcgagcgagagaattaggtttaggaaagggggaggactgggtgcaagggttttttgaaaagttttggctggttttgttcgcg

SEQ ID NO: 7023 - DNA, 971 bp, Artificial sequence
  DNA replication origin
gttgggcccggatccccagtcagtggtgtgcgggttgcttggccagggcgcggcgtcgcaccgccgcggatcccagaggtcgccgccccggtcaggccccgcagagcagcggacgcgcccggccttggcgccttgttcttcggcgtgggaaggacacaggccgccgaggggcctcaggcctaactgtgatcgtctgtttccctaccgccgccgggagtttgaggcccaacctagggccagatggcgaagaagccaaagcgtccggctctaggctgaggcgctccaagtgaaataggcctggggctgaggcctcgggctagggaaggcgccaaggtggattcgggcccggcggccgtgcgtgacgggctgcaacccacgccatggagcgaatcggaaggccacgggcctgggcgcccggggattacacagggcaacctaggactcctgccctggagcggagcgcgttctgcggcctagtaggcctcacttgggccgccaccgcgtgcctcccggacaggcggcttgctgggtcctcctcttgacccgaaggcaccaacacctccaacgtggagcttgtgtaccagtttgggttgggaaagagactggaacttacagaatgtcagcatagcctcagcccacttctactggaaaatcatgctttgggggacagacttcttggggagggagggataagatgacattattttccataaatgaatccacatccctgaaacatctgctcagccctggagccccatgttgcccttcatgtcgagttattttggattttcctttactgaaaatgcgtaggtggaaaaaatgtcaccccaaatcccacagaacccttccaccgactccctaaaactgtgagattttaatttctatagttgtccctctttaaaaaaaaaaaagaaagaaaagaaaagaaaaaaagaaagcagttcagcctcaaagcaaacaaaaaaaagatg

SEQ ID NO: 7024 - DNA, 1612 bp, Artificial sequence
  DNA replication origin
cgcctacccctttaatgccaagcagcccaccgacatggctcgccggcagcagaaggtaggtgcgcctgggaggcccagggagcagcacccggacgtcgccaggcgggcggggtgaacaatgggagctggcggcgcagctggcgaggaggagcaggagaggtggagaccgcgccctggggaaagggctacgaggccccctcccagcggccgggctcgcccaggcccagcccaacccagcctggagcgctcctggagctgactgggaccggcgagggccgcggagcgcagcgccgcttgctcgagcccccccagcccgggagcgttggtgagcgaggcaggcaggtcccgctttgtggaccgagaggctcggggagtgatttgctgcccgcggcgcccagagaggccttgctcgcttgcagggctcccagcgctctccagcggcgggcggctgcgctcaactccgggcccgccctcctgggcgtgcgttcggcgggcgggggcaacggcaggtgggggcgccgaggtggagggagaagagcgtcttggagcagcgctccgctcgctggggcagagagcaaccgcaggggcaggcgggagaaagcaagcccagaaggcgaagcttcccgtgactctgcgaagggcaccctcctctccctgcccgggtcagctgatcaccgactagcgtcgccaaagtgtcctcgggcactgcttccttatggctggagttctcaccagtccccctgacccttcctcactgaccccagagcaggggcacgccctctggtccttccgtccgggtcagcccctccgccgtcctgtctttgaccctattctcctcttcccaaggtgacttcgccgccaccttctggctcgcctgggtcctccaagccctgccactgctgccttgataaagtacagctgcaaaaagcttcgcaatctgaggcatcaaaagctttttctgtctgaggctggggcaaggctgacatagctctgggctgcctttgatgttaaaaaaaaaaaaaaaaaggcgcctatttctatcagctgttctttagctggagaaagggatgaggggtactgcaagatgaggggcagtggcggggggtggggacagaagaaaagcaggcaggaacccagctggagtgagttagtgaagaaagtcagcgttctgttctcttttaaataaatttgcagcacttgagctatcaaaaaagccagtcaagccccacacagaggcagtgtgaggccagtcctaaccccatcaagactgtgagactagtgtctgaaaatagtgaatctttcagttgctgccatttaagaacaaattacatgttgctgtagtagcattaggttttccgtatttatccacccttaccttgagttagcacagatttctctgtttgttttgcttacatgtgtacacacaccacccagcactgatgatttatttcagccatcacgagcttggatatcagtttcattaaaagataaaactgatttccagggtgagagacaggaggtgggttacacacaagactctccatctttatctgtggccccttgttttttcaattcgtatttttgactgcagtagagcaaaagtatcctcaga

SEQ ID NO: 7025 - DNA, 1585 bp, Artificial sequence
  DNA replication origin
ccaccgacgggctggggctggagggccggccgccgccagcgcggctgctgggttgcagccccccggccccgccgccgctgctcgcgccgctgcccccgccgccgcctgcacccaccccggctccggcgccggcgccgccgccccccagcccggcgctgccggccgagccctcgctggtacggctgggagacaggcgcgcgccggacggggccgagccgagcacctccttgccgctctcctcctccacgatctcatccgattcttcttcgctggacgaagggtccagcatagtggcgcctggggagcggggtctctggagcccccggcttggagtgcaaaaggtggggggcgctggaggcagccggggatcagctctcccgggtgggcgcttctccccaggtcagggagcgagagcgctgctgctcagcctcggccgccgcgactgatcctctgcccggcggtcgcgagctgggctcagacccagaagcgcgaagggaggaggggaagggagaggtgcgtccgtggactcgaggtgggcaagggggagaatcaattgcgagccccgagcccgcagccggatgccatctgcggctgctgaaggaggcgcctccagaaaagatgccgagtgttgcaagctgtcgatgcagccaagagccgaagaggcatcttgccgattggggagggagcggcgcttacgtgtttattggcttaactctcccgtgtccgcggcgtaaagggctgctgcagagggctggaggggggagagcgcggagcgtcctcagagcctcagtacttctgaccccaataccttgccaccctcctcccctgccggcttcgtggataatttttttgttgatatctggctctcattgcctcaaccccttttcccctcccgcggacaaaaagttcttgggggagggagaaatccagaaaccagccgagcgggctgtttggagacgctaaatcgagaggtcttacttaggaggaggaagtccgtgagatcttatacgggaaagaaagggtccatctcctttccccaggcttctttacacctggggcgtggggggcgtgggggctgggcagcgtgtttgtcccacctgtgtaaactctgattccagcaacttattccgcatgcgcccagtctaattaaaataaaagtgaatcaaattttgaatggattggtgtttcgaccaggcaactcaaccatttatgtagcgcccccgaccttgcctacccccacccccaaaatctatgatgaatcttcttcagttcccaagacctgggaatgctttctgctgaggtgagcctaccagaaaaatagaagggtttctggttgcttaaccctccctccattctggctcggtggaggcttggggaccccgcgatcagacaaagacaccctaagaactcagcggcgtcaacatctaatgcgtcgactgtcgcactctgttcacccctgcctctcgggtaaactattaatacaaagcagcagatggtgcctgccttccccgtgctcctttcacttaggccagtaaacctggtaaacgagggagctggccaacgtgctgaatgtaacctgcgaccc

SEQ ID NO: 7026 - DNA, 1760 bp, Artificial sequence
  DNA replication origin
agccagagggcaccgggcgcacggctgagcctgcaccaatgtctgtgggccctgcctcgcccacctcctcgccctcccctctggagcgcggctggccaatgacagccttcccctggctccatgggtttccccctcccctgttgtatctaccctgccccagctcttccctgcccacccctcgctgactcgcttcgcttccccgacgcgctgggttcccggagcgcagagcccagcgttagcgggtgggctccccgaggccccctgccctcgccgggctgctccagggtgtcgctcctctggctgctcccgaaggggcttctggccctgaggacggtggtgccaagcgaacttcatttttaaaaagaactggtggatgagaagagcgagcgagggcgagctatggaccctgtgagtcaggtgagacagaactgggcagggcggctggctgggagcagggggcgggggatgccgcggcttgggagaggcgcccccagccccttcctcacgctttgctttctctctctcgcctcattcccccaaagctggcctctgcgggcaccttccgggtgctgaaggagccccttgccttcctgcgagccctggaattggtgagtagcagtgtgtgtgcagggaggggcgccaggcagccagctatcaggtgaggagaggtcggatggggtgctccctgctcagttctgctccaagccggagattcaaccctcaagccggggatttcaatcctgccccctcctaagatgccgttccaaggtggtgaggacaaaatcgaggcaccctgcttggaggcgggagtgtggacgcatttttgcaggggcttagacaagtgtcgtctcacctcaccgcttgcagacgcgcaggggctgtggaaagaaacctcccccttgggagataggggaggggggcgcatggaagggctgccgctgggttctggcccctcacctggaccttcgtggggatgaggggatgggtggagggacccatagttgagcggaggagccgggaagacttggccaagctcagaaagttggtcagaactgagacagctcctctgcgggactgggatgctggaagcgcgtgttcaactgctccgcgggagcttcagggagggaaagatgctgcgaagctattacagactgttataaacggcggcgggtagagagcagaactccttccttccctactatagtttcttttctctggccactcctctagggcttttctgattatacccagaagagcccaccagcctgtttgccatggctttcttcagcgactgggctttaggaagttgtattccacttccgtgaaaccaccctgacgctcttattgcaatttgtctatgggcagaggagtgaggcacagaaacggttacccacagggccacagagccatgtcagtgttgttggctggatgatggttattcagaatgaaatctgcaggtcacacgtttcgtcttgctaggaactccaaaaggcaagcaaacctatctgaatagaaagttcaaagcctgtcatgtagcattaatcagagtccctaacactgactagctgggaaattatgtaagagcctgttctctgttcccagatcttagctccaagggcttatatctggcagtggctacataactgtgatgattgtttacacggatgatctacaagataattacatttaccttgtttgtagacttgaatgaaaatgtatgcgtatatcaatattgcatacaccaggacagcttttggaag

SEQ ID NO: 7027 - DNA, 1612 bp, Artificial sequence
  DNA replication origin
tagttttgcagaactgagcatctgcaagacaaaccttctcagctgctagcattaatggcctctcgagcatcagtggtcaagcaaggaataccatgtctctttatgtcttccaaggtcctccttctaaattcttccaccccaccaagcgtaaaaagtggaagaaaggtagggaggaagaaagagaaggagagagagaggaaggaaggaagaatagaggaagggagggagggaggaagggaggggggaggaaggaaggaaggaaggaaggaaggaaggaaggaagggagggagggagggagggagggagggaaggaagggaagggagggaagcaagggaaggaaggaaggagggaagggaagggaaggaaggaaggaaaggagggagagaagaaggaaggaaggaagggagggagggaaggaagggaagggagggaaggaagggaagggagggaagcaagggaaggaagggaaggaaggaaggagggaagggaagggaaggaaggaaggaaaggagggagagaagaaggaaggaagggagggagggagagaagaaggaaggaaagaaagataaaaaggacaaatcacctactctgctttggtaatgagcttccagataatgtgattttgagacactcaggagaaacatggagaacctcaggtcatcaaagcacccatggtgcatttctgggtgaagaagactggaccatttgagaatcaactcttaccgatgtggcaaaaaaacatcattcttcccccaaccatagagctaattagaatcctaacttgggaagtctagagacccaggatcctactttcaactctcattttttgcggggcttcccctcactcatcttccaggtgttagcttaaatgtaacacccccccaggtataacctcctgtccagaataactcccctcaaaacgtgaaacacaatttgagattattttatttgtatgtgctttttgattgtgtctcccatatctagcattaagccccatggtgggtgggaaacttccttatccttgtcttttctgtgactatttaatttttctgttccccaacagctggcacatagcaaatctgtcattaaacatccaatgattgaagcatgttagtcttgatttggtagatgtgggaactgaggtttagagaagtgaagtgatttgcccggtgtcacacagctaggaaatgggctcaagcttaggtctgcctcaccccagaactgctctgctcccccatgtaaggaggaatggttgggcgagtaactgggaggggaatcagtgggaagatttctgaagtcccctcccactctttcaaggcaacacctagagaatctcaggcccctggagagcctccagtcccctctcctcactgtgtcttgatgtattccaattacgggaccaggccactggcagattttctctggaggagttgatttcacgctccaaaatacagaaggatctgactcttccagtgttatacagacatcgtatgttcaatcctcaccaaacccatgtgaatttaatatcaatcatatagtatgatttccctttaagcagttgtcatgctcagggtcaggttcctgccccagctgagggcagaggggagtgg

SEQ ID NO: 7028 - DNA, 1215 bp, Artificial sequence
  DNA replication origin
gtccatgtttgtttacatgtctgtctccccactaaaatggaaacatcacgaaggcggggacctatctgtagccccaaggccttggcacagtgcctggcacacaatcggcacttaacctgtgttggtttgaatgccaaatgatgactgactctggtaatgaagataggaaggagggaaggaaggaaggaagggagggagggagggaaggaaggaaggaaagaaggaaggaaggaaggaaggaaggaagaatggaagaaagggaagaaggaaggaaggaaggaagggagggagggagggaaggagggagggagggaaggaaggaaggaaagaaggaaggaaggaaggaagaatggaagaaagggaagaaggaaggaaggaagggagggagggagggaaggagggagggagggaaggagaggtagggagggagggagggaaggagagaggtagggagggagggagggaagaaaggaaagaaggaaggaaggaagaatggaagaaagggaagaaggaagaaagggaagaaggaaggaagggaagaaggaaggaaggaaggaaagaaggaaggaaggaaggaaggaaacagatgtatgcatgaacgtaataaaaagcgaagacttattgtaactcatgcacctatgaagaaatggttccaaagtgtgttccagtgcattcctcccaaaagtaacacctgttccaagttaggcatttgaaaagaaatctcagagtttataaagagacgggaattcctgctgatcaacagtgtcaatgataggtagaggtatctgaggtatcaattaattcttatttgggtgttatttttaggtaccctgtgtccccagaaacctacaaagggcttagcaacttaaaattgtggtggaatttgaacaggtagacgagtcatgtaacaatttattatgatgacaagtgctgaggagttcaagggaacttgctgatgcctgctttcctaagtcagatctcaggagaacatattttgttagggaaattagaatcccccaaatagattcttgagtgtattaatatctctgttgggctcaagactggctattttggtttacaattagtttatctctacttgtatctgtccaatttcaaacatgccacaaggaagacatattgccagctgttttgagttttaaaaggacaatttcatcaacacaatatctattttttaaaccccatatgcacattatg

SEQ ID NO: 7029 - DNA, 1811 bp, Artificial sequence
  DNA replication origin
cggcggcggcggcggcgcggcgcggcgcggctcaggcgtcggagcaggcggccgcgggcgccgccgcctcctcctccatggctgtttacccggctgcattgtgggagtttgacctccgccgccgccaaccgccgcctcagcttgcgccgccgccgccgccgccgccgccgcgcacgccatgggagccgtgactgacggtgaggccccgctcgccgccacacgcgcccgctgcacggcccgctgggcctcccctgagacccctggcctcccggcccgcttccgggaacccctcggcctccccggcctcttcgccagagcgcttcggccttcccgacctctccccggagccccgggcctccccggctgcttccctgagtccttcctcctctcgccagagcccgagcgcccctcggagaccctcggctttccccgtccgctctcccggaggcagcgcggggctatagggtgtgccgggagcgtggtcggtgggctgggaacacacgtgggtggccgagacggctagaagcggtgcaagggcgggtgggaccagagggagtccgggtttgtctaggggcgcggtgaggacccaggagccgcgaagggtggacagtggtgccgggcttagggctgggggcctggaaggtttgtggaggtctgggagggagtgggagctccagggacggggcgggaatttcgggactcgtctacaaggggtgtcaggatacagagcgtgacaccaggaggggtcctggggcatattgggaagcactcacagacagtggagtcgatggcaatgaggccttgaactgcgagtggattgtgggtgagaaggaggagcagggaattatttataaaaggaatagatagggatgaggtatccggagggtgatcaggaagtgtacctgggagatttacgggggtaaggaggagccagtatagtgatgagaccgtctagggtagatcaggacgataaaagatgtatgtgtgtgtgttaggaagggtggttgtcagctgggatgaatttagaggggcaaaggctgggtttgtggacagtctaagggagatggtctatggactgagagcggaaataaggtgacactttgggggaaggggcatgattggcaactggagggagaacctacaaggtatctggttagggaggaaggaggtcctttgatatctgggaaggggatatctagggctcttgggtgtttttcaggagatggtgaccggtaactgtaaatgcctgtggagaggccacttcttaagagttgaagaccaccagggtctccacattaaagggcctggccatgggaagaacagtgataggcccaaatttccagactgataaagagtagtggaggtgggaggctactaaagacccaggaacttcatgtggaatttcagctttgcttcattccagtttcatttatttagtggatatttatccttcctggactaggctttgggattacaacccagaactaacaagcaagaacttttccctctccaaaattttggtctgaagggaaagaaacattgactaatgagttttaagagtgacaaatattaccacaaggaagtacaaggttgggaactgtaggaacatgtaacaaagattatttatccaatcaatggaaatgagaaagcctcctcgaagttaatcccatttttgaagaataaatagatattggactggtgttctgggttggtagccacttgtataaagaccccaagatgttggaagaactcaaagctgacaagtattgctagaatttagaaagttatgagccagagatctctaagggcaa

SEQ ID NO: 7030 - DNA, 1222 bp, Artificial sequence
  DNA replication origin
cggccgcggccggcgcgagttggggcgaggcttggcggccggcggcggccccggctgcagcccgggctcccgccgccccccttgcagcccccgcccggcccacgcccagaggccgccccggaggccgcagccagccgccaggtgagctcgcccggacgccgccagggctgcgggggtgcggcgggagctgcgggccgcccgcagtcggggtcccggcttcttccccgggaaggtgactgcggccccgccgccccatccagggtgacgctgctaggggtgggctcgtttccctggggggtggggagggtgacggggacgcccggatccggctgagcccaggagaggcgggactaggggtaccgaggggggcgcgtcgctgggggtccccgcgaagttggcgcccacgcgcgctggggcgggtctcgaacgccggcacttgcgcggggcgcggccggcaatcaaaaaaggccccgggttccaggtcgcgcggttccggcccctgcggccgcccccttccttcctgggctcggcgggtgcgggaaaaagggtgaaagagaaacttggcgacctcccggaggagttcgcgaagcgaccaggagcgtgttgccatcgtcctcacccggcacccaattccaccacagagtcgggatttcgtcggtgatcgtgatggggtgcttttatttttctctttgattttcaaaaaatgtctatgtgactgtccctatcttaaggggaagttgaaagtgggggcgggggtgctcaatgagaaacgttgccttgtgtgtagttgtttggagcacactgcaaattatattggcatctctttccaaaagtcactttgattcaacttcgatagctttctcgtaaatggcacgtttaggtggtgagaggtggatgaggaaacaggcaccagtgcagctgatttgacctccagtgggatagatacgattagcaccaggatcgtgtctcattttgaacccaggtttgttattttattcagccataccgttgttttccaattttcctgtcccccaagtagatcttgcatcttcatatccgggatgaagaagttgtgtaggataaacttggttgtttcactttccttactaaatttaggtacattctccctgttttcccccagttctttcaaagaggagaagttgcagatgcaaatgtattaaagtgaagtgtgtttaacctctagcaagaaatatgtacaatt

SEQ ID NO: 7031 - DNA, 926 bp, Artificial sequence
  DNA replication origin
ccgccccgggctcaaagtccgcggcgcgggctagctttcgctttcgactcccgcggccgcccgagggaggggacgggcagcaggcggcccgccaccgcggcgctgggtcccctgcctgcttctgctcagaggacctggcgcggaggccagcgccggagcggcccggctccaaccccgcgccccaccatggcagcccgcgcggggaagcccgagccgcaccccaggacctccagctgcccacccttcggccgcttgcatccccgggcccggcccggctgccccgctccttccttccgtccgcgcgtccgtccgagcggcggcacccggccggctcccttaagcggagacgcctcccgccgcctcctcccacttgccggtccctccctctcagctcgctccggcgaagtttgcacgtcaagcccccggactggagccagggcgaagtcggaaatgcagccacctatggaggagccggccggccggccccagggcagcgcgggagaggctggtgcagggggcactttgccctcggcttgcgggcggccgcagagttgtcaaaagcatgaatgggaagccgccgcagagcggactccgggcgtgcagggaaccttgggctagcggggaagtgcctcccaggtgtctgcccaggtgtcaggacgaagtaccgtgtgcacgccacgccgcccacatgtgtgcccccgacccgcaattggaagtcacactgtgcgcctggggaacttgaattcgtccagcaaagagagaacatgagatcagtgtgcgagggaatggaggagagtgaaacaaaccgagagaagctttaacccgtgtacatattttagaggcaccaccccaagtttctggaagtgattcattcaccccaaaagtaaaaatctgattcatttttaacttgagttgttagtccttcc

SEQ ID NO: 7032 - DNA, 1256 bp, Artificial sequence
  DNA replication origin
aaaaacggcccccgcgcgactctttcccccttttttttgttacattgtaggagcggaaagaatgtcggagcgggccgcggatgacgtcaggggggagccgcgccgcgcggcggcggcggcgggcggagcagcggccgcggccgcccggcagcagcagcagcagcagcagcagcagcagccgccgcctccgcagccccagcggcagcagcacccgccaccgccgccacggcgcacacggccggaggacggcgggcccggcgccgcctccacctcggccgccgcaatggcgacggtcggggagcgcaggcctctgcccagtcctgaagtgatgctgggacagtcgtggaatctgtgggttgaggcttccaaacttcctgggaaggacggtgagtgtccacgccctcctccccccttcaccccctcgcgaccccctcctctctcctcccctcccccctgcccccctcctgtgacccgccccctcgaggggcagagatgctatcgtttgctgggttgcggaacgcggaggtgcccacacctaccccgtgcgtgcgtgagtgtgcgtcacactcctggccactgacctgcctctcccctcctcctgtgtgtgtatatctcctagggacagaattggacgaaagtttcaaggagtttgggaaaaaccgcgaagtcatggggctctgtcgggaaggtgagtccagcccccctgatggagtttgtacaaacccctgggaagtttcattgacagttcactgggaccgggaacatcagcccaccataccgactccccgactccccgtgcctgcgaagatgctgcctgaggagggagggagggggcagagcgcttggaaagtttggtttgggggcctcctgtaatgagagcgtccggaatccttctgtgaccaggcaggagcagcattattggtgatgagcgctgggaaccggcgggaagtttaacctagatctctgcatttctgacctccttacggagaaacaggagtagaggaaggaattctcagctttgaaacctttccacgaatgcttaggggacattttctgttggcaatcgaaacgaattttgaacttaaagaagatgctttacctatgcagtcttatttctgtaggatttaaggtacaagttggggatgttagaaaaaggtcatcataacccggagtgcattttggtcagattttttgcgagctgccaatatcacgggggaaagaaagccagaattttatttggtcaaataagcctttac

SEQ ID NO: 7033 - DNA, 1902 bp, Artificial sequence
  DNA replication origin
gaacccgggagggcggggggatgccgggagagagggagggacctgcgggcgtggagggagaggcagagggaagggaggaggggtaggcgtgcgctccggagcgagccggggactgcaaggcggagacagccaggccagcggccgccgagggtgcccgcccaggctacccgccctcccggccgcggcgcggacggaccgacggacggcgctgcgagcaggaggcgtccggccatgttcagccggagctcccggaaaagactctccagccgctcggtgagtgtcccccgctcgagcggggccgatcgccgggcacctccagccggccgcgagcgcccgcgcgcagccccactgcgccccgcggctgcgcacctgtggccccaggtaagccggccccgcgggcggggcgcgtccagggcgcgagagagcgctccaaggcgcgggaggggttaagttccgaccccccggctgggcgacagtgagacccgaaccgtggccctcagggtcacagtctgggggatccctggaaagccccctccctccgggcaaatcggaatcccagcaccaaagctccagcgtccagccacttggagctctagcggggactttagggccgtcttttggggtgtcctctgctgccccctttccgggagcaccagcccggtctagggcgggcgcccgatgctcgcttcttgcggactccagggaactgaagggtcttgcttttgtttcttagaaacccgtgaccaaggtgtctgggggagacaaagccccagccgtggtcatttcgtggtggtgtagtgcccatgccggaggcaacctgcctgggtccgcgcacccttccccaagcaggcgggagaccacccctggggcactggcagtgccccgccccgtgtcccccatacagaagaggagcagttggctcaaatcacaggaggtggggtgggaggggcaggccatcctgccagggacacgagtggggctgtggagggagaccccgtggtggagacatgcgtgtgttgtctttttgttttgaagttgaccggactggggcggatagagcgaggccagccatgtaacgcctgtggtgaccagtgccctgggttcgccttgcataaatggaggtaggaagccgtaaatgcacaacactacagcaagataaaatatgcaatatgtaatatacatacatatatatatctatagatatatatatattcccctccgccttaaatctcacttgtaagtcacatggaaagaatgcaaaggctgtttctttaagagcggagctacatctgctacaaatattggaggtggaagtggtggccagacactgggagatgcaggagagccgggctcaaggctgcgtttcactgatgtgagaactgtggatccctagcacgggcactatgtgtctaggtaactcactccaaaacaattcaccctgggcaaggcagtgttgccaagtgccacagtgctgtatgtgtaggattccctggactagctggtgttttccagttgtgtttttaattcagcgcctgtaactctgggtcccaaccgcaaatccattgctgcccgcctgggccgtgtcaaccctctgcggcggccagatgtttcttattaaatgtgccttgagtgttgacttccaggcagccccagcttggattggaatgattacgtttgggagacaagggagctggttgccctcccaatgcatctggctgctggggctctggttgggaaaagttggggtgcaggcttacaagctgtcagtttgctggtttcaagcaaaaggtgaatcctccctggcgtcttcataaaaaggaaaaactggtgacaggagaaaattgtgcaatatcataacacattctctcttggattagcgcatctttccccctttctccacca

SEQ ID NO: 7034 - DNA, 1201 bp, Artificial sequence
  DNA replication origin
ccccagactgtgaccctgagggccacggttcgggtctcactgtcgcccagccggggggtcggaacttaacccctcccgcgccttggagcgctctctcgcgccctggacgcgccccgcccgcggggccggcttacctggggccacaggtgcgcagccgcggggcgcagtggggctgcgcgcgggcgctcgcggccggctggaggtgcccggcgatcggccccgctcgagcgggggacactcaccgagcggctggagagtcttttccgggagctccggctgaacatggccggacgcctcctgctcgcagcgccgtccgtcggtccgtccgcgccgcggccgggagggcgggtagcctgggcgggcaccctcggcggccgctggcctggctgtctccgccttgcagtccccggctcgctccggagcgcacgcctacccctcctcccttccctctgcctctccctccacgcccgcaggtccctccctctctcccggcatccccccgccctcccgggttcgccccgcggtccaccggctcttcccatccctcccccgcacccggctggggccactttctccctttccctggcttctaggcccactgggcacaactcccggcgcttacctggtcccgcccctgaaggctcgtccctcacccttgtccccagcctaggggcagggaccgtttcacacccccctgccgctgtagctggggtaggggagtggagatggaaggatgagggttgagtttgtttaaggtataatccacatacagtaaattcaccctttcttagtgcacagttctgccagttttgacaaattcgtacagacctgtaaccaccaccacaatcaagctatagaacggcgctctcacccccgaaaatggattattttaaaagtttgtaccatgcctagaatctagtgttcattaggtgttgggagaggaagagaaagtggaggaggaggaggaattatgcccctatgtaattgtacaatgcctggaatatagtagatgctcattaagtaagtgttgattcattgcattcaagctttgaagccattgcgcctttagtgccttttttcccattaccttttccatcacttcctagttggtgatctccccaaattaacctctttgtgcctctgtctccttatcgataataatttttttaaatgatgtaacaagagtccttatctcacacca

SEQ ID NO: 7035 - DNA, 1535 bp, Artificial sequence
  DNA replication origin
ctctcccttctcgcaccatcagctgctcctgctgccagcacctcttccctcgaaaaaccgctctgtggtcaggtggccgaggcgcccccagctctcccaggaaggggttcggtcccaccccccccccacccccgcctctctttacagccgctgcagagccaaggaccagcgtggtgggaggcggtttcaggctcacaaagggaaggattaatcttggcgattgggctggggtttgcaggcaagtacaagtggtccatgatctcctctcgccacccctccaccgccccctgcccacctctggattcgaacgctccgctgccggaggaagcctggggacaggcaggcggcggcagaggctccctgccaccggaggtttgagcttgggttgtgggaatatccatggaggtgaagatgccgtgtgtggtgtgtggaccagggaggaggggcggggagaaacccggccagcttgggagggccagatggctgcggctgcgttttaattcaccaggcaggcccgtttggccaggctgggaggaagggggaggggggagaaaaaaaaatcagaggtcagtggatagggagaggccgggctctggagcagatgcctggcgaacaatggggcttttgaaggggatgctggaggaagtgtggcgcgcgctttgtattgcctcctccgcattgcaggttggaatcgggcagctaaattttaatgaagtgcattccaaagtgtgctcgtcagcccgggcttttggagcgaggggctcggctgaatggggactgggggtgggagggggagggggccggcgaaatgagttcctgatggatggtaaaggaggagatgaaagcctgctcagtgtggagggcaggggaagggaggggggaaaaatcagtacgtccccgtgcatattaataggctccagcaggtgttggtaaatgtatgttgctgcattgttccggcgcccaggctggggaaggcaggggagagggagagctgcttccccgggcagcgcggtgggcaaatgcctttgcactttggagggctttgtaagctctcggggaaaattagaaacggaagggctgcgattctcctctgtccgttttcctatttctaaaaggaagaatgtacatgcggaaggctttttaagtttgcttcctggaaattaacatttgtatgttagagcactgtgttatctaggtaagagatgtatgtctgtgggcatcagaaaacagaatccagagtctggcttgctgagtgcttgggagctaaaaggcttttctccctgtctggttctgtaagtgaatgggccaaacccggaaggctgggggatttttgaagattcaggaaggctatgcctcccttcctcttcctaagtcctaagtctaactgacctgggtaccagggggcaatggagtgtacaaggaagctgtcttgtccacagtgttggtatatagactttgtctcacacacaaagggagtggatttgtgcctgaactaaattatttgagggtatgtatggcttatttttaaggattag

SEQ ID NO: 7036 - DNA, 1280 bp, Artificial sequence
  DNA replication origin
ggtccgggagagcacgggcgggcgccggaacgtggacccagaggcaccggaatgcaaacaaagctcgcgggcgcctgtgcggggctcgcggggaagcccagaaagtttgttttatgatggcttgagtgcgcgagcgtgtgcaggggagcgaggctgccaagtttctctctcctgttttgtgatttggggagagatgtttctcccatgaacaagcggaggcttgggggctcgtgctgtggggggcacctgtctctcgttttatttttttggaggaggggtgtaactcatcatgtccaaagtgatccagaagaagaaccactggactagcagggttcacgaatgcaccgtgaagcggggaccccagggcgagctgggggtgacggtgctgggaggcgcggagcacggggagtttccgtacgtcggagcggtggcggcggtcgaggcagcggggcttcccggcggcggcgagggcccgaggctgggcgaaggggagctgcttctggaggtgcagggggtccgggtgtccggcttgccccgctatgacgtgctgggggtcatcgacagctgcaaggaggccgtcaccttcaaggccgtcagacaaggtaaggcagggcgcgcctttggggggcgccccgagaaaaggagggtggtctgtgggctgccccttattctcgatttcctgcttccctcctcggagcgcagtgaagagaagttgaggccgtgcgccctgtggtggcggtgaaatacacaaagttgttgcgaggttgagggttgtttgcccacctgcgtttcgaagagggggctgggtttgcgcaaggtagcggggggacgtttctcaggcctggctggccaacctgttatctccgccactaagtgcagcgcagtctcgcctgcacccgagagagagttggggaactgagtcaggggcatggtggacgctgtcctggctccttgggggagggatgcagctggcgttctttggccacgagtcagtttccatacctgctgagtgggtatacagaaagagagggtctgtagtttattggacctcccccatcagaaaatctgcttcaccccgcgacccctccaggtgagctaggacaccactgcctggcggttcctgagcccgccgccagaagagcctgcattcacccctcagccggatgacgcatgtgtctccaccgtgtggctcagccatacacttgggagggggagagggggaaggggtgcttgcttttagctcgaatcgggtccaagtttaccctcccaccaccaccatc

SEQ ID NO: 7037 - DNA, 1188 bp, Artificial sequence
  DNA replication origin
gcccgcgggcgccctgcgcggccgcctgcacttgcgctggggactcgctggactgcggtgggcgcgggctggctgcgttgcccggggacctgccctcctggacgcggagcctgtgagtgccgccctttccgccctctctgcgccccggggctctgtcacttggggatggagcggcgggggttcgtactcagggagggggtgcggactgggttgtgtgtgtggagttgtgcgtgcttgtgcgtgttggaagactgtcaggttggagtggcggaagggagattctgcgtggaggtccgggggagtaggcgtgcgagagagcctggagaagaagagcgtgcctcgtggggtctggagacgagcgagcgtgggtcgtagagatttgggggttagccagcacgcgtcgtgcgggccatctgggggtgagtgagtgggagtctggagctgagtgtgtttgcgggtgggtgggtgggaaacgtctggagaagagtgtgaagaagtctgtgggggtatgtgggtgcgtttccttttcctctcctgtaatccaactatttggtgtctgagctccttggtcttccagtgggtaatgaatgaaggtgactgttgggtccagtctttcgtttacattatttattagttgatagtgtgtgtagccgtctcctgatccccgaagaccgtggtggcctgacttgcctctctgtgcggggcagaaggcagtcttcccccgaggacccctgagttagagggctttgacagttcctggcgacctgtgagtgctgggagtttgtccttttacgcctgtttggcattttacggaactgtgttccagacccttcctgtgtgttccctggggccccattgggcttgatgatccagtggggtggggcccaccctcaagactctctcctccataaatggtgcaaatgagttttggagaagtgctgcttcaggagagggtgccaggggcttggctgatttaagctgtttgtttcacccgaaagaggttcttttctgtgctgtcaggatgtgggcttattaggacttagtgggacacttcttacaggagatttgacaggaaaaaaaaggcattagacttctgtgtaaacatggtagaatagaatagtcttcttttacttctaacaaatctggtgcatgagtcaaatcccgttcagttatgggtaattagcatct

SEQ ID NO: 7038 - DNA, 829 bp, Artificial sequence
  DNA replication origin
caccttgcccgaatcggcggagttcgcagctagcgcgggcgggccggccggcccggatgggcgcggggtttgcggcccccgccgggtgctccggagcggcccgggcaccgggggcacgctgagtgccggagccgcggccgcagagagaacttggggcgggggccatgccccggtgcggagtctagagccgagcggagcgccccgcgggcccgcccgcgtctgcggccgttcgggtcctcacagtccccgcgcccggagttcgcagcgcgctccagacaagatggcgcggccggtccggggagggctcggggccccgcgccgctcgccttgccttctccttctctggctgcttttgcttcggctggagccggtgaccgccgcggccggcccgcgggcgccctgcgcggccgcctgcacttgcgctggggactcgctggactgcggtgggcgcgggctggctgcgttgcccggggacctgccctcctggacgcggagcctgtgagtgccgccctttccgccctctctgcgccccggggctctgtcacttggggatggagcggcgggggttcgtactcagggagggggtgcggactgggttgtgtgtgtggagttgtgcgtgcttgtgcgtgttggaagactgtcaggttggagtggcggaagggagattctgcgtggaggtccgggggagtaggcgtgcgagagagcctggagaagaagagcgtgcctcgtggggtctggagacgagcgagcgtgggtcgtagagatttgggggttagccagcacgcgtcgtgcgggccatctgggggtgagtgagtgggagtctggagct

SEQ ID NO: 7039 - DNA, 1245 bp, Artificial sequence
  DNA replication origin
taccgacaccggccgagggcagtgctgccgctgcgcctggaagacaggcgttcagccccgcagcccgagctcggtgccggcaggcatcttcctctgggctcggagcgcaaagccgtagacctcgggctggacggcgcggccggccccgcgctgggaggccccagtgcgcctcgctgtccccacgccgcggccagagagcgcgcgcgcgcgcgcagcctcgggttccgcacggctcctccgcgcagcaagagtcccgccgacctcgcagccgaacaatcagccgcttgctgttcgcctccccgcggcccagccccggccggtcccccaagccccgcccccggccgctcgcccgcacacaccccctaggctccgcgctccgcggccgcctgctggcccacgttggatgctttgcaacagcgccccgccacgcctccccgcctgctgctcattggctgccggagtccaccgtggccagcctcgagggccattggagcgctcgctgtgatcccgcccctcccgcttcaccggctaccccgcccccacactcttttcccacccaaggtgtgaagggcgggagactgggaggagaaagggagggacggcccccgcctcttaaaggagacacgcaggttgttgttggagaacgggaacgcgggctggggaaaggaggcgtgaagatacgccctctgcgtcaagaaggggagagaaagttaagagggtaaaacgcccccgttttggggctgtctggccccaaggctttttacgtcctcctcaggctgcaagcaggactgcagattagaagcaaacccgcgtccgttttccaggttccttccaaaagcgaagacacaggtttaaaacttaacacatttcttcctgactgggacatccttggttatttcattaggcgtggtccccttcctcctcgagcagcctggagcatctgctcctgacttgttcttcacgtcctaaatccagcaatatgtccttgattactaaaatgaatgtgtgctgcagaaacctagtctcaaaggtgcaccctcggccaggagtggtggctcacgcctgtaatcccagcagtttggcaggccaaggcgggcggatcacctgaggtcaggaattcgagaccagcctggccaacatggtaaaaccccgtctgtactaaaaatgaaaaataaaaaaattagccaggtgtggtggtgcacacctgtaataccagctacgggaggctgggacaggagagctgct

SEQ ID NO: 7040 - DNA, 1024 bp, Artificial sequence
  DNA replication origin
ctggccgggcggagggctgacccccccacctccctcccggacggggcggctggccaggcggggggctaacccccccacctccctcccagacggggcggctggccgggtgggagggctgacccccccatctccctcctggacggggtggctggccgggctgaggggctcctcacttcccagtaggggcggccgggcagaggcgcccctcacctcccggacggggcggctggccgggcggggggctgactcccccacctccctcccggacggcacggctggccaggcggggggctgacccccccacctccctcccggacggcgcggctggccaggcggggggctgacccctccacctccctcccggacggggcggctggccaggcggggggctgacccccccacctccctcccggatggggcggctggccgggcggggggctgacccccccccacctccctcccggacggggtggctgccgggcggagacgctcctcacttcccagatggggtggctgccgggtggagaggctcctcacttctcagacggggcagctgccgggcggaggggctcctcacttctcagacggagtggttgccaggcagagggtctcctcacttctcagacggggcggccgggcagagatgctcctcacctcccagacggggtctcggccgggcagaggcgctcctcacatcccagatggggcggcggggcagaggcgctccccacatctcagacgatgggcggccaggcagagacgctcctcacttcctagatgtgatggcggctgggaagaggcgctcctcacttcctagatgggatggcggccgggcggagacgctcctcactttccagactgggcagccaggcagaggggctcctcacatcccagacgatgggcggccaggcacagacactcctcacttcccagacggggtggcggccgggcagaggctgcaatctcggcactttgggaggccaaggcaggcggctgctccttgccctcgggccccgcggggccc

SEQ ID NO: 7041 - DNA, 945 bp, Artificial sequence
  DNA replication origin
tccgggagggaggtgggggtgtcagtcccccgcccggccagccgccccgtctgggagggaggtggggggggtcagcccccctgcccggccagccgccccgtctgggaggtgaggggcgcctctgcccagccgcccctactgggaagtgaggagcccctctgcccggccagccgccccgtccgggagggaggtgggggtgtcagtcccccgcccggccagccgccccgtccgggagggaggtggggggggtcagcccccctgcccggccagccgccccgtctgggaggtgaggggcacctctgcccagccgcccctactgggaagtgaggagcccctctgcccggccagccgccccgtctgggagggaggttggggggtcagccccccgcccggccagccgccccgtccgggaggtgaggggcgcctctgcccggccccccctactgggaagtgaggagcccctctgcccggccaccaccccgtctgggaggtgagcccaaccgctcattgagaacgggccaggatgacaatggcggctttgtggaatagaaaggcgggaaaggtggggaaaagattgagaaatcggatggttgccgtgtctgtgtagaaagaagtagacatgggagacttttcattttgttctgcactaagaaaaattcctctgccttgggatcctgttgatctgtgaccttacccccaaccctgtgctctctgaaacatgtgctgtgtccactcagggttaaatggattaagggcggtgcaagatgtgctttgttaaacagatgcttgaaggcagcatgctcgttaagagtcatcaccaatccctaatctcaagtaatcagggacacaaacactgcggaaggccgcagggtcctctgcctaggaaaaccagagacctttgttcacttgtttatctgctgaccttccctccactattgtcccatg

SEQ ID NO: 7042 - DNA, 962 bp, Artificial sequence
  DNA replication origin
cagggtggcagggcccagaaacagcccccagcctcagcccctagcacaagccagccccaccccttctcccggggcggcccgagctccagcacccagcaggcttgcgcgctcgctgcagcctggtgcaggcgcgcgggaggaccctgggctgcatccgcgctctgacatgcctgcccccagcagggaagctgagccccaggaggcagcaagcggggccccggaaggtattgctggagggctgtacagaagagcctagtatcggtgtccaggccgactgaggagccagggaaaggcgagggcgtagacgctggactacgcagcaggaggaagctcgacggatggggggaggaggccattgatgggatttggagaggcgggtggagggctgggagcacttcagaactgagcatcagaaacttgggcgcgcaactggtccccagagcccgaacttgaccgtcgcgagagaggaagggaggggagggagggaggtggggtggagggtgaaggcggggtgagtagtagaaggatgcgaaggctgatactgaacagaaaatggaaggaaatttttccaagaaccggggaaggtaaggacaatcgagctgggagggactgtaatgagaaagctggagaggcaaagaaggagagcaaaatccagaatgaagagcgaggccgtggaagggtgagaaatatactttgaacattaagaggaagaaagcaaaatgcgtccggaactaaaaattcaatataggaaaaacaaaacaaaacaaaacaaaaatcaggtgggagggacttcgtccctgaaactgccaaaagagagggaaaaatgccactgagcataccggaagaacagaaagtgaaggaagggagaaaggaaagaaggcacattaaaccaggcaagaaatagtaagttactttttaatttctttttcattgacaacttgcttccaaagttagtttgggga

SEQ ID NO: 7043 - DNA, 1282 bp, Artificial sequence
  DNA replication origin
tggtattgggccccagctttgttctctggttccttgaggttaggaacctgttgcactggaagggctgaggtgctcccagcctgccagtcacaatactccaatgggtggtgccagccaaagtgtttcatagtgtgctggctgtgggatccatcctcatttgtatgtgtcagcagcagtggcagtggcagtggcagcatggcagggtgcacacttgtcagctgtggcagggcgctagcaggtgctgggctgctggcctccatgcaggcattcatagcagtggtggtggcagtacagcatggagtgacaggggcccccagtggtgtctgtgtgttcatgctgatggtggtgttaacacagtggtggggtactggtggatgcagggctgtgtgagccctctgtgtgcatttatgcaggtggcagtggcttctcagggtgggggtgggtctacggttctccacaactatttttgggcaggtggtagtgtcactatggggttgggggctggcaggtgtggggtgctggtgtgtgtgtggctggtgagctctgggcaccaacactctaatagcaatggtgatgtgtggccggtgagagtatgcactcacaccagcagcagtggtgtgtcagggagcatgtgccatgcatgctagtgggaaaggggaggcaaggtctgcctctgcacacactcaccatcaaagaaatttggggaatggctgtgggtgagtgcatgcaggtaaagcagcatgagggaggctgcagttgggggagggcatgggcaggctggtgtgtgtctgtaggggccactctgctgcagctctctgttgtcaggtgtgatctaccagtacaagagctacaatgtgggcccctaggaggtatttcctggacagctgagactgtactgcaagcaagagtggccaggctggggtcagtaaattgagggttgcttgggttggagtggccccatctccgaggcaagaccatcctgtagagttcaggtctgacagttcccgctagggctaaagtctcttatgggagcaagttaagcctagtggggtggccgttcctggctgtgctacactacagatgctcctgcaccaaaccctctgggctccactctggctgtagttctgctcctaccatttctctaagcaggtctccctgccaactcaagtgtctgtgggggtcatggggtctcctcctgcctgtattccagaggcctttggtaagagtgggttgcttcttgcctgttcaactcaccccttccccaggagttactggtggccag

SEQ ID NO: 7044 - DNA, 1626 bp, Artificial sequence
  DNA replication origin
cagtgggggcgcgccgcctgagcaggggtgcggggcggggagaaggccggcccacgtggaccgcggggccaggcagggacaggagcagccgggcggcccggccaatcagcgcgttccgcggcgggcccggcccctcctggtcagcgcgctagctgggctcggctccgcactgctagctgcgcgccgccctggacggggcgcaccgactgcgcgcgcggctgcgggcaaacatcgggagtcctgcctcagctgccgcttctccagcagcagcttcaggcttctcccgcaggagcttcgggcttctcctggtagagacgtgggaacttttcttctcctggcgaggctgcagaggtgatgggccgctcccggggctcccgcggggaggcggcacggtgagcgtcctcgggctccggtgcggcgatcagtacctagttccggacgcgccggtccgacttggatgccggctctagtcgagtaagaagggttggaagggataaggaggggcgagaggatggggtgggggtggatttggaccctgtatttaggtgctgtctcgtgggcagccgctgcctctcggctggtaccgagttaactcagctcggtgcagctcccctcatcccggctctctggggcgccggggagagtgcctgtgctgaggtcggcgtgcaacccgaagttggaaggggcactccgaagtaaggatgtgtggctggagagaggcagcggccgcttccagtttcggggttcatgtctgacagaatccccgggggtgctctgctgatgcggaggaggccactcgatgaattggtatagggggtggtgaactcaccgtgagctcttttctggacaagtcgaccttagcgcttcatccctttaatctgagctaggatctttctaggagcaagcaggtgggagccggtcagcgtccccccgcccccacccccaccctgaagctctggttgctaggatcttgcttgaagggcgcagcgagcgctcgggaggcgtcttccagctgggagcgcaaagcttcccgcccaagtggagaactggagcgggtctggaagttgcgtctctttccgcgggaggcatctcagatttgcccaccaaggtggcatctctacatttctttcgctctttttcccactttgccctgttaatccgctcctagaagagagggcatccttgaccctacgcaaggagctcgggagaggattggaactggaaagcttgatctcctgcacctggtgaggctgcccaagccagacacagtgccgctggtgcgttttcttctcgaatcagcatcatttaacgtttaggggctccacggagccttagtaaagctgtgaatcagctcctaagcagtatgtacatgcacgggttcacggactcgccgagacctagcctggtgcccatcccccgtcaccgagattcagggacccccctttggtttaacgtctttatccctgaactcttttcccttttaacttttcaatggtcttccctctgagacaagcaaggttgatgtgatgtgacaggcgatccccgtgtgtggggatgggcgccttcgaagctttggtctgtttctgtctctaatatccttggcataaagcttgtccaccataactc

SEQ ID NO: 7045 - DNA, 1400 bp, Artificial sequence
  DNA replication origin
ctgccccggctccaggtgggactcccccgcaatctgcggagccttcccccgctctccttcccgccgccgcagcgctctgcgctgttcttgcccgggtggtagccgctcccggcgcggcttcccggagggctatagcctacgcacgcactccgcccgcgccttcccattccctgcgggccgggaggcgggcgtcggaagccgatcctggccctccccggccccgggcgcccggccccttcccagcgcccggagcgcaggcgggccccgggccctagccgcgttgaccaggtttccagccggggcggagccgctccccggggcccctcccaggcgcgctggggacccggggcgccgcggtgcacggtggcgggcggccccgggagatcaccgaccccgaagcaatccctggcggcgcccggggtccggaaccccagcgcggcgtctcagccgcggcggggtgctcgccactgacccctcagcccttggccgggactgacgttcaagcggacagctgggctctgccgggactgacgttcaaggggcagccgagcacttcctgagccctgcctggcacccgccgagagactttttggcacaagtaggggccagccgttgaggtgtcattcggggtctcacgtgttgaactttccatttgcccactgccgtctttaaacttttccaagctctctctctctgcgacattgccccatttcgcccgctgtgtcaaccccaggttttgcctcctatccatcatctttcagatgtttcccttttttccttcctcattaggcctgtggaaatcgaatcaagggtttctggagtggagtgattccagctgctttgagctgaaggaaaagtagcctggccagtaaagcgtccgtgtgctggaggagtgcagccacccatcccggcgggccttgcaggacgaccgacaccaggaaggctttgtgccaggcccagcagccacccccagccgccttatgcaagtgggtacatgccctcgccagacgccagctttctgatctgcgtctttagattttttccatcgcctaagcgttacttctccactgatcggtgagtttagtgatggccagagctcactggaggacaatggacttggataaccaaaggtcagggcttggtcataacaatgactttattaccgggaaggacgagtcaaaaaataggaaggcctgggaaccctcaggctcgccactctaggtgggtagccctgtgattcagccagtgggattactgctgtgagaatgggaaagttgtttgcttctgggaatgtttgatccactaagtatcctgttggccagttccagtggatgcctgtagaaagtgggccacctcctcccgttccccattggaatctggtccgagttgctgtgttgggg

SEQ ID NO: 7046 - DNA, 1340 bp, Artificial sequence
  DNA replication origin
gcccactctggccgcacttgaggagcacttcagccagctgctgcaccgtgggagcccctctctctgggctggttgaggccagagccactccctctgcttgctgggaggtgtggaggaagaggtgcaagtgggaaccagggctgtgcgccacactcacgggccagcgccagttccaggtggggtgggctcggcaggccctgcactcccagcagctggccggcgccaccggccccgggcagtgaggggcttagcacccaggccagcagctgcggagggtgtgccgggtcccccagcactgccggcccgcccacgccacactctaattctggccaggcctcagccacctccccgaggggcagggcttgggactgcagcccaccatgcctgagccccgcagtgggctctggtgcagccagagcctccccaaagggcaccaccccctgctccgtggcaccaggtcccatcaactgctaaagggctgaggagggcaggcgcaccatgcaggactggcgggcacctccgcccgtggcccctgcgtgggatccactagggaagtcagctggactcctaaatcgggtggggacttggagaactttcatgtctagccggaggattgtgtatgcgcccatcagcattctgtgtctagcttggagttcgtgggtacaacactcagcactctaaatctagctaatctggtggggacttggagaacctttatgtctagctaaaggattgtaaatacaccaatcagcactctgtgtctagctcagggattgtaaatgcaccaatcagcaccctatcaaaatggaccaatcagctctctgtaaaacagaccaatcagctctctgtaaaatggaccaatcagctccctgtaaaatgggccaatcagcaggatgtgggtggggtcagctaagggaataaaagcaggctgccagaggccacagcagtgataggttcaggtctgtttacataatgtgggaggtttgttctttcactctttgcaataaatttttgcagttgcttgttatttgggtctgcactgcctttatgagctgtaacactcacggcaaaggtctgcagcttctcatctgagaacagtgagaccacgaatgcaccaggaggaatgaacaactccagacatgccaccttgagagctgtaaggctcaccgtgaaggtctgcagcttcccttctgaagccagcgagaccattaaccggtaagaaggaagaaactacgaacacgtccgacggaacatcagaaggaacaaaccctggatgcaccatctttaagaactgtaatgctcactgcgagggtccgtggcttcattcttgaagtcagtga

SEQ ID NO: 7047 - DNA, 1881 bp, Artificial sequence
  DNA replication origin
cagctaccttccctccgcccccgggctctgttctcactttccagcagtggaaggacgggaagcgggagccatgcagtccgaatcggggatcgtgccggatttcgaagtcggggaggagtttcatgaagagcccaaaacctattacgaactcaaaagtcaaccgctgaagagcaggtgagtggtgacagctgggcagaggcgcaccgggcggctggggggcactgcgtctgccactctggggcgaggagagcgggtcgcgggagctctgggacaaggacccagtgcccttgccccggagcagagggcgaactgcccctcgcagttgggggccgcgcctgcccggcccaagtgcgcctttaggaagctcggatggagcgcacttcgcgggggcgcggcgggtcgccggggacgaagcgtccaggcgcggggaccctcggccgaggatgccagctgctgagactgattgggggctggggagcgacctggcgcgatgtgggggaggaggagcgccgggccgggacgctgtcccggtgggatgggggagaaagagttctagtgaaccccctttctgaagatcccagcgggttgagggctcggagagggagagctttgggtggactgagatgcgacattggagggaagcaattagttcgcttggagtcacctcttgggagtccggtctctgtggggaaactagcctctgggctcctgcaggtgaggtttctctgggctccgcctctcacctccagaccgctgctagcgggcgcgggaggggccagggcagcggtgggcgtgtccccttgttcaagttaaactctctggaaatagagtcccattcaaatccaggccttacctgcagaggggaaatgagccttggtcttgggggttactgggagtgtaccccgcttggcagagacacgtgtttaattcgctggggacttcagaaactttttagacgaggagtgaagacatccactgctctgatgccccatcccctctagtgcccacttcccttgagccaccctttttgctgcctccattcccacttgtctgtcgaaatggattgggtgtcttccgttctctctgtccggcagccactctggacgcctcgtacttctcgtttacaatgtttcctaaaagggacatggtcaatggaggctggaatagctgagaagggtttatttccacccctctaagctgtgagctaggataaggctatcattggaagcatccagcagggcttctgcactcggctgtaacttcctgccttgcccttcgctgtggatggggcctgggtgaatgggcctggctggcagagtgggagagggtcttgaaatgagggtgagtggagaagggcaactgaacggggagccaagtggtgtaatcttggcctctggcgagcactgggctggttctttttctagtggaaagtgcagccaggtttatttccttcagggctgtggcaggactctttatccaagttggggaagaaaatctgggaacagcggtcctactgactgccattgctgaagactctttgtagatgcttcacggcagattggaaggaaaccgcctaagcagttggacgtataaaaccagcctttagttggtggtttttcctcataatggctgttttgtgtgtgagcatagattgtgtgtgttgggggctgggggttttgagtaatattgtgtgaagggtattgttggttatgctcatcagggctttatctgcattcggctgaagggaccagtgttttactgggcagtctctgcttttgcttctataagcaaatgcttacacggccagaatgagggaatgagtgtgtgtgtggaatcctgaaagaaataaattaaccggactgtttggaacatttctgatgg

SEQ ID NO: 7048 - DNA, 1021 bp, Artificial sequence
  DNA replication origin
agggagggaggaagggacggagggagggaagaagggacggagggagggaagaagggacggagggagggaagaagggacggagggagggaagaagggagggagggaagaagggacggagggagggaggaagggacggagggagggaggaagggacggagggagggaggaagggacggagggagggagggagggacggagggagggagggagggacggagggagggaggaagggacggagggagggaggaagggacggagggagggaggaagggacggagggagggaggaagggacggagggagggaggaagggacggagggagggaggaagggacggagggagggaggaagggacggagggagggagggaggaaaaaaggagggaaggagggaaggagggagggaggatagaaggaagaaaggaagaaaggggggagaatctgtctacatatattaataccctgttatgtcacaactgaaaaccatttctgatttttcagggaatgtgggtttatataccatgtaggaatttctaattattcctattacatatttcccaaactgttcctggtatgggctcttcaggtcatcaaaaggcattgtctccccgcaacagcccctgccacctccaaagcagtttcatttggaaaactttacacatgttcacaatccctctgagatcaacaaagcacattactacgctaaaacctgaaaatcctaagatgcagcctggtataagccagtgttttccaacttattttcaccatagcatagttactgcatggaacaactgtgccgccgaacttgtggtctgaggagtgtggggaatgctggccctggtggtgatgagaccttctggatttaacactgcagtccacatttcaaataccccatctatcgtccctataaacatgactcactctcataaaaatcagaaatcctagttttagagtcataaaatatggtccctattacaattccatgtatttccataaaacccttaaggaactgactcacatagg

SEQ ID NO: 7049 - DNA, 1121 bp, Artificial sequence
  DNA replication origin
gagtggggtgagaaggggggcgaggatgtcaccatattttatcggagcactttacactccacgctaaactttgatctccagattttcagatttaggaaagaaagaggggaaaagggtggaggggaggaagtccagtatttcgaagcacctaccggcctgaggatgggcacattcctcgctcccggtgccttatcgctaggctcgcgccaccccggctggctctttggggacggagaacccctagtgccgcctggggctctccggtgtccctggaccccgcgcccgcggccgcctcgacttacccgcggagtccggggagggagtaggagcgccgccttcacgcccgcggaggaggcgccggcagcaccatggtccccggcgccgctgccgctgcccccggcccgctcgctcgctcgccgcgcgctctcttcctcttacaaactttcgggttctgcagtcgacaagaaaccggggcgaccctcagcaagtcttccccgtgcaggctggggggaactgaaggggacgggacgggtgagtaggccgaggggccaggacagagagggcagcgggctccgaggacccgcgagtgcgcgtggagggaagagaggatgcggctcagggaatccctgcaaggatccagagaccgggaaatcggcccgagccaaagtctcagcaccttccccaggatctcacaaagttgcaacaacaaaaaggaggggggaggaatagggagaagggggtgggatggggatacgatcacgggcgcaaggtttggagttacaactgtttatttagtccttattctcacagggggcgggagctgcgcgggaatggggggctgcaggcagcgatttcgaagcaaacacatgggaggggggcatgcgactttgtttccgggagcggagctccccagagcccgtgtgtgtcactgccagtctcccgggaccaaggcggagctcacaacaggtggggaggggggctcgtcgagggccaaaaagaagaaggaatctaagtttccgagcgcgacgttgtctgaaaaggagggaggcgggaggcgggggcgagggaaggcggaggcagcaaatgaccgcgaccccgcggcaactggcaaactcctcggc

SEQ ID NO: 7050 - DNA, 762 bp, Artificial sequence
  DNA replication origin
tgtttacccagcaggtggatgtgacgtcagggacgcacaacagcaaaaaataacaacatctccctccgcgacgtgttggcctctctcgcgcgccttatttatttatttgttccgggatgtcgggggggaggggggagggaggaggggggtgggcgccagcgccccggcgaacggcaaagagggagccgctcccgctcggggggccgctggagtgcccagcggggtgcgtgaagcggagaggggacccctgcgggaggtagagggtcgggccggggtgcgcccccgggccggtgctgcccgcgcctctgccgccgccgccgccgccaccggcgctggctgggctccgggaagctagtccggagcggaggaatctattgttatttattgtgtggcggttgcacgctgtactcgcggcggcccggccctcgcccgggagtgcgtgtgtgcgcgcgtgtgtgcgcgagtgagtgtgtgcgcggggtgcgcgcgcgggcgggagtgggcgcgcgcggggaaaggcccgaaaacaccttagtttgcaccgagagaccatttgcagcgggtgagtttgtatttttccatttctgctccactttttcccaagccgcctcctgtcttgtttccgccactttaaacaacaacaacaaccagcacaaaaaaaaaaaaagaaagaaagaaaaagagaaaaaaaatggaaaaaaaaaaacaactactttccacctccaggctccacgtgcatctcccccagccctcccctctctt

SEQ ID NO: 7051 - DNA, 1234 bp, Artificial sequence
  DNA replication origin
caatagattcctccgctccggactagcttcccggagcccagccagcgccggtggcggcggcggcggcggcagaggcgcgggcagcaccggcccgggggcgcaccccggcccgaccctctacctcccgcaggggtcccctctccgcttcacgcaccccgctgggcactccagcggccccccgagcgggagcggctccctctttgccgttcgccggggcgctggcgcccacccccctcctccctcccccctcccccccgacatcccggaacaaataaataaataaggcgcgcgagagaggccaacacgtcgcggagggagatgttgttattttttgctgttgtgcgtccctgacgtcacatccacctgctgggtaaacaaccgggctcccagaaaaaaaaaatcgcaattgccaaagaatgggggggggggttggggggagggatccagggagggggaagtgaggggcgtccaggcaggattggaaagaggagagggaggcagagccccgcggaccagagagaggaagggaacgccagagcagtccctggcaacagagggatctggcaggaaagacctggaaaataaggggcaggggggcggagggggagattcctcaggagatgggaaatggggggcccattcagacagcggaaaaaacgagaagggagagtgttaactagggacgaagatgggaatgcgatggctatttgcttggattctgagctaaaaatatgaaagggaggggagaggacaggctagaatgtgagtttcctccagttaaaagtgaaagtgttttgccatcagtgacagttgaaggagagcggggtgggaggtggtgttttcaaccccctttctccctctctcccgtcctccctcggtctctcctctttctttctgcactttgtccaatgaaagaaggcgagttcgggaggtgaaagttcagcagaaggacaaacccctgtttgcaaggaaacagaaaccccgccagccagcgaggggttttctcccctgtttctcggaatcaggagagtgtgaatgtgggacgagcttctgcccccttgtcagagccactgcaggaatgtgcaatcgagtccactttgggggaaggtggctgcatcaggaactgtgttcttgccacgactcctcttaggaaaacgcctgggggctagcatgtcagtccgttgtttaacacaaattacctgctctcccagtgatcagtcacgtgcaaaaagct

SEQ ID NO: 7052 - DNA, 1000 bp, Artificial sequence
  DNA replication origin
ccggggtcccgcgccgccgccgctgccgccgcccccgagccgccgctcggcctgcagcagctgtcggcgctgcagcctgagccgggcggggtcccgctgcactcgtcctggaccttctggctcgacaggtgagggggcgcggggcccgccgcgcacggccccgacccgggtcctgccgccaccgccgctttgtctcggcgcggcccctcgccccggccccgctccgctgtggcacagacctcggcccctccgcgcgtccgcctgcgcaccccgggactcgccccgccgggtcggaagccagcttcgggccgcgccgggcggctgttcggcgtcctcgcctccgggccgggggaggacagcgcagcccgaaaagtttcggcaacactttctaccccttgttcccttccgatcggaacgcggcgtgctggcagggccgtgggagagggtaggcgagctgggggtggccgcgtccctgctgcagggagagggctgtcctgcttaccccgcggggcgcctgggagctcaggacacgacctcagctgtgacagcgctcggaaaagttgcccatcccttgggaggtgtgcggtggtgcaatgattattgcacggcgggcgctcccaccccgtgtccggccgctgctgccgtggactcctcttccagttcttcctcatccactgggcaggtatttcctgaacacctacagtggagccacacacctgctatgcgctggagattcaataatgagcagcagctgaccttgtcaggaagggggtgaattatggctttctcaagggacaacccaggtgccatcttttcagaaagaccccctgactaccgtatctaaaatagaaaccttgctccctcgttttgtattctcctgccctgccttctttttcttcctaatgcttaatgcagctggattttattatatatgaatttgtttactttcagtctgtctccccagctcctcaacacctcccctcagttaaggataaaagag

SEQ ID NO: 7053 - DNA, 1199 bp, Artificial sequence
  DNA replication origin
tcggggccgtgcgcggcgggccccgcgccccctcacctgtcgagccagaaggtccaggacgagtgcagcgggaccccgcccggctcaggctgcagcgccgacagctgctgcaggccgagcggcggctcgggggcggcggcagcggcggcggcgcgggaccccggcggctcccgggccccggcggggggcgcggcggccgggggcagcgccattttctccgccccgcctgcaaggccggcggacgcgcggaccgcggggcgagcgcggctgagtcacccccggcccccgccccgccccgccccgcgcgccccgccccgccccgggctagccgcccgccgcccgccgcccgccgcccgccgccttcagggcctgggagccgcgcggaggggccgtgggaggcacggccgggccggggccgccgaacaaagacagacccacggagggatggggggccgatcccgctcaggcgcgggcccagcgtgggagactgacggcctggcctggagtggcggccggggacgggctagagggcccacgggggtgagagggaccggggaacggtctgcgggctggctctgcagccatgcaaaagggcagcgggatggagcggcaggctagggacagatggagggatggatgggacaggggatggagccccagacccacgtggtgcgagggaaggagggatggacagacataccagcagtcagaaggatggagtgaaggctggcagatggctggaggagagaaggagggatggagggcagatggaagcacagttgggtgtgacagataaatggagaggggaaccgatggccaaatggataaagagactccagtgcccgcgagtacagaacaaagggcgagaaagaagaacgaacaagagaaccaccgactggggcatgaggttggagcaggtgggctttgcattcctcttggtgagagcatacttcctaactccgctgatttgaaggggccagagcccccatcccaacctctggagctaccatgtgaccacagtgaaggcctcaagcctggcttaacgtgtggctaacttcagagaacatttcccaaaatcagccaaagtatccagatctgccctaaagcaccggcgagtcgggaggaggaaagcgggcacctgtgaacacagagcgctctgcttcctgtacctctgagcacccaggaagtcccttaggcgg

SEQ ID NO: 7054 - DNA, 1270 bp, Artificial sequence
  DNA replication origin
ccggcccctcctgggctccccgagccgccgctgtgccgccgccgccatctcaggaatggtgcgcgcaggaggaggcggccactccctgcgccctaggcgccgcgggcttcactgcggacagggcctcgccaccgtccgcagccccccgcatcctcctccgtctcctcctactcctccgctgctgccgccgcgcctcttggctctgccccccgccgggcccgccgccgccgctgccgccgctgccgccgccgccgccgccgccgcggagccccctcccctccgccggagcgcgcagcgcggccgccgccgccagccccgccgaggcatcccgcaccgcctgggcccggctgggctgggggcgcctccgcagcagccgcggggtcgggaggcggccgggagggaggcagggcccaggacgcaaggtggcgacaagtcgcgtttggccccaggtaacgggggtccggcggcggcgcccgcgctggggtcacggtggccgtgcgcgggggaggttgcctgggctggcagggtcgggaggcctcagaggggacaggaatatctggaatgagccttctgcccgaaagctgggagtaatttacgatagtaatagtcatcgtaatcctaaaaccgctgatactcaggtgcgcactgatgtgggtggcagtgtgctggggagcttggcaagcattatctccctcaacagtaatcacgaagttgttgccatccttaatcccactttatacctcaggaagcagaggcttggaggtcaagggagttgagagccgggaagtagcggagctgggattcaaatttcgcttggtctgatttccagtgctggactcacagcgactccgcagcatcccctgctcgctaactcatccgtgatcccggtgaaggacctatatcagggaaaagaaatgcagcatttcatctttaagtgacttggaaggtgaaccctatgccaccttcctcccaggatatctattttctgggtaagcctgaaagggcagcccctgttatgattctcagacacaccgcatttgtctcgcaggaccttgcatgtgctggtacctctgcctggaccagccccacaacaggctccctctccgtagggcctccttctaacccgtctgttttactctgtatccctgccctctagtcatttccttcttagcacttataatttgtcattatatactttcatttctttttaaaaatcatgctcttctaactaggctctaagctctttgaaggcaagggatcatgcctggtt

SEQ ID NO: 7055 - DNA, 1379 bp, Artificial sequence
  DNA replication origin
ctacctggccatcgcgcaccaccgcttctatgcagagcgcctggccggctggccgtgcgccgccatgctggtgtgcgccgcctgggcgctggcgctggccgcggccttcccgccagtgctggacggcggtggcgacgacgaggacgcgccgtgcgccctggagcagcggcccgacggcgcccccggcgcgctgggcttcctgctgctgctggccgtggtggtgggcgccacgcacctcgtctacctccgcctgctcttcttcatccacgaccgccgcaagatgcggcccgcgcgcctggtgcccgccgtcagccacgactggaccttccacggcccgggcgccaccggccaggcggccgccaactggacggcgggcttcggccgcgggcccacgccgcccgcgcttgtgggcatccggcccgcagggccgggccgcggcgcgcgccgcctcctcgtgctggaagaattcaagacggagaagaggctgtgcaagatgttctacgccgtcacgctgctcttcctgctcctctgggggccctacgtcgtggccagctacctgcgggtcctggtgcggcccggcgccgtcccccaggcctacctgacggcctccgtgtggctgaccttcgcgcaggccggcatcaaccccgtcgtgtgcttcctcttcaacagggagctgagggactgcttcagggcccagttcccctgctgccagagcccccggaccacccaggcgacccatccctgcgacctgaaaggcattggtttatgagggaggccccgccacatagacccccaacccagcctttccctttggctcggacggtgacgttgtatcttttccttctggcccctgtttaattttctaagctgccttcaaaatgactcgaagtggacagacacttggattgtactgactcctttgggggtggggtgggtgaggagtaggatgctcagcccactccagctccgcacattcgtcctcctaactcgactttcttcctgacaataggccctgcagtctttttgtagcggtactgacgtcttttattccatgtgtggttcctttttttctttttctataaaggctgtactaattttcttcatgcaacgtttcctaaagaccatggccagttttctacagaagctatttttgacaacctcaagtggcattacattttgcagtgaagtagaggaacctagggggacttcttcacaagttagatttcttgaggatcttctgttggaagcaggagaaagtggggggtggggggaagttgtccgaaatgccctctgaattgccggctgcagggtccttgtgctgcgctggttctttgaaagtctcagtgttgatattgaacttaaagagcagagatggagat

SEQ ID NO: 7056 - DNA, 1036 bp, Artificial sequence
  DNA replication origin
cggagggaacggcgcagagcggggcgccccgccgggagcgctgcctgcgtggcgcccgaggcgggggcgcggggggccgcgcatagcacgtgctcgtctgggagccggccgggccgaggcgggcgcgcgtgtgcgcgtggggcgtggggtgtgtgcccgcgccgtgccccccgcgtgtgctgccgggcgggcgccggcgtgagtcacggcggggctagcctttataacggcccggaggctcgcgggagccgccgcgcccgtccgcccgccgctccgcgctccacccagcgcacccgggccccgcgcccccaactgcctccggcggccgcccagtcccgagggcgccatgaggagcctgtgctgcgccccactcctgctcctcttgctgctgccgccgctgctgctcacgccccgcgctggggacgccgccgtgatcaccggggtaagcggcccgggcgcacctgtctgcccctgatgcgcgcctgggatgtgcccagggggcttgggacggggaccctgaagggcaggctagaggcaaagggagggtcgccctgggcggggacacctgcccctgtcgccccttggtgcacttgggaaaatacccagatccaaaagcagcagacggctggggacactgggcgcgtcctggaagaaacagtgacaaggatgtcgcccaccacctttattaccaccttctcccgcttacttctccctcatcacccacggcctcactcctcgcatttttcttctgttaggctgaaagaagtttctctctgagtcttctcaagtacttttggaggctctccaacctcgaaccttaaaatttgacggccccttcctgaaatgcaaaggaccaagacgaattccccaagtgcccagagtcttaatcctacagtcaaagagtttgctccccgatgcgtcctccgcagaaaccctttgaaatcgcttggtccagggccatgtgagcgctttgaaaagcaattgtgggagcttccttctgggttccggggctttcccccgcgctcagggtcttgag

SEQ ID NO: 7057 - DNA, 1284 bp, Artificial sequence
  DNA replication origin
tccacaagtctgtcacttgctactgtttctacttactccactgtgagtccaattttaacatttttttaagttgaaaaaagggtttgactccttttgtgttttctgttcaaggcgttttttaaacatgagaacacgtgtgaaaaaggtttttaaaaatcagccaaagattggggtttccaaatattcagctgtttaacattcagataattgcctgccttccccccgctatcccccacatttcgtctgaatgctttggcacgggggagccccacagtctgaaagtaactctgtcccaactctccttactgcatttattaaagaggctgaaagacgcatctgcttttcaatagtttgcggttcttaagagaccaggaaagccagaggttctgactattcaggaagaaagttgggtttcccaaaacgggcaagcaagttcggtgtggtcacatctaggtattcttgacgtcatttttgttgagggaaacaggctgcagtttttggagccaggctaggatgagagatggagggcaaatctgtcacttattctttcctggtgtgcctggaacccactagacactcaattcatgtttacgtgaatgaaggaatcacaataacgccctatcgcatctgtaaaaccgaagggtgattttcctgggctggaaagtttaagaaagaagagagagctgcgtacctagggcttaaggggcctcaggctggcactcgaaaccaggcgttctcatttccctttggcatcaccctgaacggctgtgcctggagctggcgcggggctgaagaggggaggaaatacatgtgaggaaaatcagaggagagggtcgggaacagatgtgggcataaagggaaggcctctgacttgaaataaacaaataggagtcccgcagctggaaggacaaatcctttcacgtcgcgggtgatgtgggattggggcgattttgctctccctttgttctttcccctgccttccacgtttccagggtatttgattgatgtctgtcttctctgttaagttattccaccgtgaggagagagccggtggcagtacctggcacgcagcgggcgcccagtatagacctgctgaacaaacgaatggattcaggggctgctgtgtccccctcacccaccccccgccccctatgtgtccacagcgccccgcacgtagtaggcgacccctaaacatctgtacagcaaatgatttgcaagttttcggcgctgagcacgtggagctttggaaaccaggacagcaaatgagtgtctcggagaccacaa

SEQ ID NO: 7058 - DNA, 1123 bp, Artificial sequence
  DNA replication origin
tcgagcagaaagcagccccagtcagcctgagatgaacagctctcccctcgggcttagaactcccagctgcttctctgagctggactcctgccagtgttcacccaggtaacggaattgcctggggagccctgcttgactccagggaagccggcggggggggcccccaggcagagaaatgaagtgagcaagacacctcccgtccccagccttcccccgctcatccctctcctccagaggagctggaaggaggagttcctgcagaaagagtccacacccaggaggacactgtgctcgggcttatgccaggaggccgccccctaccccagcaagggcggcgacaggaggcggaaaccctgggagcagagggggaggggccggcccaaggagtgtctgagcgccttctcccaggctgcctggaacaggatgttccaaaacgaggaggctagccaagaagcagggcgtgtgtgcgtgtctgtgtagcgtatgtgtgtgtgtgcgtggtgtgcatacgtgcatgtggtatatgcatgtgtgcatgtgtggtgtgtgtgccctgtgttgtaagtgcacgtgcacgtgggagggtgtggtgtgcgagggctatgtgtgagtgtggtgtctgtgtgtgacgtgtggcatatgtgatgtatgtggtgtgtgtgggtgtgtatatgcatgtggtatgtgcacatgcacacggtgtctggtgtgtggcggggagtgtttgtgtatgtgtggtgtgtgtgtatgtgtggtgggtgtgggtctgtatgtgtgtgatgtgtgtgggtgtgtatgtgtgtatatgtggtgtgtgggtgtacgtgtgtggtgtgtgggtatgtgtgtggtatgtgtggtggtttgtgactggtgtgtgtatgtgtgtggtgggagtgtttgtgattgtgtggtgtgtgtgtgggggggagggactggcactgtggaacaccaggacaggatctgagtgtgggtgggttaggttcacctatgtagagcaaggcggaagtgacgaggaagtggaggagcaagaggagagggaggaaaaggaagggggaagcgagggaggcaaaaggaggaggccagcgattgcaggggtatctcatactctcactctccccta

SEQ ID NO: 7059 - DNA, 1408 bp, Artificial sequence
  DNA replication origin
ccagcgcgcacacactcccgggcacgcacaccgaccgcccggcccacgtccgccacgccccgccttcccccgcgccccgcctccgccctcgcggcgccggccgccgccctcccattggccgcacggcgcgtgacgcgcggcgccaggccccgcccctcgtcagtcactcggcggaggcggcgctggcggggactagtctcgtccggagactgtgatggatttaaccaggtggggagggagggagggcgcgagcttgggagtggagagggaaggagccggcccactccccgtcgccggcctcgggctgcccctgcgcgccccctccagatccggcccgcggctcccctcccggcccccccagccccacgctcaagtccacaagtccgcccgcttcctgcgcccgccgcggcccttcccggggcgccgccgccaccgcctggtgtgcgaggctatccggcccgggcccggggcttgcagggtgccagtgggggcgcccggttcccttcctcgctctctcttccagtccccggaaagggtgggtgggtggtctcccgagcgaagtttccagcactggattcctgcgaaattacgacggctcacccgcgtctgtgttttgctgtctctcccccgttttcctgctccctgcctcttccctcccttttcccccactctccactcctcggaaggccaaaaagacaagcgaaacctgccgcagacgaagggttttgggattgtagcgtctgcaccttcagaaacagtgctgaagcctttaaatgcagcatctgcgatgtgaggaaaggcacctccaccaggtacttgaagatctgtgttaccttttgttaaaggactttttttttttttttttaagtgagagggtagtgagccttactttctgccctttttccaacttgttgattacggctttttttgtatttgcgggtgggttgtgtgtgtttttgggttgagtgtattaagtgttgggtgaaaagccttgtgttcgctaaatgatttatgggagggaatttttccaggttttcattttatttcaaacggacactggatttatttgacacttgtgtctattggcttattggtattggctggggaagagaggaagcagtactatcgctatggattgtaggacatagatgttttatatttttgccatgtgtagaatggttttaatttgcctgtcccgagttacttttctcttgtctgagaaatttagtgggggtagtaaggctggctgtgcttttcctgtcttgagctgcaaatgtctgttactttcttgcacttgaaaataaatgtcggtatttgataaagtaagtgcattttgtgggagactgagctgtcagttttttttttctttgactagcttatgtggggtggtgatgggggacgattttgt

SEQ ID NO: 7060 - DNA, 1750 bp, Artificial sequence
  DNA replication origin
tcccaagctcgcgccctccctccctccccacctggttaaatccatcacagtctccggacgagactagtccccgccagcgccgcctccgccgagtgactgacgaggggcggggcctggcgccgcgcgtcacgcgccgtgcggccaatgggagggcggcggccggcgccgcgagggcggaggcggggcgcgggggaaggcggggcgtggcggacgtgggccgggcggtcggtgtgcgtgcccgggagtgtgtgcgcgctgggggcgcgcgtgcctgtcggtggccccgcggcccggcgcggcggagcgtgcaagcccggcggggcgcacgtggccgcgcccgggagctggcaactggcttcgggccccgcacggcgccccgtgaggctgttgccgggaccccggccccgaagccgccccggggaagtagttccacgcagtttgcgcgcgccgcgggagcttgcaacagcctcaccgctcgcagcgcctcgaggcttgcagtgcccaggggccgacaaggtccacctttggaccgcgttcccccgcgcccctctgttcctctgccatgcggagctttgtatttgcctcttctgaagtccctgcgtccggccgagacgctggcccgaagccccactccctgtcaggcccctgtcgcgggagggaacagtagagaaagggcgtggcataactaaatgcccccaggccagactctgagcttctgctggcggactcctcctgggatcctcctctcccctagagtctaaatagggcgtttccttagggaagttgctattcaaattctggcgaccacatgcccgcattaaaacctcgtgcctcagctccttcatctccaaaatggggctcatcctcccagggttgttttgaatattcggagaaatcaggcatggaaggttcgctgatggatgcctggtattcacgaaggaccaaaacaagatattgggtattaggagctattataactgggcctgaattgtgcaccatttcccccgcgttcgatttttgaagtcgaggaacagggtagtgcccttcactttctgccctgctccaaaaacgcttgccaaattgacttgaacgtgactcaggaccctctgtcctcaggcagggagatctggtaggaggacgaccccagatgataaaagacacagacgcggctgtgctgaagccccaggttaggggagggacggagtcttagaatgctgctaggagttggggcccgggggtggggggattggagttaagacagaccctcagccaggtttatatgcaaatataaaataggttgttatcaggactgccccatggaagggaagcatatcagggcttgccaccagggaagctcactgagactgagcacccagggagcagaaattcctagagatcagtccagggatcagaagggagagaataaaagagagaatgaatgtgtcaacaataagtttgatcagcacgcagtgtcctctccaggcaggcgcacccaggagggccaggagaagcaacactgtttagcaagggtcagcaacctctcaaggcctcaatgccacagctgcctccttaggggagggatgaaagaaggaagaggaagagagagggatagcgttctaggggtaaaagggccgtagaaagccaaagggtacgtacacaagccatggcccagtgcagctgcgccatggagcagccttggcctctggtgtctccctggcatgctcccaggactctgcccctggcatgaagg

SEQ ID NO: 7061 - DNA, 1007 bp, Artificial sequence
  DNA replication origin
ctagacctgcccacacctcctagctgaccccaccataatcctctctgtgaggatgtagggtctttgctcttctatcttccatggccaactttgggacctctgggtttgtatgaactccaactgtacacttctgaaaaactagggaactagactgagctagggactctctttctcatggactccattatgccatcccaccccaattttatcatcttctttctggtcacacagaggaaagtcagcaggtcctcccattaggaagtgaaattccaatcttctttacctatggatactgctagtcattagcaggatactctctgggtctcctctcctttctttggaggtcacaacacactttgttatcaaaaggaaaggaggaaggaaaaggcttctcttcaaaaatactgcactatcccaaaatatgaggtcctctctccacagtgctgatggtggtggtggtgacagtgatggagatagtgctggaggtgatggtggaaatagtgatgatggtgatggtgatgaaggcattgacggtggtggctggtggagatggcgatgagggtagtggaggtggtggtggtagaggtggtaatgatggtgatggtggtggatgtgatggtatagatggtggtgatggtagagatgttgatgatggtgatggtgttgaaggcattgactgtggtggctgtggtggagatggtgatgagggtagtggaggtagtggtggtagaggtggtaatgatggtgatggtagatgtgatgacacaggtggcagggatggtggagatgctgctgatggtgatggtgatgaaggcattgatggtggtgagggtagtggagatgatggtagtaggggtggatgtgataatacagatggtggtgatggtagagatgttgatgatggtgatggtgatggtggtgaaggcattgacggtggtggccatggtggagatggtggtgaagatagcggaggtgatggtagtagaggtggtaattgtggtaagagt

SEQ ID NO: 7062 - DNA, 1343 bp, Artificial sequence
  DNA replication origin
gcgggaggggcgttgccacgttgagcaccgacacttgagaagtgacacggcttcgtttgtacacaaaccatcctgcatggtgtttaaaaacaaagggcaaagtcagacgttgctcgagggcccggaaagccaactgcgaagcaggcgggcagctcccggatggccccgcgttgcccctgctcccacgctcccggatcagtgagaaagcctgcgccccgccctgagagccaacccgctaatccgcggcatcgtccaccaatgtgtctaatgaggtggcataaccacccagctctccccggagccgcgcagggcctcctggctgaactagcgggtgtagctccgtcgggtcctcgggcgtcgcggggcggggcggggtggggccactgcgcgtgcgcgcggaccgggcggggcggggcccagggcaggtgcctggaggagggtctcccagcggcaggggcagacgccaagcttgctgaggctggagtgtatgcttaatcacagtcgactgaggggctgtttaagaattgtaagaagctgttccaggtgaagttctgagcagagctacagaaggtcgcggtctggaagctgctgggaggagaggggcgacatcagtggctttcgttgggggaaggcacccgcaggatttcctgggatggggaaacaataacctggaatacgaggaggctgtcctagaagagtcagattgcccactcccatcccacccccatccccaagctgatgaaattggcgcgaagcagatccctaaattcacaagcttatctaattcctgccaataacacagtatttctgtttctgcggatacctggctctcggggcacattgaagcttcacctggagaggatggaacagagaagacgatcaaaaacagggccttcctggaaccaaatgccaataacagccctcaggtgcctagctagccctttacagattgcaaagggctttcttctaccttgcctcgttttcagcaggggcaggcaagtgatcccattttaaagcgaggaacccgagagagctcaggcttttcccaggttgggcacagggtgcagtgggaactaaggactcagtgagtaggggtcacccagggagccatggaagatctcccaaagaaaggatgaacaggagttggatgagcagagggacgttagggtggggtgttcatgtctcaggtggagagatgtggtgggtgagggaacaagattgctcagggtggctgaacacgggagggttagcagagctggggaattggggggcaacccacggaaagacacatccacttgtgggcccagatcagcattgtgtcacattaagaaaaagggagaact

SEQ ID NO: 7063 - DNA, 1287 bp, Artificial sequence
  DNA replication origin
cgggtgtagggagcgagacacgggtccgcagatgggattctggggttgccacgactcacctcgccaacttctccagtctcgcagcgccccggcggcccgctcgggggcgcggacgcgggggccggcgcctccgaactcccgggctggccccggggagggcgcccggccccggccagcgcgcggggacaggcgcggggtggcgctgcggggcggacgcggggcgcgcgggcagcgctgggggctcagcgcggccagcgcgcagggacagcagcgccagcagcagcgcggccagcgcgagcaagagcagcgccgccgccttgctgcggagcttcatggtgcggcgcggcggcggcggcggcccccaggcggctcggcccctctgcgcatcgcggcggcggcaggatgagtgcagcagcgcgcggcggtcgcctcctccgcccgcccgccggggactggggtcgtggcggccggcgggcggccggcggcggcggcgacggcgaaggaggaggagagagaggagaggagggggaggcggtgagagctgggttacaggaggagcagcctgcgcctaccgtactgtgtggagtagccgcccctccgcccgcccgcagccaggctctcgggcttctggtagctcagactcaaaaccacttcattcattcattcgttcgttcgttcgtttacttccccattcactcacacacccatgccatccactgttcccgctgattctctcataccatgattcacttatttgttgatgtattccatgtgcttcctccttatttattttatccatctatccacacatttgtgcacttatccacacatcctttcaggcaggaacatctctgtcctgtttgcccagtgcagggatctgcgggtggtggtgcccaataaatatctgttgaataaacccctattgccgcctctgtcttgccacctccctttttcctggaggaggacatattcaacaaggacacatgcaaaataaggcaaagcgagtaaaagtaacacgtgattagtagttggggtttcagactcaaaacaccaaagtagaacttgggacagctagactggaccgaaccgatccatgtagtctgaagaaattagagaatgaatttcaaagtttggatttgaaatctgacactgtgcttaactggcttggtgatcctgaggaagctgcacaactttcttaagccttaacttccttacgtgcaaaatgggaatgacaatactgctcactacagaggcgttttgtgagcattaaattaaataatgccttca

SEQ ID NO: 7064 - DNA, 1174 bp, Artificial sequence
  DNA replication origin
gggagcgtgcgcgcggtgacgtaccgggcgccatgttggagggttggtggtagcggcttggggaggtgctcgctctgtcggtcttgctctctcgcacgcttcccccggctcccttcgtttcccccccccggtcgcctgcgtgccggagtgtgtgcgagggagggggagggcgtcgggggggtggggggaggcgttccggtccccaagagacccgcggagggaggcggaggctgtgagggactccgggaagccatggacgtcgagaggctccaggaggcgctgaaaggtgggggtagctgccccctctccattccccctcaccttctccggctcgctcttctctcctttcagggcggatggttccgaggaccggggccgggcgcggcgtggggagagtgcttcccgggctcccatccccctccacctccccaggggcggggagccctgtgggcagctctctcccgccccgctctggctttgtgtcggccgccggcgtctgggctgggggaggggagccggggaaactcttgcgggggccccagtctttctcccacccgttcaggggacgagtggcggacccgcagacccctccctcccagatatcctcttttctccaccaggctacccgtacgctaggcgttggggtgggagaaaaagtaaacggttggtgggggcgggggtagggggtagcatcgcaacttttaagttgtctcagtatgcctttttcagggcttttgaagtcatctttccgcgccctaatttcgaggtggttgccttcactgttcttgattgcacgccttccacgcaacaggcttgagaacagtggcttacaaacttcgagtagagagatttcagcgttttgagaattattctttgacattcagaatcatttggggacggcaacttggggtagttggtgcttcttagaaaggcagatttatggacttagatgaacaattggtgggagtcggggcctggggatttttattttcactggattcccagcttaatataatgctggtgttcccccggaccacacttcgagaagcactgcgttaaaaatggtttgtgaagttgagtgccccctttaggaggattcttgttatctgtaaagagggtgacatgttggaagtagaacttggaggattgaggtggtaatttggttgagaggcct

SEQ ID NO: 7065 - DNA, 947 bp, Artificial sequence
  DNA replication origin
agtttcaaaactctagctatggctgacactgctgattatcaacacagcagcctggcacttctcccttctgccctataggcagcatccacttcccacaagagaaatggaaaatgctagatactcacttgcccaaccttccttgcaactagggacagtcgtctgattctgttccaccaatgaaacataagtgaacacgtgcagcggtagggaggtatctgggatttaaagaggagagggagcgagagagagagagagagagagagagagcacaagagaggggagaagagagagagggagaagggagagagagagggcgaggggggaaagggagagagagagagggagagagaggagggagagaggggggtagagagaaagagagagagagagggagggggagagagagagagggagagagaggaagagagagagagagagggagtggggagagggggagagagagggagaaggagggagagagagagagagggagggagggaggggagggggaaggaagagagagagagaagtacagaaagagagagagggaggcggggagagagaggaagaaggaaggggagagaaacaaagagaaagagagagagatgagcaagtagagcatgtttatcctctcctccttccttccatctttgggcattcctgcgttaggatataagcttggagctgtaggagccatgtttaaaccggggggggtgggggcggggagaagggtcaaaaactgcagagacataatgccccaggaccacggcattaaggacctgctgaaccaacccggtaattcctaacttcccaatgtcttgttagaagaaacagaaacgcaaattaacgtagccactttcagatgctattttctttctggtagtcaaaagtatcccaaataatttgttgtccaaagtcatctctgcccctttttttcgtattttgtt

SEQ ID NO: 7066 - DNA, 1504 bp, Artificial sequence
  DNA replication origin
gcgcgtacgcgacgcgcggctgcggccgggtggtcaagctgcagcagctgccggagcacctcgagcgctgcgacttcgcgcccgcgcgctgtcgccacgcgggttgcggccaggtgctgctgcggcgcgacgtggaggcgcacatgcgcgacgcctgcgacgcgcggccagtgggccgctgccaggagggctgcgggctacccttgacgcacggcgagcagcgcgcgggcggccactgctgcgcgcgagcgctgcgggcgcacaacggcgcgctccaggcccgcctgggcgcgctgcacaaggcgctcaagaaggaggcgctgcgcgctgggaagcgcgagaagtcgctggtggcccagctggccgcggcgcagcttgagctgcagatgaccgcgctgcgctaccagaagaaattcaccgaatacagcgcgcgcctcgactcgctcagccgctgcgtggccgcgccgcccggcggcaaggtaggcgcctgctgcccgccccgacctccagccaggatccctggggacccagggccccgccccatccctttgggtacagggatgccccgagcttcccgggaacatccttgcttcctccctcttcttccactgcttaccagctgtatcactacttgcaggtcgctgaacctgcctgaggtggaacactgtggtcctttatagtctagacgtaaccggtaaagtatagctgtacagcttcagggattctggaaggacgaaaaagaattcacaagcaagtgtaggataagaatgaagaatgcagctccagagtcaaaactgcgttcaaaggctttgctgctcagaccagctaggggatctcgggcaagttgcttaccctctagaggtcagaaacctatagactgacacttaggagaggagagatggacacattgggtgaattgtatccgtgcatcctctaggattccagaaaaaaaaataaagggaacccacagccagtgtagattaagttaagaaggatatcagaagagaggcctctggggtaaaagctggatgcaagcgtgggctttgcagccaactagctggctgaccttgagcaagctgcttaacctctctaaagttggaaactatggtccctagagacgtggtatacagagtaaaaacacagccaggcacccctgaggtattcatccagggatttcagaaagaattaaaggagcactctgcccccaacaagtataaagtaataattaagtgtgagtcctctggagttaaaactgttttcaaatctgggctttttgctgaccagctgggtgagcttctggcttaattcccagatccctcagtttccctcagtgcgaaaggtttttgtcaggcttcagggagagagtttagtagaagggcctcgtactgtgcctggcagagagtaaataaatgctcaacaagtgttacctagaattatttttaacatctccacctgagcggtccccttgagcgagggtttactttgctccaggctgggtgctgca

SEQ ID NO: 7067 - DNA, 1418 bp, Artificial sequence
  DNA replication origin
acagcgcgcgggcgcgaagtcgcagcgctcgaggtgctccggcagctgctgcagcttgaccacccggccgcagccgcgcgtcgcgtacgcgcacttgatgtccagcttgaggataaggcgcttgagcggcaggacgtggttgagctctttggccgacaggcgaccgcggcagcgcgccgggcagctgccctcctgcaccacccagggcagcacgcagccggcgcagaagacgtggccgcacggcgtggtcagcgggtcctccaggaccttgtggcacagcgcgcacttcaggtccgggtccacgtcgccgtcgaagcggtccagctcgaagcccatggtggcggccaggccccggggtcgccgccgggcggccgggcgccccctccctccccacgaggcggcccagacaggccggctacgccgcccgcgcgctcgctggctctccccggactgagcctaattgatccagacttcctcggaaaatgcccgaggaacaggactcctccggccgtatttgcgcgagcgcgagcgcacatacatcgtgccttggatgcctcccgccagccccccgaaaaagggaggaggctggaaggcagaagcgcgtgggaggacactgaggctcgccagaagggacgggccagcccaggacgccagcctgaatcttctcgggaaactcctttctgttctcttacagtctacgctataggagacaaaacgccagccgagaaaagctcgctgagtttggagctgaggctactgctttctcccaagggttctcttcgagccccttcccgaacggatcaaaacttttttactcccttctccctcccccttcctctagtggctgattgcagaggactaaaaatatcttggggcccgctatctcagcacttacggtctttatttatttatttcattccagggaaagttacagagcctgcgggaagctccggctgcaacttcagttctgaccagaggttctgtgaaccttcaggatttagcaggtttccaggaccggtgggtgaatctacccggggaagttttggtggacaagagctgctcgccagctgtcggagtgggagaggccagcgtgctggctccatccacttcacctaacacctctgaagtgtctgccctgcagtgtggcaagcgtggtgctgagcgcttctaaatccgtcgctttaaagatcattagtacaatgttgtgagagggttagctccatttgaaaattattttcccgtgattacaaaagaagcgatgctgactgcagaagttagaactgggagaagactcatcacccccatgatcatgtcaacaactgccctccttcagttttggtttgttttgtgtgtacactctgtcatctttccattgaggaaactcaggctagaagaaggataaaaacaaaacagaaaac

SEQ ID NO: 7068 - DNA, 1091 bp, Artificial sequence
  DNA replication origin
ccgccgcccagggccctgcggaggccggacacacgtgggtgcacgcggccgagcgcagggccgcgcggggtccggccggcgcagaggcgctgggggcgccgcagacgcgaggctcgggacccagttggctgctccgccgcgctccccgcccctccctccctccagtccgcccggtctcccctccctccagcgtccgcgtcggagccggagccggagccggagtggcggaggcacgggcagtgctcgctaggcgccggcagcagccacagcagcctggcgcttggcggcggcggcggtggcagcggcgggcgggctggcgccgtggactgggccgggaaccgtgcggacgagggtgctgcgcctgcggcggcggcggcttacgcgggcgcgcacggcggccccccgggcccggactaactgcggcggcggcggtggcggcggcggcggcggcggcggcggcggcgagtgggccgtcggggcgggcgtctggcgagctgcagagaccaggtaagtccgggatgcccgactcctggcgccggccgggccacagggatgagccacctgccagggcaaactttacgccctggcttcatggctcctcagccccgaagtttgtttgcagggaaatgcacctgacgggtcgagaataaaagatgcttctctcatcggacttgctctggggagattatttttccccttctggggcgaggattggtttcgggttgggaaggctgcatccccagctggagcgctgaaaattgagtggtaggtcccttgggcttgcccttcgcgcagtggatttgaccagttaaagttgggggaaaaaagttgtgactcctagggatgctgaggaacaattccaggtgcatgatgcagaatgtgggaatgtgatacctctttgctggaaccaccccccaggcccagattcccaggtctgagaaagctagggtggccgattctttcattagcgatcaagttttctaagctgcattttctttctactcacagatcagcagcttgggacggagttccccgtcgcgtttatttgtcaggtttaccctgctgcgctgtagtccaggtttcctgagctc

SEQ ID NO: 7069 - DNA, 1129 bp, Artificial sequence
  DNA replication origin
ccgccaccgccgccgccgcagttagtccgggcccggggggccgccgtgcgcgcccgcgtaagccgccgccgccgcaggcgcagcaccctcgtccgcacggttcccggcccagtccacggcgccagcccgcccgccgctgccaccgccgccgccgccaagcgccaggctgctgtggctgctgccggcgcctagcgagcactgcccgtgcctccgccactccggctccggctccggctccgacgcggacgctggagggaggggagaccgggcggactggagggagggaggggcggggagcgcggcggagcagccaactgggtcccgagcctcgcgtctgcggcgcccccagcgcctctgcgccggccggaccccgcgcggccctgcgctcggccgcgtgcacccacgtgtgtccggcctccgcagggccctgggcggcggcgcgggctgggcggcggtcaccgtgtcacctccgggtggcctcgtgccacgcagttagggccctcggaacacggggttaaggcaggaattccacttctagaaaagcctcctgcagctgcgctcccacaagtgcgcaaagattgccaattttaatattaaagcggataattattaagggctcactaggtagcaggtcgtggactgcgctaaatcaattagttcatgcagtccccagagcaacctggatctattattattcccggatttagtgatgaggaaattggtttgcttaaagtttcaatgagtcagttgtgagaataatcgcaactatattctgtcaaggaccctgtgaagtagatcttaccacctttatttgcccaagtatacacacagtggtgggttggagaacccggacttgaataagcctgttgcagtcctgagcctttgcgctgaaccgctggtgacttacttccagtcaaacccgtgcaaacactgcaactttagttgtacgaaaaacagttgggaacaacctacctgtccttcattaggagagtggctgataaaatacagtggagacatacagcggcagagagaaaggtgcatctactagtattggcataaatgacctccaagaggtatccttagaggctgggcggaggtgggtcactcctgtaatcccagcactttgaga

SEQ ID NO: 7070 - DNA, 1195 bp, Artificial sequence
  DNA replication origin
tttatcaaggttcttagcttccttgcactgggttagatcgtgctcctttaactaggagtttgttattacccacgttctgaagcctacttctgtcaattcatcaaactcattctccatcaagttttatgtttttgctggagagtagttgtgatcacttggaagagaagaggcattctgatttttggaattttcagcttttttgcactgtttttccctcatctttgtggatttatctacctttgacctataagactgatgacctttgcattgggtttttgtgtgggggtcctttttgttgatgtattgctttctgttagtttttcttctagcagtcagtcccctcttttgcaggtctgttgcagtttactggaagtccactccagaccctgattgcctgggtatcaccagtggaggctgcagaacaacaaagattcctgcctgcttcttcctctggaagctttgtgtctggaattggtgagttcttggtctcactcactttaagaatgaagccgcggaccctcgtggtgagtgttaagctcttaaggtggcgtgtctggagtttgttccttctgatgttcggatgtgttcggagtttcctccttctggtgggttcgtggtctcactggctcaggagtgaagctgcagatcttcgtggtgagtgttacggctcttaaggcagcacgtctggagttgttcgttcctcctggtgggctcgtgggctcgctggcttcaggagtgtagttgcagaccttcgcggtgtgtgttacagctcttaaggtggcgtgtctggagttgttcgttcctttcggtgggctcgtggtcttgctggcttcaggagtgaagctgcagaccttcgcggtgagtgttatagctcataaaggcagtgtggacccaaagagtgagcagtagcaagatttattgcaaagagcgaaagaacaaagcttccacagtgtgtaaggggaaccgagcaggttgccactgctggctccggcagcctgcttttattctcttatttggccccacccacatcctgctgattggtagagcctagtggtctgttttgacagggtgctgattggtgcgtttacaatccctgagctagacacaaaggttctccacatccccactagattaactagatacagagtgtcaacacaaagattctctaaggccccaccagagtagctagatacag

SEQ ID NO: 7071 - DNA, 1335 bp, Artificial sequence
  DNA replication origin
acctttcccccctctctattccacaaaaccgccattgtcatcatggcccgttctcaatgagctgttgggtacacctcccagacggggtggtggccgggcagaggggctcctcacttcccagtaggggcggccgggcagaggcgcccctcacctcccggatggggcagctggccgggcggggggctgacccccccacctccctcccggacggggcggctggccgggcggggggctgacccccccacctccctcccggacggggcggctggccgggcagaggggctcctcacttcccagtagggacggccgggcagaggcgcccctcacctcccggacggggtggctggccgggcggggggctgaccccccccacctccctcccggacggggcggctggccgggcggggggctgacccccacctccctcccggacggggtggctgccgggcggagacgctcctcacttcccagacggggtggctgctggacggaggggctccgcacttctcagacggggcggctgccgggcggaggggctcctcacttctcagacagggcggccgggcagagacgctcctcacctcccagaccgggtcgcggccgggtagaggcgctcctcatatcccagacggggcagcggggcagaggcgctccccacatctcagacaatgggcggccgggcagagacggtcctcacttcctagatgggatggcggcggggaagaggcgctcctcacttcctagatgggatggcggcggggaagaggcgctcctcacttcctacatgggatggcggtcgggcagagacgctcctcactttccagactgggcagccaggcagaggggctcctcacatcccagacgatgggcagccaggcagagatgttcctcacttcccagacggggtggcggccgggcagagactgcaatctcggctttttgggaggccaaggcaggtggctgggaggtggttgtagcgagccgagatcatgccactgcactccagcctgggcaccattgagcactgagtgaacgaggctccgtctgcaatcccggcacctcgggaggccgaggctggcggatcactcacggttaggagctggagaccagcccggccaacacagcgaaaccccatctccaccaaaaaaatacgaaaaccagtcaggcgtggcggcgcgcgcctgcaatcgcaggcactcggcaggctgaggcaggagaatcaggcaggggggttgcagtgagccgagatggcagcagtacagtccagctttggctaggcatcagagggagaccgtggaaagagagggagacggagacagagagggagagggagag

SEQ ID NO: 7072 - DNA, 1117 bp, Artificial sequence
  DNA replication origin
ccctgtctgagaagtgaggagcccctccgcccggcagccgccccgtctgagaagtgcggagcccctccgtccagcagccaccccgtctgggaagtgaggagcgtctccgcccggcagccaccccgtccgggagggaggtgggggtcagccccccgcccggccagccgccccgtccgggagggaggtggggggggtcagccccccgcccggccagccaccccgtccgggaggtgaggggcgcctctgcccggccgtccctactgggaagtgaggagcccctctgcccggccagccgccccgtccgggagggaggtgggggggtcagccccccgcccggccagccgccccgtccgggagggaggtgggggggtcagccccccgcccggccagctgccccatccgggaggtgaggggcgcctctgcccggccgcccctactgggaagtgaggagcccctctgcccggccaccaccccgtctgggaggtgtacccaacagctcattgagaacgggccatgatgacaatggcggttttgtggaatagagaggggggaaaggtatggaaaagattgagaaatcggatggttgccgtgtctgtgtagaaagaagtagacatgggagacttttcgttttgttctgtactaagaaaaattattctgccttgggatcctgttgatctgtgaccttacccccaaccctgtgctctctgaaacatgtgctgtgtccactcagggttaaatggattaagggcggtgcaagatgtgctttgtttaacagatgcttgaaggcagcatgctcgttaagagtcatcaccactccctaatcttaagtacccagggacacaaacactgcggaaggccgcagggtcctctgcctaggaaaaccagagacctttgttcacttgtttatctgctgaccttccctccactattgtcctatgaccctgccaaatccccctctgcgagaaacacccaagaatgatcaataaataaataaataaataaataagaaagaaattgcaaaagagaaaatatactttacaatccagatacctggcagttaaccacatgatcaaatttagcatcaatgacagtaggacaactagatattgtatacctc

SEQ ID NO: 7073 - DNA, 1072 bp, Artificial sequence
  DNA replication origin
gcggaccccgggggccagcccagccgcggcaagtcaggtagtctgcggcgggagctccgggcatgggcttcggcccggggtgcaggaggcgcgcaccctctggccggatgggcggcacactcagggcccaggaggccatcccaggggagccccgccagccccggccggagcccgagctgcagctgccacctgcaagtggtgcgctggctgcagcggtggcaaacccggatcccatcctcgcgcctcgcgcccatcagcgcggaccccgggggcgacgcagtgacgaagcagggctgtgggcccagcggcggcaccaggcagagaagcaccactcaaccccatccctgggctgcagagggcccagcgcggggggctcagagcatcgggagccggtggaagaggagaagagcgagcgggcgacagtcaaacaggccctggggcagggcgcgcctcgcgctccagggagccccgccagcccgaggcacctgagcagcaaccgccacctgcactgggcaccacgagacagctgctagggcggtttctctgcctggggcctgttgctcggaccagctaaggtgcgcctgctcactggtcctaaccgttctgttgggcgtttctgctgagaggcgggaggcgctgagagtctgtgcgaaggtccgtggacagactgcattgcttgttgttgcgcttcggaggcggcgatgcccgaaggcaagctgaaatacggctggagcgttcccaggctacaatttgcagcgacgattatggaagacgagccagagtggtggcccaccctcagggagcgcttgtgctcagatggcttctcatttccccaataccacattaaatcatctcatctgaggaggatccacagagctgtcttctgtggtaatctggagaaactgaactaccttctgttaacatatcatgacgctgtctgagtagttgtcgaccttgtttccacattaactggctgttttgttgtggctgcacttctgtttcattaccttcatcttgcaggacagagtcttggccgcagactgagcctgtacctcacccgtctcccaccgtc

SEQ ID NO: 7074 - DNA, 955 bp, Artificial sequence
  DNA replication origin
cgcccccggggtccgcgctgatgggcgcgaggcgcgaggatgggatccgggtttgccaccgctgcagccagcgcaccacttgcaggtggcagctgcagctcgggctccggccggggctggcggggctcccctgggatggcctcctgggccctgagtgtgccgcccatccggccagagggtgcgcgcctcctgcaccccgggccgaagcccatgcccggagctcccgccgcagactacctgacttgccgcggctgggctggcccccggggtccgcgcggctggaggcgcccgcctcctcggggattcccaatcctcggcgacccctgctcaatgtggcggctgcagctgcagcgcccgtgggctgacgtggcttccgggagctgcggccggccacgcccgagggccccacaggctgcgctgcccttgccagctgctcctgactggcacccagagagcaggatctggcacttggcactctgcagccacggggatgaggctgagcactggttctcggcctcatggcgccgctggggccacagcctgacttcacctccccttcacccaagtcgtgtgatgggcacgtgtgaggaggggcaatcggggttcccaaggctgctgcctgcatgtcactccgtggccactaggatagggctgaggagctaccaggggatgagcacatcgtggccatcaggatggggctgagagtctatctttatccttatgcacctgcccagccgacttcccgacagccactactgcagcgtcctgtcagggagtccttgctgttggggctgggatggggagggcatggagaatcagggatggtctggccattgctgctggtgcctgatgtgcaggtggcagctgcacctagggcatgggctggtagttcttctcttttggatggtttccaggtggcccattgtgctgtgaccaagccagagggtccactcca

SEQ ID NO: 7075 - DNA, 1248 bp, Artificial sequence
  DNA replication origin
gatcgtgaactgtaccccacaccgagcacgcgtctgcccccccaaggcggtggagacgccctcatcttccgccgccagctcgcggggcaggaggggtgcgagcgactctggccaggccccagggacggggaccgggtctcgcggccctgaccggggagagcccaggaactcacgtggcaggagcgccgggggtttcagcacggagacccatcccgtctgcccctggactcccgcgagccccgcgggcctctccgctcgcccgccgcccccctgccaggggaaggagcgcagcgtgcgcgccgccaggaagcggcgctcgaaactctgcagcaagagttcggtccccgcattctcctcgggcgccatgacgtgggcggggccgcagcgttgccgggagaccgggcggaagccgggcctggactgaagagggggtgggcccagggcagtgcgcggcggcagagagggggcggggcctgggggtagggtcaggaggagcgtcctgggggcgggctgtagggcggggccaggatgagcgttaggagggcgaggcctggggtagggccaggataagcgtcgttggggcaggtcctgggtagagtccaggttggcgggtcctggggcggagtcaggatagggcgatcctggaagctgggcttcagaagcgtccaggttggtggcgtcctggaggcggtgccttgcgtgtgggcaggataagagtcctggaggcgagcattagagcggggataaacgccattgggttcaggaggcgggactcagagcagagcccaggagacaggtcttagggtggggctaaggccagacccagagaagggctcaggaggcggggccggggcggggggttgactatgtcgtagcacatggccaggcggtgcgcggactctgggaggcagagctttggacgggccgacgtggggaggggcccagggtccaggaggcggggccgagtccgggctgccagctgcgctcaggaggcgggccctgggaggcggagcttagggaggggccggtgtcgggagggacccagggactgggaggccggtcggggctgggctcaggggccgagacctagctgggcttggggcggggccgagacggagcgagggatccagggtgtgggaaacggggaggggtttgaggaggggatcggaatgtggctcaagttgggaggcgttacctgcggagggtttgaggcacgcccaggagcgagcccacggtcggccgacgcgg

SEQ ID NO: 7076 - DNA, 1023 bp, Artificial sequence
  DNA replication origin
ttagggtggggctaaggccagacccagagaagggctcaggaggcggggccggggcggggggttgactatgtcgtagcacatggccaggcggtgcgcggactctgggaggcagagctttggacgggccgacgtggggaggggcccagggtccaggaggcggggccgagtccgggctgccagctgcgctcaggaggcgggccctgggaggcggagcttagggaggggccggtgtcgggagggacccagggactgggaggccggtcggggctgggctcaggggccgagacctagctgggcttggggcggggccgagacggagcgagggatccagggtgtgggaaacggggaggggtttgaggaggggatcggaatgtggctcaagttgggaggcgttacctgcggagggtttgaggcacgcccaggagcgagcccacggtcggccgacgcggggccaggggcgggccccaggatccggagcttcgggcggggccgagtctgggtttggggcccgggaggcggggccagttagggcgagggtccctgggatcgtcgggtcaggccttgggctaacgtagacactctcgcagtacctccgccttcaggaaggtctttttagcaggggccttacaggtgcacgcttcggtcctggaggccttatcctaacctctccatcagcgccacccgtctggggcccgaaaggagggagctttccctctgtcctccagcctttggactgtctccaaacaagccattcgttcaccaaatacttattaagcacctaccatgtgcctgacaagggagatgtaacggtgagaaagactaggtgtggtctgggccctccagaggctcaggggctcgtggaagaagtggacattgaagtacttatcacacaaatgagtataaaagtacaatagcgatatctgccacaaagatgagcagacagagctagcggggcttgcaggaggagttttgatcttgcagggacaggaaagaggagttagctcctgcggggtgggatggggg

SEQ ID NO: 7077 - DNA, 1168 bp, Artificial sequence
  DNA replication origin
gaagaattggggcctagcttggcctggtgaggaggggagaggtcagatttttctgtagaaaaggaagattagaaagactcagtgatgcttggggttgggattgagggggcagctgggagggaaagaaggaagatttgggatgagttgcactgggaacagactagggagggaccaatgtgtaaaagaatgcctggacgtcagtcacctcagaccgtttgcccattttatgacaagaattatctagatcatgtaggatggaaaaattgaaagtgccattttctggctatttggaactactgtcaagtttgtattggggtcaagcagcattgtggaagaaaataaggcatttaggttttaggtcaggtgtgagttgaagaggttttaggtttttaagaacacaggctaagggagaagaagggggaatggtgggcagaagcttacccatagtgaaggcggcaagcctagagaaaagagagagtagagacacagagagaaggggtggggggttcttgccttccagaaaagcaggaaaggggttggggtgcagaaataaagggttgtgatacagagctaagaggtcagggcacagaaataaggggttggggtgcagagataagaggtcaggtcacagaaataagggattgggtcacagagataagaggttggggcatggaaataagggatcggggcacagagataagagagggttcctgcccctcccccagaaaaacaggacttgctgctaagggtgaaggagaaggggttgaggggttcttgccccttcccccagaaaagcgggacttgccactaagggtgaaggaccaaggcaggcgtccctgcgtggtctgacacctctgaaacctgggtgaataatcagagaggcatccctgcaatgattaaacaccaaggaaagggtgtcttcccaagtccgtgacaggcgctggagttgtgggtccatggataaaacgtgtctcctttgtctctaccagaaaatgaaaggaattgaaattaagagaagggagagattgaagtgtggtgccaagattgaaaggataaagaggttgagggatagtgaaggaggttggagaagagagtaaaaagaagtcacttactggatttgaaattggtgagatgtttcttgggctggtcagcctgaggacctgaggtt

SEQ ID NO: 7078 - DNA, 1489 bp, Artificial sequence
  DNA replication origin
gagcggccagcagagggcgccagagagccaggagcggcccgcggaggagcccgcgccggccccgatgcccagctccgcgccgcgcggacccaccgagcccgcgctcagatgccccagctcagccgagaggccgctcgcgccgggtccttcctcttccccaagtgcaggcagagcccccggagccatggccagtccttccggcagctccgaagccactggcaagacccgaggcagggatggccggcccaggagggaggaggacgacgtccctcccgaggagaagaggctgcggctgttgctggagggaggggggaagggcacagcccgaggactgcgaggacggagaggacgcgccgcggccgggcagggaggagaccggcacccagacaggtggcgacggcagaggagtaagtgacgcgggcgcaggggtccgggggtgccgggggcgcgggggtgctggggacgcggggtaggggcggcgggaggctccgtggccggccccgggttgaagttggtaactgagcggcaactccggcgggcgcggagtgacagctcgtgacggcctccgagatgtcagctgtcccttctcggctgtgtggcttcgacttcctgattctcccacgacgtccctggccgggagaccagctggactctgcggctagccaaaaggggagggggagccccgcgtcctgggggcccccagcaggggaaggggcgggggttgctctgggcatcctgtctgggtcatctgtctgggactctgtcggtgcctctcacctggcgaggggcttgtggtgggggtagggggaaagtccctggcgccaggcttggccaagccctgctctgctgggctgcgggctggcggcgctcacccagctcctcacctgccccgcatcttcctgtttttcttccctttcttgttgagcagcgagagttgagaggaggcagatggcttccatcccaaaaatcgctctcctctttccatccctacagagagggacagagaggcaaagttccttgcatcccccggggcgctgtccctgtgagctcccggtgtcttgcacacgtgggcccctgagtcaccgggcctgtgtgtgtgcgatggggctctgtggtcagcctgtcctcctggggttcactttctgctttcctaccccaactcttcctgtgtggctttgctggccttccagtgggaggcacgtgggtttggagggcagatgagggcccactggagagctgtacccctcagtgagggccgccaccttgatggtttttgatggataatgggattgacctctttgttccttccacatgtttttatgtttgaccatttgctcagctgagctcgtcttaataatttgattcgtggttaatgagccccacatgggagagagggcggccttcattctgaacccattgaagcagcacgggcagccctcttcgccatgggctgcatcagagcccccgctgcccagtcttggggttgccc

SEQ ID NO: 7079 - DNA, 1796 bp, Artificial sequence
  DNA replication origin
cctctccgtcctcgcagtcctcgggctgtgcccttcccccctccctccagcaacagccgcagcctcttctcctcgggagggacgtcgtcctcctccctcctgggccggccatccctgcctcgggtcttgccagtggcttcggagctgccggaaggactggccatggctccgggggctctgcctgcacttggggaagaggaaggacccggcgcgagcggcctctcggctgagctggggcatctgagcgcgggctcggtgggtccgcgcggcgcggagctgggcatcggggccggcgcgggctcctccgcgggccgctcctggctctctggcgccctctgctggccgctcgcgcgcaccgcggacacgccgtgccagggcctgcgccgcgctcacctgcccggcctaggcggtcgctgtcccctgcccgtggccaggcccgctccggccaagccttgcacctcctccccgccccagccaggttgcaccccgatggtctccctgcccaaggaggagagaggagaagggacgccccgagagggtggacatcggccacagccaccttgtctttgctcttaccctgtgtcttgcatggtttggaggtggtgggaaaaccgaggctgctcaaaactcgtggagaattccgcctgcaggatgacatgaatgcaccttcgcattgcctaccaacagaccttttttgagcatctctgtggaccaggagtggtgatgggggaggggatattgtggtgaacatgacaggcattgccttcacccagtggggctcagcgctgggtgagaaggcattgagaatggacattgtcaattgggcaaaaggaggccaaggagaagtgctgggtgcatgggaactgaaaaagacaggaggctcagcaggtcttggagctgggagagggacagcagcagcggctgttccaaaggaagcaacagctgagagagatctcagagagttgttctcagcccagtggagcatgttcttcgggcagagggaacagcgtgtgcaaaagcccagaggctgggaaagaagcagaaagaggactgtggggctggagcgtggtgggcaaggggagagaggtgtggtgggcagacagattgcctgggacccagccgtgcagggacagaggagataggggatccttgcaggcccccagccagggctcaggcacagagacaatgcaggtgggcaaagggaggagatgtggggaaatattttggaggcatgccctgatgaatgagcccaggatgcacccttagtgtcagtgtggagctccttccttggctgtgtgatgagcttcacccgggggtattttctggacattgaggtgctacacccagagtccaggacaggctaagtgagcaccagcagctcctggcctacctcaaaagcaggagagacaggggagactggggaggccgggaggaaggggaatccaggaaggcaggagaggccatggaagcagaggaggccagggaggcagtggaggcaggagaggctggggaggctgtgtcctttccatgattctgcccaggatcctaggcccctgtactccctgagcttccccacccccagcactggaaccatgttgcacaatggtctctccactaagatcctgatggcggcccctatcctgctgtgctccctatttcaaccctaacagctctcacagtgggcagcacatagtaggtgctcaggaaacactggtgggagagcacatgggtctgcttagcaccttcctctctcctccagctctcccctgtcatgaaataattctgataacgacaca

SEQ ID NO: 7080 - DNA, 1589 bp, Artificial sequence
  DNA replication origin
tcccccacgttggggacgcccctcccagagcctgggtcacctctgggcttccgcagccccctccaaggcggagtggagccttgggaacccctcggccaagcacaggggttcgaaaatacagctgaaaccccgcgggcccctagcacgcgccccagccccagagcagggtcagggtcttcttgctacctggccccgctccagatccccccagctctcggccgcggacctgggctgcgtgtgagcgcgctttgcacctcctattcccagggtccgccgagagccacgattttttacagaaaatgagcaataaagagattttgtactgtcctgactggggagtcccaggccgcgggggacggagcgcccctggggtgcacgcctggctggcccggcctctgggcgcggtggtgggaggccctgacctaggggggccgcggggtgtggggagtgcggagcaccactgggggcggggcgaggtgtccgtaggccccgtccaccagcctgtcctccctcctgaggccccgccccccatagctgcctgcctttgccaatcccagccaggagaaggaagcgacggagcggctggcagagacagaggagggtgtgaccgcgttgctggtcccccatgggtcctgagggcgcgacagactccggaggcacaccctccaggggcctgtgtaggcatcctcggccctccagcgaccacccccgcgtcggacagggtccacttccgagccacggtggggtcaccctgtgcccagtaggggccttggaagtggtggctggaggccagttatgctcggttactaccctttcccggctacagcctcagctgcgatgcccacgagaaacaggctggtggaggggcagaccccctacaaggcctgaaggtgccgttcctccacccgctcctcttgtggccagaggagagggacacccccgccatgaagagctctgaacgattgggtgaggacaagtgggggccgtgggagggccatggagcccccagctgcaccccagcacgcccggggctggcccacaccattcctcactccccacagcctctctacccctgactttggagaggccctcgtctgtacctccaggctccatgcctgcctcagcatcgctctatggattctcccagccctaaactgaccccatctctcctctctgccctcatgtgagtttggttcttgaagcctctagtgggccctggggccagactctgtggccttggacagggagtctcccatctgagccacaggttccttctctgttgagtgtgtgaggtaacatgttggagcccttagtgtggcggctgcaagctccccagggcctgtaagaaacacaaaagggtgcggcgggagacttgacattttctaaatctgggagggaacgctgcctgcctcacgctgaccttcaatgacaagcagactcagaagcggtcccgaggtgccaccataagctgggtgaaggccagcgctgtgtgcttccagttccccttccgcatctgtagactgagtgttctctggaggtggctggcgacatcctccaggcaggctccagcaaaaccagtcggagctggg

SEQ ID NO: 7081 - DNA, 1060 bp, Artificial sequence
  DNA replication origin
accagcctgggtaacaggctgtgaaaccctgtctctactaaaaacacaaaaattagctgggcatggtggcgcgtccctgtgatcccagctactctggaggctgaggcacgagaatggcttgaacctgagagatggaggttgcagtgagccaagatcgcgccactgcacttcagcctggaggacagagcgagaccctgtctcccaaaaaaaagaaaaaaagaaaaaagaaaagcagtgagtgggcagggcatggtggctcatgcctgtaatcccaacactttgggaggctgacgcaggaggattgcttgaggccaggagttcaagaccagcctgggcaacataagagaccctgcctctacaaaaaatttaaaaattagctgggagtggtggcgcgtgcctgtagttccagctacttgggagactgaggtgggaggatggcttgagcctcaaagattgaggctgaagtgagcatgccactgcgctccagcagtgggtggggggagggagggagggggagcggtggggaaacggagcgaccgtgtctcgaaaaaagaaaatagccggaagtatgcatacagatatgtgtgtatgtactgagctatgttgtaaaatcattcctgactgcgggttatagtcaaaaccccatgaaaagcatcactacagcccacgggtgtgtcagggactcagtgttgtgagccctgggaaggcagggcctgtggccagcactttatcaacactggcacatgcaccctatgaggcaaagggatttgcattgtctccttacagcgtgggacactgaggtcgccaggggcatggtgactgtaagggacagtgctggatgtgagcctcgcctgcaggaggcggtccaggaagagtgggtggaggggctggagaagttgagggccgcgtggcccgggaggctcccggaggagggaagggcctatctcagcgaggggcataggcgggaaaggtgtggggcgaggcggccgcgggtccctggcatccctctccttacgcccaggctaagctggcgttgctgctggtgacgctggtggcggcc

SEQ ID NO: 7082 - DNA, 2267 bp, Artificial sequence
  DNA replication origin
cgccccaacccggcgtcctaaagctcctccagcagagccccgtgttcttcctggctgaggagtggttccagcggagcaggctcttccacctccttcagctcccccagtgacaccggatctaggaaaggttgtgccttttgctgaaagtctggggttgacgggagctcatctaacaggctggaggtgagtgcagacgagcgccccggctcctggagcggttgggaggcgcctggatggctggcatctgtgcttgacgcagaggcctccggggtcgcgagcttcggaggtggaggtgccccgtcttcgggttcccacgccgccctggcgacctggggctccagccccaccgcggactccggtgggacgtgggtggcgcaagcacaccttgcccctgtgactcagcttgagggggcccaagctgtcccactgagcacgcgcccagcaggccgtcgcgctgcgggtcctggtcctcctgtcatttactggggtgcggaggcctccgaggagtctgagggtgggacagtcccacttccggaggagctagggcagggaacacaaagtcccgagtgccggggcaggttgggagatcccctctgccggcgcggcctggctgggctggagcacggggacggccctcgctccctggctcccgaaagccccctgtgggagagccccaggcgcgcagggcacgtgggatgcgggaagccccgttccccacgccccggtgtgggcgcaggcgacccacgagggagcagggtgacacccgctgggggccgcgttgcacaggccgcctgcgtgcgcgggcgccctgccaccctgtcccgggtgcctggcccttcgattctgaaaccagatctgaatcctggactccgggaggcccgtctctctggccagctcttccctggcggcgatgcctggaaagcgatccttctcaaaggctcggaggagcagggcggtctgggatccggtgacggcggtccgctttcgcctgccttcttgcaggccgcgtctcccgggccagggccgagattcccgccggtgctgcctcagctggcgtgacctctcattctgaaaccaaatctggaccctgggctccggaatgccgatggcctgggccagccgttctctggtggcgatgcccgggtacgggttccgctcaaagcaggctcgcaggacctcgctttggctcggggtccaaacgagtctccttcgccgtcctcgtcctcgggcttccgcggggagggtgctgtccgaaggtgtcgggagggccatcgcggggagccccggccggaatttcaccgacggacacgggcggagagaggccggcgggctcccgtgcacctcagccggcctctgcgctgcaggcaggtccagccaggaggcccttagtaagacctaccacctccaccccgttatgaacatgcatgaactcggggcccaaggtcccggggtagcccgccctccaaagccgaaaaccacagggaccagggccttgtggggtgggtgggtgtagggccagattggaggggaaaaaggggcttcgggggctggcactctaaggttctccagtaattctatggaaactggaagccgctgtcttgactcccacagttttcaggcagaaaccaccctgaagggtggagtgtggaactgaacttccatgacagtcttgagttttccatgccctctccgtgaaggcggcaatgcctgtgggtgtcgccgttgccgtgatagtctcacacacgcagtggtgtggaactcgttcattttcatgtagaaaacgagagcgaaactacagagaaaagaaacgtcccgtgcatcacggcctgaccacggattcctgtttcctgcaacaagggaagtctccactgtggcctgtttggaaactggaaaggagagcgaagacaggatgctgcttttccacgcttcgctggaggtttctgggtccccacagagctcgggaaacagtcaacatggtcacgcttttgggggccggagacacgtgaacaacaggcccccttgcagagggcaaaggaacgtggaacccagaatcatggttcactcggtctgagtgtgactcttgaatggacgggactatccacctcgcgctctgttgcaggctcaacgtggggctatgtcatctgtgaaccatgtggatgaaaaacggacaatcacccgagtctcagctcactgctctctgggcaattcgctcattccttgggaggcggaattcgtctgaatcgctccgggatgaagtgacccaggct

SEQ ID NO: 7083 - DNA, 1547 bp, Artificial sequence
  DNA replication origin
tgcaacgcggcccccagcgggtgtcaccctgctccctcgtgggtcgcctgcgcccacaccggggcgtggggaacggggcttcccgcatcccacgtgccctgcgcgcctggggctctcccacagggggctttcgggagccagggagcgagggccgtccccgtgctccagcccagccaggccgcgccggcagaggggatctcccaacctgccccggcactcgggactttgtgttccctgccctagctcctccggaagtgggactgtcccaccctcagactcctcggaggcctccgcaccccagtaaatgacaggaggaccaggacccgcagcgcgacggcctgctgggcgcgtgctcagtgggacagcttgggccccctcaagctgagtcacaggggcaaggtgtgcttgcgccacccacgtcccaccggagtccgcggtggggctggagccccaggtcgccagggcggcgtgggaacccgaagacggggcacctccacctccgaagctcgcgaccccggaggcctctgcgtcaagcacagatgccagccatccaggcgcctcccaaccgctccaggagccggggcgctcgtctgcactcacctccagcctgttagatgagctcccgtcaaccccagactttcagcaaaaggcacaacctttcctagatccggtgtcactgggggagctgaaggaggtggaagagcctgctccgctggaaccactcctcagccaggaagaacacggggctctgctggaggagctttaggacgccgggttggggcggggcgggggcagggcggcggcctctctttggcggtgaacctctggctcggtatggagaggcgtgtcttcccttccagttgacctgtctaggatccctgggttccaggtccggcgagagactccacacagaggagggctgtcattctttcctgagcatcccggggatcccagggcccgtccacgtaccgggaggtggactgtctactgctcatgcgggggtttgcaggcaacagcttaggttttctaaccagcccaggcggagctcgcatcccttttccccccgcgttcttcagtcgggttggcggagacctcagtccgcgaaacactgggtcggggcagaagccaggccagttctcctttctgcggctcgattcctctgcctcttctctcactatcacttgccaacccgtgtcccaccagcctcctcgccagcaccatggagcgccttgcaactaaatgtagacccgagaccccgcgcaaaccggggtgctgccctttccaggcaagagggaaggcaggcagagatgaggacaggaacggagacagagtgggacggaaggatggagctaggaaaggatggatggacggagggaccctggaagggagaggaagagggagagagggagaaagggaggaaaaaaccagggcagggagggaagaacagagggcaggatggaccgagggacaaaaggagcaagaaacagagaaccgaaggcagacagaaaaacggtcttctgcctccagaaccaacaggacccagcaat

SEQ ID NO: 7084 - DNA, 1438 bp, Artificial sequence
  DNA replication origin
gggagctcagcggccctccggatcgccagcctgggttacttcatcccagagcgattcagacgaattccgtttccgaaggaatgagcgaattccccagagagcaatgagcggagactcgggtggttgtctgtttttcatccacatggttcacagatgacatatccccacgtttagccctgcaacagagcgcgaggcggatagtcccatccacacagaagtcacgctcaggccaagtgaagcgtgattctggattccacgtttctttgctctctgcaaaggtgcctgttactcaagtctctgccgcccccggaaagcgtgaccatgttgactgtttcccgagctctgtggggacccagaaacttccaggaatgcgtggaagaccagcatcgtgtcggtgctctcctttccagttttcaaacaggctatatcgaagactccccattttgcagaaaacaggaatccatcctcaggccgtgatgcacgggacgtttctttttctctgtgctttcgctctcattgtctacatgaaaatgaacgagatccacacacctgcgtgtgtgagactatcacggcaactatgacacccacgcgctggcaatagagttggcagcctgatcccaggacaaaggtactgacggacatccagacacaccccaccacaatcactagcaaacccactcccaaacagacacatacgggcgcacgcgcgggaacacaagcatacacgcagacacacaaagacacagacagcttgaagaagagcaagggacagagggatggagagatagaaacggaaggagagagagaaacagcgatagagagagagacagagagggacggggaaactgcgagagagagagagagagagagagagagagagagacagagagagagagagagacagagagggacggggaaactgcgagagagagggagagagagagagagagagagcaaggtggagagggaagtagagaaagggagagggtgagggagctagagagggggagcaacagagccttggagagggaggctctgctctggtagacaggggaccctttggcgagggtagggtggagggtgcctgggccgggctagaacaggagggcagggccgcccacgcgggaaaaccaacggagccctgagacgtgtttttacttggattggttggttgctttgggcgtgcgtttcctagcgtcattcctttgttggctcctccctgtcctcttggtgctgtgggccctgaaagttgtcgagtgcgcctgtccctgtggtgggagcagtggcgccgagcgtgcccacgggccgccgcttgggtttctctcgtgttcagggtagtatggacgtggacaatggcagtggcccctggctggcccaagagccgggtccagatacgcgcgcctgattccaggcgtcataaccaacccggggccgcgag

SEQ ID NO: 7085 - DNA, 1803 bp, Artificial sequence
  DNA replication origin
agttaccattgagaaagaacttgaaaaaaaaaacattttgtgtcctagaattgagaatttgaagtcaaaaagcgggatatggtcacaatgctatgctcataggatttgcctggaaaatgcataatagcctcccaggaattcttaaaatcctacaacaacaatgagaagttctgtggtacccagtgtcttcccttggcatttacgtattcaggaaagctttcattaaactaaacgctgaacccaaaatgtgtagtattcataaaaataaaggcaatttaaaatggagaaatccaaatatgaattataatgttgtcatgttggttaaaatagacatacatataatttcataaaacaatttgaattatcttagtagacttcctttgctattttaatgaaagttaagggatcactgaggaacacaacacagtgtgtctcctgggcatggaaaagcgggtagggaataggaggtgaagaaaagcgggtagggagtaggaggtgaggaaaagcgggtagggagtaggaggtgaggacaagcgggtagggagtaggaggtgaggagaagcgggtagggagtaggaggtgaggacaagcgggtagggagtaggaggtgaggacaagcgggtagggagtaggaggtgaggacaagcgggtagggagtaggaggtgaggacaagcgggtagggagtaggaggtgaggacaagcgggtagggagtaggaggtgaggacaagcgggtagggagtaggaggtgaggacaagcgggtagggagtaggaggtgaggacaagcgggtagggagtaggaggtgaggaaaagcgggtagggagtaggaggtgaggacaagcgggtagggagtaggaggtgaggacaagcgggtagggagtaggaggtgaggaaaagcgggtagggagtaggaggtgaggaaaagcgggtagggagtaggaggtgaggaaaagcgggtagggagtaggaggtgaggacaagcgggtagggagtaggaggtgaggagaagcgggtagggagtaggaggtgaggagaagcgggtagggagtaggaggtgaggacaagcgggtagggagtaggaggtgaggaaaagcgggtagggagtaggaggtgaggagaagcgggtagggagtaggaggtgaggacaagcgggtagggagtaggaggtgaggagaggtgggtagggagtaggaggtgaggagaagcgggtagggagtaggaggtgaggacaagcgggtagggagtaggaggtgaggagaagcgggtagggagtaggaggtgaggagaggtgggtagggagtaggaggtgaggacaagcgagtagggagtaggaggtgaggaaaagtgggttggggagtaggaggtgaaataggaggtaggagagtgaaggacagtaagaaatagaggatgctgacgtgggaatgatcagaaaggataatactaatagatggtgaagacaaacgttgatgcttttcaaaatatttgttttatattcccaaactaagaaagtaaatcagacaccaggctatcaacctctcaagactatactgatggaagtgtcttagaaatacatgtgtaggccgggcgaagtggctcacgcccataatccctacactttgggaagctgaggcgggtggatcacctgaggtcaggagttcgagaccagcctggccaagatggcaaaacctcgtctctactaaaaaaacaaaaattagccaggcgtggtggcacgtggctgtaatcccagctactcaggaggctgaggcaaaagaattgcttgaacatgggaggcagaggctgca

SEQ ID NO: 7086 - DNA, 1492 bp, Artificial sequence
  DNA replication origin
gccgaggctgcagacacccccgcggtgccgcctctgaggatagtgcaccaggcggctgcgggcgcgagcagagacgggcgtgagagcccagcccgggcgcggcggagaaagggagcgctcagtccagcgccaggcgcgctgaggcccctcgcccgggtccagcccccgcagcctcgcagcagagcgtccgcttcctccggcagctgccgcgggtggaaggacttctaggagggaaggcgaggaggcgggaggggaggggaggaatgagagctgcctggagtcggcccggggaggggcgggggcgaggaggggcgcgcggagccctgaacctccggactcggccacccgcccgctggggagtggggaggggtcctggagagccgagagtccccggggggacggagatgaacaaattcggagagccccgccggctgccgagggccgaggccaccgggcgactccttccccttctccgcgcccccgggtgcccactccttcccgcctcgggaggggataggtgggctccaggctcctgctcctcgccgcgtcccgtttaatgggcaggtaattttctccgtgagtgatttcatggaagcccttcctaattattcatccctccgtctgccggagctgcacgcgctttcttgaaaaagatcagcctccaggacccagggcgcagcctcattacgcgttaaaatcacacactcactcactcttcaccttttagccagatgagaagccgagtaggaggaaggaaaggaaaggaaaggaaatagaagcaccttttggactggaaaggttgtgtgtagatgcttcctatatgattcaaaagcacaagggggagaaaaaggagggggcagaattctctaacctccagcggctcattttagccaagatctatggccccctgcggcatccccaagggaaggaggaaggggaggcagcccctcttatgttactcagttgccttttgacccctccacgatgagtttgatgcgcgatcgcgcagggcgagggagttccacagaagatgctaaggacggggaagcggggatcacagagcttgggggagggggatccccgaagtctttaccctccagggaccagcacctccagaaggaaattcggtaaacataggctctgggtgtggaaagccgaaagcccagctgagctcatggaagctcaaaaagaagccgaatttcagcccaaagacgacaaaactctgaaaattaagaccaagactaccaaaggatgccattcaggaccggggatgatgaaggaaggtcacgttagatcaaaggggtgccggtgtcggcggtgccccggtgcggccgggcccacgtgtgatcacaggctcgctggtagccgtttgatgcttgttcagatgatgagaaggcggcttataggaactcacgcaggtccccgagccgagctaaatgctggatggtgagtctttagttccccctactggaaaatattaggaaaggttctc

SEQ ID NO: 7087 - DNA, 988 bp, Artificial sequence
  DNA replication origin
gggagggaggtgggggggtcagacccccgcccggccagccgccccgtccgggaggtgaggggcgcctctgcccggctgcccctactgggaagtgaggagcccctctgcccggccagccgccccgtccgggagggaggtgggggggtcagccccccgcctggccagccgtgctgtccgggagggaggtgggggtgtcagccctccgcccggccagccaccccgtccgggagggaagtgggggggtcagacccccgcccggccagccgccccgtccgggaggtgaggggcgcctctgcccggctgcccctactgggaagtgaggagcccctcagcccggccagccaccccgtccgggagggaggtgggggggtcagccccccgcccggccagccgccccgtccgggagggaggtgggggcggtcagccccccaacccggccagccgccccgtccgggaggtgaggggcgcctctgcccggcggcccttactgggaggtgaggagcccctctgcccggccaccaccccgtctgggaggtgtgcccaacggctcattgagaacgggccaggatgacaatggcggttttgtggaatggaaaggggggaaaggcggggaaaagattgagaaatcggatggttgccgtgtctgtgtggaaagaagtagacatgggagacttttcattttgttctgcactaagaaaaattcttctgccttgggatcctgttgatctgtgaccttacccccaaccctgtgctctctgaaacatgtgctgtgtccactcagggttaaatggattaagggtggtgcaagatgtgctttgttaaacagatgcttgaaagcagcatgctcgttaagagtcatcaccaatccctaatctcaagtaatcagggacacaaacactgcggaaggccgcagggtcctctgcctaggaaaaccagagacctttgttcacttgtttatctgctgaccttccctccactattgtcccat

SEQ ID NO: 7088 - DNA, 1467 bp, Artificial sequence
  DNA replication origin
atcggcatacgtgggtggcacagccgtcttctgctcaaaggtggcggcgggctctgcgggggctgctggttgctgctggggggctgctgggggggctgctggggggctactagggggctgctaggggtgctgctggggggctgctaggggggctgctgggggggctgctggggggctgctggggggctgctaggggcgctgctggggggctgctaggggggctgctgggggggctgctggggggctgctggggggctgctagggggctgctggggggctgctgggggggctgctggggggctgctggggggctgctaggggcgctgctggggggctgctaggggggctgcggcgccaaggcagggagttgcccaacattttaatataaggctccacattgcgaagaaggtggggtgatttattttattttatgttatttatttattttattttatttcattttattttaattttattatttttttgagacagggtcttgctctgtcgcccaggctggagtatagtggcatagtctcggctcactgcaacctccgcctcccgagttcaagcgattatcgtgtctcagtctcctgagtagctagaatcacaggcacctgctatttttgtatttttagtagagatggggtttcgccatgttggcccggctggtcttgaactgctgacctcgggcgatccgcccacctcagtctcccaaagtactgggattacaggcgtgagccaccacgcccagctagtaatgtagttttatgactgatcaccttatgtactcttccaattctcaacttctattaataaaaaataaaagaatatagataatgcattagaaacatctgctgcagggaactgttttaccattacagataacgttatgaatacaagtatttctgttatttatatttgccattatgtctgttctggaatattatcaaaccagaattataactagcaagagactatataaattaaaatcacacattttaaagtaaaactgaagttggttcaaactaggactccaccacttgagcaaactacttagcacaaattacttaaacctcgatgttctcatctataaaataaggggtttacaaggtcaactactaaattagataatacatgtaaagtgaaatgcctaaatacaatgcctaggatacagtaattgccctgtaagttgtaagtgctaccatgaaccagccaatgatctctactacatactatgattgagaaattaaagatggttgaaattttatataaatcgatgtcaaggtaatattatttatgaagttattgtacttcaggtcatcatgattgctttagtgcatttgagactcttttcttagatgacaatggttctaatccatcttctatcaaagtctctatttctccatttaaatctggcagatccgtcttctagagacatgaccaagtcaatgattttgattagtctgt

SEQ ID NO: 7089 - DNA, 958 bp, Artificial sequence
  DNA replication origin
aaaaggaagattagaaagactcagcgatgcttggggttggtactgaggagacaggcgggagggaaagaaggaagatttgggacgagttgcactgggcacagagactaggaagggactgatgtgtaaaagaatgcctggacatcaggcacctcagaccatttgcctattttatgacaagaattatttagatcttgcaggatggaaaaattcaaagtgccattttctggctatttggaactactgtcaagtttgtattggggtcaagcagcattgcagaagaaaataaggcagttaggttttaggtcaggtgtgagttgaagaggctttaagtttttgagaacacaggccaagggagtagaaggaggaatggagggtgcaagtttgcctatagtgaaggaagcaagcctagagaaaagagagagtagagaaaggagggaaggggtttgggggttcttaccttccagaaaagtgggaaaagggtttggggcacaaagaggtcagggcacggaaataagggatggggcacagaaataagaggtcggggtgtggaaataagggattggggcacagagatataagaggttggggcatggaaatacgggattggtcacagaaataagaggtcagggcatggaaataagggatggggaacagaaataaggggtcggggtgcagaaataaggggttgcgtcatggaaataaggggtaggagcacagaaataaggggtcagggcatggaaataagggattggggcacagagatatgaggttggggtgtggaaataagggattggggtgcagagatacaaggtaggggtacttgcccctcctctagaaaagcaggacttgcagctaagagtgaaggagaaggggttgaggggtacttgcccctcccccagaaaagcagagaaggggtagagacaaggagagaaggggttggggtacttgcccctttccc

SEQ ID NO: 7090 - DNA, 850 bp, Artificial sequence
  DNA replication origin
ggggtcagccccccgcctggccagccgccccatccgggagggaggtgggggggtcagccccccgcccggccagccgccccgtctgggaggtgaggggcgcctctgcccggccgcccctactgggaagtgaggagcccctctgcccggccagccgccccgtccgggagggaggtgggggggtcagccccccgcccggccagccgccctgtccgggagggaggtgggggggtcagccctccgcccggccagccgccccgtctgggaggtgaggggcgcctctgcccggccgcccctactgggaagtgaggagcccctctgcccggccagccgccccgtccgggagggaggtgggggggtcggccccccgcccaaccagccgccccatccgggagggaggtgggggggtcagccccccgcccggccagccgccccgtctgggaggtgtgcccaacagctcattgagaacgggccaggatgacaatggtggccttgtggaatagaaaggcgggaaaggcggggaaaagattgagaaatcggatggttgccgtgtctgtgtagaaagaagtagacatgggagacttttcattttgttctgcactaagaaaaattcctctgtcttgggatcctgttgatctgtgaccttacccccaaccctgtgctctctgaaacatgtgctgtgtccactcagggttaaatggattaagggcggtgcaagatgtgctttgttaaacagatgcttgaaggcagcatgctcgttaagagtcatcaccaatccctaatctcaagtaatcagagacacaaacactgcggaaggccgcagggtcctctgcctaggaaaaccagagacctt

SEQ ID NO: 7091 - DNA, 1281 bp, Artificial sequence
  DNA replication origin
gggcggctggccgggcggggggctgacccccccacctccctcccggatggggcggctggttgggcggggggccgacccccccacctccctcccggacggggcggctggccgggcagaggggctcctcacttcccagtaggggcggccgggcagaggcgcccctcacctcccagacggggcggctggccgggcggagggctgacccccccacctccctcccggacagggcggctggccgggcggggggctgacccccccacctccctcccggacggggcggctggccgggcagaggggctcctcacttcccagtaggggcggccgggcagaggcgcccctcacctcccagacggggcggctggccgggcggggggctgacccccccacctccctcccggatggggcggctggccaggcggggggctgaccccccccacctccctcccggacggggtggctgctgggcggagatgctcctcacttcccagatggggtggctgccgggcggagaggctcctcacttctcagacggggcggctgccgggcggaggggctcctcacttctcagacggggtggttgccaggcagagggtctcctcacttctcagacggggcggccgggcagagacgctcctcacctcccagacggggtctcggccgggcagaggcgctcctcacatcccagatggggcagcggggcagaggcgctccccacatctcagacgatgggcggccgggcagagacgctcctcacttcctagatgtgatggcggctgggaagaggtgctcctcacttcctagggagacgctcctcactttccagactgggcagccaggcagaggggctcctcacatcccagacgatgggcggccaggcagagacactcctcacttcccagacggggtggcggccgggcagaggctgcaatctcggcactttgggaggccaaggcaggcggctgtgaggtgtaggttgtagtgagccgagatcacaccactgcactccagcctgggcaccattgagcactgagtgaacgagactccgtctgcaatcccggcacctcgggaggccgaggttggcggatcactcgcggttaggggctggagactggcccggccaacacagtgaaaccccgtctccaccaaaaccagtcaggcgtggcggcgcgtgcctgcaatcgcaggcactcagcagactgaggcaggagaatcaggcagggaggatgcagtgagccgagatggcagcagtacagtccagcttcggctccgcatgagagggag

SEQ ID NO: 7092 - DNA, 1312 bp, Artificial sequence
  DNA replication origin
gctcccactttggtggcacttgaggagcccttcagcccaccgctgcactgtgggagccccttcctgggctgaccgaggctggagccagctccctcagcttgcggggaggtgtggagggagaggcgcgagtgggaaccagggctgcgcgcggtgcttgcaggccagcgcgagttccaggtgggtgtgggctcggcgggcccgcactccgagcagctggccagccctgcctccctgggcaatgaggagcttagcacccaggccagtggctgcagagggtgtgctggggcccccagcagtgccggcccaccgggttctcactgggccttatctgccttcccacagggcagggctggggacctgcagcccgccatgcctgagcctcccccactccatgggctccggctcagcccgagcctcccggatgagcacggccccctgctccacggtgcccagtcccaccgaccacccaagggctgaggagtgcgggcacagggtgcaggaccggcaggcagctccacctgtggccccagtgcgggatccactgggtaaagtcagctgggctcctgagtctggtggagacttggagaacctttacgtctagccaagggattgtaaatacaccaatcggcactctgtatctagctcaaggtttgtaaacacaccaatcagcaccctgtgtctagctcagggtttgtgaatgcaccaattgacactctgtatctagctactctggtggggacttggagaacctttgtgtctggctcagggattgcaaacgcaccaatcagtgccctgtcaaaacagaccacttggctgtctgtaaaatggaccaatcagcaggatgtgggtggtgccagataagagaataaaagtaggctgcctgagccagcagtggcaacctgctcaggtccccttccacactgtggaagctttgttctttcgctctttgcaataaatcttgctgctgctcactctttgggtccacactgcctttataagctgtaacactcactgcgaaggtctgcagcttcactcctgaagccagcgagcccacgagcccactgagacgaaggaacaactccagacgtgccgccttaagagctgtaacactcaccgcaaaggtccgcagctttactcctgagccagcgaaaccacgaacccaccacaaggaagaaactccgaacacatccgaacattggaaagaacaaactccggacatgcggcctttaagaactgtaacactcaccgcgagggtctgcagcgtcattcttgaagtcagtgagaccaagaacccaccaattccggacacatt

SEQ ID NO: 7093 - DNA, 1192 bp, Artificial sequence
  DNA replication origin
ggtggaggcgcccccccacctccctcccggatggggcggctggccgggcgggggctgaccccccacctccctcctggacagggcggctggccgggcagggactgaccccccacctccctcccggacagggcggctggccgggcaggggctgaccccccacttccctcccggacggggcggctggctgggcgggggctgaccccccacctccctcccggacagggcggctggcccggcaggagctgaccccccacctccctcccagatggggcggctggctgggcaggggctgaccccccacttccctcccggacggggtggctggccaggcgggggctgaccccccacctccctccctgacggggcggctggccgggtgggggctgacccccacctccctcctggacggggtggctgccgggcggagacactcctcacttcccagacggggtggctgccgggcagaggggcttctcacttctcagacagggcggctgccgggcggaggagctcctcacttctcagacagggcagccaggcagagactctcctcacctcccagacagggtcgtggccgggcagaggcgctcctcacgtcccagacggggcggtggggcagaggcgctccccacatctcagacgatgggcggcggggcagagacgctcctcacttcctagatgggatggcggccgggaagaggcgctcctcacttcccagactgggcagccaggcagaggggctcctcacatcccagacgatgggcggccaggcagagacgctcctcacttcccagacggggtggcagccaggcagaggctgcaatctcgcactttgggaggccaaggcaggcggctgggaggtggaggttgttgcgagcccagatcacgccactgcactccagcctgggcaccattgagcactgagtgaacgagactccgtctgcaatccgggcacctggggaggccgaggctggcggatcactcgcagttaggagctggagaccagcccagccaacacagcgaaaccccgtctccaccaaaaaaatacaaaagccagtcaggcgtgcggcgcgcacctgcaatcgcaggcactcggcaggctgaggcaggagaatcaggcagggaggttgcaatgagccgagatggcggcagtacagtccagcttcggctcggcatcagagggagaccgtgg

SEQ ID NO: 7094 - DNA, 871 bp, Artificial sequence
  DNA replication origin
cagccaccccgtccaggagggaggtgggggtcagcccccacccggccagccgccccgtcagggagggaggtggggggtcagcccccgcctggccagccaccccgtccgggagggaagtggggggtcagcccctgcccagccagccgccccatctgggagggaggtggggggtcagctcctgccgggccagccgccctgtccgggagggaggtggggggtcagcccccgcccagccagccgccccgtccgggagggaagtggggggtcagcccctgcccggccagccgccctgtccgggagggaggtggggggtcagtccctgcccggccagccgccctgtccaggagggaggtggggggtcagcccccgcccggccagccgccccatccgggagggaggtgggggggcgcctccacccggccagccgccccgtccgggaggtggggggcgcctctgcccggccgtcccttctgggaagtgaggaacccctctgcctggccaccaccccgtctgggaggtgtacccaacagctcattgagaacgggccttgatgacaatggcggtttcgtggaacagaaaagggggaaaggtggggaaaagattgagaaatcagatggttgctgtgtgtgtgtagaaagaagtagacatgggagacttttcattttgttctgtactaagaaaaattcttctgccttgggatcctgctgatctatgaccttacccccaaccctgtgctctctgaaacatgtgctgtgtccactcagggttaaatggattaagggcagtgcaagatgtgctttgttaaacagatgcttgaaggcagcatgctcgttaagagtcatcaccactccctaatctcaagtacccaggg

SEQ ID NO: 7095 - DNA, 1491 bp, Artificial sequence
  DNA replication origin
cactcctcagcccttgggtggtcgatgggactgggcgccgtggagcagggggcggcgctccttggcgaggctccggctgcacaggagcccactgagcgggggaggctcaggcgtgacgggttgcaagtcccgagccttgccccgcgggaatgcagctaaggcccagtgagaaatcgattgcagcgtcggtgggctggcgctgctggcggacccagtacaccctccgcagccgctagcccaggtgctaagcccctcattgcccgggcggcagggcgggccggctgctccgagtgcggggcccgccaagccgacgcctacccggaactccagctggcccgcaagcgccgcgcgcagccccggttcccgcccgcgcctcttcctccacacctccccgcaagctgagggagccggctccggccttggcgagcccagaaagggcctcccacagtgcagcggtgggctgaagggctcctcaagtcccacagaggaggcgccgagagcgagcaagagcgagcgagggctgtgaggactgccagcatgctgtcacctctcagtttcttctgaaggctctaggtagaagacaatccatttctttgtcctttccgacttttaaaggctgcctactttgctagctgcttcttctctttcatcttcaaacccagcaatggcccattcagttctcacagcacaacattctgatttttctgcctttctctcctatcttttaaggaccctcttgattacacgtatgcgcctacgtaatccagaatactctctttattttacggtcagctatttggcatccttaataccatcagcaaacttaatacctcttgccatgcaactcaacacatatacaggttccagagattacgacttcgacctcctacagcagggagggtattattctgcttacccaactaatagagctaaatatttagcacattttactgtcagtttatattttttctgtgaatggtttatttttaatttttactattctgttaagaagtttatattttttctttctgccacccaggctggagtgcagggatgcgatctcggctcactgtatctccgcctccagggttcaagcgattcttgtgcctcagcctccctagtatctggaattacaggcgtccaccaccacacctgactaattttttgtatttttagtagagacagggtttcaccatgttggccaggctggtcttgaacgcctggcctcaagtgatctgcccacctcggccttccaacgtgctgggattacagacatgagccaccgcacctggccttcttactgctttgtaaatgtttctttatacttattatattgtagtaaacctgttatgtatctttttctctaaactttactttgcccttttaattatgtcccatttttattctgatgaatgcagttttcaccttgattccccagtgcttttatttgtacttttgattacttggtctctacttctccctctgtcacca

SEQ ID NO: 7096 - DNA, 1009 bp, Artificial sequence
  DNA replication origin
ttggcttgcactaccagcccagatcccatgccggccaaagatgagccaggccccaaggagcaaagggtgtgtgagtgagcgcggggtcacgccattgcacacggccaggcatgttggatgctgtggtcgggcaggcagctccaaacgcaggcacagtcgctggctccgtgcaaggctgcggctagaccatgagtaccacaagcagcttctgctgagggcaccagtgtctggatgaggggaactcagtggcaccggaaagctcggagatgtcagaaactgcagagtcccaaagagggtgtcacaggcctgtctctaggagcccctgagtctgggctccctgaaggactgcagctcttctctccttctgtcccacagcacagtgagcaagggggcggttttgggggggtggggggaggttggtgccagcctgtttgtgttacagctctttcagccccactgcccacctgggcgggcggctcctgggctggaacgcggggcctctgcttctggttgtgtggggtggctgcgcaggctggcagagggctatagtgttgcagcagctctggtttgaggaatcctaatgtctaggccaccagaagggtcgccactcttaactcccgcaaactgggagcttgtcaccactcacagctcaagtgagccagccaggaaggtgttacagctccttttgctcctgccagtcagtgggtctcgagctcttgtttcacatccagaaagaatgcggttagcagaaaactggagggtgagcaaggcagagcggagctttattgagtgacagaacagctctcaggggacccaaagtgggtagctcctttccacaggcacttcatcccgaaaagtgtctgagtctggcctagtctgaagttgttctgtgctcagagtggatgaagtgcatgctgattgatccacgggcagcaatgggcgggactggaaaaagcatcattcagttagccaaaaggcatcaatgaaattctcactccaggtggcaaat

SEQ ID NO: 7097 - DNA, 1361 bp, Artificial sequence
  DNA replication origin
ctcagtgaagcttctctctgccttactcactttccagttgtccacgtacttcattcttcctggatgtaggacaagaactctggacctggcaaatggcggtgagaggtgtcagcgtgctggcagtcctcacagccctcgctcgctctcggcgcctcctctgcctgggctcccactttggcggcacttgaggagcccttcagcctgccgctgcactgtgggagccacttcctgggctggccgaggccggagccggctccctcagcttgcagggaggtgtgaagggagaggcgcgagccggaaccggggctgcgcgcggcgcttccgggccagctggagttccgggtgggcgtgggcctggctggccccgcactcggagcagccggccggccctgccggccccgggcaatgaggggcttcgcacccgggccagcagctgcggagggtgtactgggtcccccagcagtgccggcccaccggcgctgcgctcaatttctcgccgggccttagctgccttcccgcgggaaagggctcaggacctgcagtccgccatgcctgagccgcccaccttctccgtaaatcctgctgctgctcactctgggtgcacactgcctttatgagctgtaacaccgcgaaggtctgcagtttcactcctgagcccgcgagaccacgaatccaccagaaggaagaaactcggaacacatccgaacatcaggaggaacaaactccagacgcggcaccttaagagctgtaacactcaccgcgagggtccgcggcttcattcttgaagtcagtgagaccaagaacccaccatttccggacacagcgggactaaaagagctgtaaccacaaacagggctgaaacacacgcccctgattgtcactttgcatgtgaggagaaggagagaagagctgcggctttttggggagcccagatctcgtggctccctgagccaggtttgtgactccctctttggggctctgtggttcctggcatcactaaacttccaggcatcaccgtgctccccttgtccagacacggtacccgcagcctgcatgctgtacatctggtccagcctcagtctttcacggagctggcacctctgctggctcctggagctacccacccgccacagcagctggcgagcctggctgtgtgcagcggatggacccagcacttgcttgcccacgcatttttcaccacttcgtgcctggcttgcttttggcaggtgtgggatcccggccagtagcaaaagccaagtgcagcctgccagacccagtaggcagaacaagcccagcaggccagagcaaaaacttgggcgaaggtaccaccagccacagaggtttccagctggtgaagtaac

SEQ ID NO: 7098 - DNA, 1339 bp, Artificial sequence
  DNA replication origin
aggtcaatttatttaactgaaatgattatgtatactgcatcaatgcatgaatattggtttgtattggtgaaatataacttaagaaatgaaatgataaaaaatagttatatttgattttattttaaagcataaaatagtcaaaatgttatattaaactatattgtgtaattttaattatatattaaaactatattctgtagaatatagtttaatatagaaactaagtttcctccgtagttggaaaaatttagttttcatatataactgatggcagcagcagcccatctggagcagcagctacaaaagcagctacaaagcagctacaaagactctggctacagctggggaggtgccgccgcgtctctgcggcacctcggtgccggagagggaacaggcaggagccccaccctctaccaggttggttagccaggagccccaccctccaggacacagctgcagccagccagccatggctccagaccagggagtccctgtgctctcagggtcctgggaagcctccctgccctgtaggctcagaagtgcctgctcctactccctggagttccccactcctgaagcctgcttgaggcagagcaaagttgtgactgagcctgggtgctgttgcaaccttgtttggtgtgtgtgcactaggagtggcagtgacatgccagccccctgccgccttggcccattccagacttggggcactcacgagcatgggagggaggccaaggggctgctgagggtggcccagcaggggcctgcaggcgatcctcatcaggaacagcctggacattgtggatggcatgtcatggcagcaggacgcaggcaggctcctgggcggaaaggggcgggtgcctggtgaaacctcaacttcaagccagggatggcctgaggcctgggggccgggctgccagttctgtctagagcccaggtcaggagtgacaaggccctttctccagacctgcccatggccacccatggaccaatctgcatgcacttcctctcttctcagcccctaaaagccctggacactgtcagcctcggagagccctggggactgccagctgtgggaagaagctacccacttcaggtcttcctgacttgttgggccgacctgcctatggaaaggggctacccactgcaggtctcctgatagctgttctgttactcagtgaagcttctctctgccttactcactttccagttgtccacgtacttcattcttcctggatgtaggacaagaactctggacctggcaaatggcggtgagaggtgtcagcgtgctggcagtcctcacagccctcgctcgctctcggcgcctcctctgcctgggctc

SEQ ID NO: 7099 - DNA, 1328 bp, Artificial sequence
  DNA replication origin
aactcagaaatacattgctacttggctgcctctactctattattgtacaccttgaaagcaaggttaattaagtcctgttgtggggtttgagggccggaatctaatttttggagctttatttaatgttgggagtagattgggtaataaaataaagtgcatattgagaataagatggccttctgacctttcagggtccagggctgtaaagcatctcagggttgctgtcaaacgagccatgaactgggctgagtttttatatttgaagaaaaagagcctaaacactaactgatttgggagaggtcggataaagaaaaaggagcattaaccttgactatgcctttagctctaggcacctctttaagaggaaattgttgggcaggtaggggagggctagtcgtggaatgaaactgtaaacaggactgggtgtgagaaggggaggtgataaaaggattatagggtgggggagtggaggctgaggaagaattggaacctggctcagcccagtgaggagtagcctggggaggaggggagaggtcagatgggtctttaaaaaaggaagattggaaagtctcaggaacacttggggttgggactgaggggacaggcaggagggaaagaaggaagatttgggacgagttgcattgggaagagagactagggagggactgatatgtaaaagaatgcctggatgtcaggcaccgcagaccatttgcccattttacgacaagaattatctagatcttgtaagatggaaatatcaaaagttttctggctacttggaaccattattgagtttgtattggggttaagtggcattgcagaagaaaataaggcatttaggttttaggtcaggtgtgagttgaagaggttttaagttcttgaagaacacaggctaagggagaagaaggaggaatggagggtgaaagttcgcctatagtgaaggaggcaagtccagagaaaagagaaggtggagacatggagagaagggatggggggtgcttgccccccaggtaagtggagagaaaagagagggtagagacatggagagaaggggtcggggggtgcttgccccccaagaaagtggagaaggggtggggggtgcttgccccccaggaaagtggagagaaaagagagggtagagacacggagagaaggcgtggggaggtgcttgccccccaggaaagtggtgtttgccactaagggtgaaggatcaagacaggcatccccgcagtgatcagacacctctgaaacgtgggtgaataatcaagcaggtgtccccgcaatgattaaacaccaaggaaagactgtcttcccgagtccgtgaccag

SEQ ID NO: 7100 - DNA, 880 bp, Artificial sequence
  DNA replication origin
agtgtctctgcctggctgcccatcgtctgggatgtgaggagcccctctgcccgtctgcccagtctgggaagtgaggagcgcctcttcccggccgccatcccgtctaggaagtgaggagcgtctctgcccggccgcctgtcgtctgagtggggagcgcctctgccccgcagccccgtctgggatgtgaggagcgtctctgcccagccgcgaccccgtctgggaggtgaggagagtctcttaccggccgccccgtctgagaagtgaggagcccctccacccggcagccgccccgtccaggaagtgaggagcatctccgcctggcagccgccccgtccgggaggaaggtagggggtcagcccccgcccggtcgccgccccgtccgggaggtagggggcgcctctgcccagccaccccttctgggaagtgaggagcccctctgcccggccaccaccccgtcagggaggtgtacccaacagctcattgagaacaggccatgatgacgatggcggttttgtggaatagaaaaggaggaaaggtggggaaaagatagagaaatcagattgttgctgtgtctgtgtacaaagaagtagacataggagactccattttgttctgtactgggagaggttcttctgccttgggatgctgttgatctgtgaccctgcccccaaccctgtgctctctggggcatgtgctgtgtccactcagggttgaatgaattaagggcggtgcaacatgtgctttgttaaacagatgcttgaaggcagcatgctccttaagagtcatcaccactccctaatctcaaatactcagggacacaaacactgcggaaggccgcagggtcctctgcctaggaaaaccagagacctttgttcccttg

SEQ ID NO: 7101 - DNA, 1240 bp, Artificial sequence
  DNA replication origin
gcggcagcagaagcggcagcggcaaagcacccgcagaatggggtatcgcgaaatagtttcttctcctcctcctcctgctggtggtgcagccgcgacagcccgtcttccaggcaggggtttggagcttgccttcctctcggcgcgcacagcaagtcccagagcccgccggggctgcccgagcaggtggtgcagggatgccggggtgttggagaaggtgcgggcgagggctgcaaggagtgggtaggtcacggaggggaagggctgggggagaggaggagcaagcaagcagcactgccgctcgcgcccggggtgtctcggggtcctgggaggggaggtagaagcagtggaagcagcgctagtggcggtagcagcggcagcggcggcggcagtggcggctcccggatgctccggctgcagcggcggctgtggcggcagcggcagcggcgacggcggcagctctacgaagcaccagacacaagggcaagctcagagcggcggaggccccgcccccaccccggccagggacagacaccgccccccggccaatggaaactcccccgcccaccaggtctggccaatgagagaaggggatgggtggagacaagcgccgggaaaaacaaacaggcttctcaaggacccttcgggcaggaagaactgaagcccccattcagcacccctggcggatcttacctctttagagatgtctcgcccgaacttgcaggcgagacaactgccttcattaatcagcgctttgcactcaggaagggttcagccaatcgccaccgcgagggggcggggttagccgtgtccccagcatgttctggaattcgtggtgcctgggccaggtcctgggtgcgaggttcttctgcgcatttggactcctagagcagatggtggctgcacctgcccactcaccagctgcagtagcaatctctgacgattccagcagcaaaagggaaagattgcagagggcgtgggagaggctaagtatagggagtggaacacctacctgcctacaagaacttgtgcaaaaaaggaaaaacaagtggaggaaataattttgttgttgttgttgttcagaggttttacttagtctaggtataaatctcagtagagcttggtgagtagcagtgctggcactggcatcaggcagcctttggttcaaatagcatagctgtcgcttcatgttttataatatttgatgatttacttgaacgtttaagtctaaagcctcctcaac

SEQ ID NO: 7102 - DNA, 1623 bp, Artificial sequence
  DNA replication origin
cctccaaaaaagagggtctggagaaaagtgaacccagattccttagccatccggcatccaaacccagtgatttgcataataacagcgttttgtgcggtttccctccactgctgcggtcgcagaggttcttacatttcacgtgaaaggataatattaattacggaaagaagcggcagagagaggatggagaggtaggaaatctaagtgaaaatatcttagcagtaaagtaactgctagggagcatatatttctttggttaaaaaaaaaaagaaacgacacagactgaataataaaaagtcaatgtgttgataaagtgggtttgggtcttttaatttttttgccttttctcccctttcttaaattcttggtttatttattcattcattcactcattttttcttttttcttattctttttcctttctttttcttttcttttctttttttttaaatcccagacagagtcccctctctcttcctaggtaaatgacacgtctcagaacacatttcccccccggggatgttattgcaatgcacacggtgctgtcgctgctgctgttctcgcccgtcttggtagctcgctcccaggctctcacacactttttaaagacacacggatatgatgatggtgggaagagggggaaaagaaaaggcgacctgaaaagggggaggttaaagagatgacaagagatggagagggtcgctcaagagcgtgatgtgggaggtggctggtgggggttgtcgggagggtggaatgttcagagaggcacaagttgccagccaaaaggcgtgggagggggatgctggcgggaatggagtgagatgaaggaagctcaggtgaatgagaaggcaaaaggtgccgcgtaaggggctgactgctgggaaggcagggctgagccagtgttagaaattcgaggggctggtgcaaactgccactgccccctgccgcaccagagagtagggggagggggtggaaatcgctggggacagggagactgggaggggagagtggaaatatggggtggaatggggaagatggggaatgggcgagaagttgatgttccctgcgccggggcggggattaccttgtagcaggagcccgcagacactgtagaagcggagaacggcgctgcgtttccaaatcatggtcccttctctaaagggctggggaaggaacgagggggcaagtagatgctggtgagcggggcacgagagtgcagggctccgctggtgtcctcctcccggcgcccgccggacccaccgtccccaccgctgcggtgttcgaacccgcggactcggatcggcggcagcagaagcggcagcggcaaagcacccgcagaatggggtatcgcgaaatagtttcttctcctcctcctcctgctggtggtgcagccgcgacagcccgtcttccaggcaggggtttggagcttgccttcctctcggcgcgcacagcaagtcccagagcccgccggggctgcccgagcaggtggtgcagggatgccggggtgttggagaaggtgcgggcgagggctgcaaggagtgggtaggtcacggaggggaagggctgggggagaggaggagcaagcaagcagcactgccgctcgcgcccggggtgtctcggggt

SEQ ID NO: 7103 - DNA, 1207 bp, Artificial sequence
  DNA replication origin
ctctggccatgcctgaggagcccttcagcccaccgctgcactgtgagagcccctttctgggctggccaaggtgggagccggctccctcagcttgtggggagatgtggagggagaggcatgggcaggaactggggctgtgcgcagcgcttgtgggccagcgcgagcatgggctcggtgggccccacacttggagcggccggccagccctgggcagtgaggggcttagcagctgggccagcagctgctgcgctcaatttctcgctgggccttagctgcccgtggggcagggcttgggacctgcagcccgccatgcctgaccctcccccgacccgctgtgggctcctgcgtggcccgagcctccctgctccacggcacccagtcccatcgaccgtccaagggctgaggagtgcgggcccatggtgcgagactggcaggcagctccacctgcagccctggtgcgggatccactgggtgaagccagctgggctcctgagtctggtggggacttggagaatctttatgtctagctaagggattgtaaatacaccaatctgtactccgtaactagctcaaagtttgtaagtgcaccaatcagcaccctgtgtctagctcaaggtttgtaaatgcaccagtcagtggtctgtgtctagctaatctagtggggacttggagaacttttgtatctagctcacggattgtaaacgcaccaatcggcaccctgtcaaaatggaccaatcagccgtctgtaacatggaccaatcagcaggatgttggtggggccagataagggaataaaatcaggctgcctgagtgagcagtggcaacccgctcgggtccccttccaccctgtggaagctttgttcttttgctctttgcaataaatcttcctgctgctcactctttgggtccacactgcctttatgagctgtaacactcaccacgaaggtctgcagcttctctcctgaggcctgcaagaccacaaacccaccgggaggaacgaacaactccagatgcgctgacttaagagctgtaacactcactgcgaaggtctgcagcttcactactgaagccagcgagaccacgaatccaccagaaggaagaaactccaaacacatccgaacatcagaaggaacaaactccggacacgccctctttaagaactgtaacactcactgcgagggtccgtggcttcatttttggagtcagt

SEQ ID NO: 7104 - DNA, 1259 bp, Artificial sequence
  DNA replication origin
tccctgagccgctatataagcgcggcagggaacatccggaggggctgaagatgaaggtgcccgcgcatgggcccccgctgattgccagtccctcccgaccccgcgccccgcgcggagcccgaggccgccgaggacccgccttcgccgcagtagcagctggagcagcgacagaggcggcagctgcggcggcggcggcgcccgcgcccctcgcgccagcgcgtagagcggcggcggcagctcgggggccgccactgccccggctgccatgagttgtgcggaggtgatgtatcacccccagccttatggagcgtcccagtatctgcccaaccccatggcagcgacaacctgccccacagcctactatcagccggcgccccaacctggccagcaggtgagtcaccggacgggcagcctgctgggggcgggggcgaagggcatcgagagtatcggtctggggctcggcgacgtcccgccggcacgcgtggcgcagaggatgctctgggatctgcgggagcgtccttgagcagaaagccatcccgagagagccgggaagggagagcagcagggtggacgggtgggtgaggcatgacctagctgggggcttcattgagctgtggtcaccggagctcagaggctgctcctcctaggcaccctagctcttaggactcagttctctgaagctcaccaagggcatctatcttaggaccatgtgagtaaacttcctttcaaccaactattttgtttatttggaaagatggaatgtttcagggttttattgatgaggaagatgaagtgcgctgacagaggtaggggaagctacctggagagtgagttcacgaaatgatctgggactttcatgggggaacactggtctagcataatgtctatcgggtgttactagaacttctccacagaatctttctcccggtgactgtgacttagaggacagggatggattccaaggttcttcattcattttttaattccagcaaagcacagagtttgtacgtgttcagtctgttgacagtgggtccctcggccaaaaggttaccttgaatctctggatgctgagtctccactcttccaagagtaactgaagatgtccataataaggggtcgtgaactgaggagatgatatagttactttagaaggaacagtagagttctggggaatttggcacgaggcgcccttggacattactctctggatacaacggagagtgtgccaaggcttagttagtgctacattaaaataaaaa

SEQ ID NO: 7105 - DNA, 1100 bp, Artificial sequence
  DNA replication origin
tcttggctaggcatgatggctcacacctaaaatctcagcatcccagttctttgagagatcaagggaggaggattgctggaggccaagaccagcctgggcaacatagcaacaccctataattttttttttaaattacctgggtgtgatggcacaggcctgtagtcctggccactccagaggctgaggcgggaagattgtttgagaccagaaatttgaggttacagtgagctatgattgcaccgctgcactccagcctgggtgacacagcaagaccctgtgtctaaaaaaaaggagaaatctctcaactcataatctaaacccagcaagaatgctttcataaaaatggagaagaaagatattttacacatgaacaaaaacacataattcattgccagcagaagtatgtcacaaaaaatgtgaaacaaagttattcagatagaagtaatatggcgctgaaacaggaggagttcccttatctccctcgcgggcgcgcggtgtggttcacatctaggggggagaatgcagatgggtgggttgtggggagcgtttgggggctccgaccccatggcagtgtctagaggcaaatgtttacagctctcgaagccccactgggcctgtgttacagtgtgctctttcagttttgctgtctgcaggcggcttgcgttgatcagctcagttagaccctccaccttatggcaaagacagagggctttctgtatcctgggttcttgccctagggtactggaaaagtcggatcacacgtgggcttggaggatgggtgaaaggttttatcgagtggtggaagttgctctcagcgagggagatggggagccagaagggggatggagtgggcaggtggtcttgagggtggagctgggccactcagcggccagactctcttttgactatccctggccgaattccatgttgtcccacagtcgatgggctgcgggcgtctgtggtgtctgtcggtgtggtgttctgctcctttgcgcctcttgacgtctagtgcttgtgtgtgtacccgctacggtctctcgggtgtatatggccataggatagggggtgtggtgggccagaatgctctcggaaaatgcaac

SEQ ID NO: 7106 - DNA, 987 bp, Artificial sequence
  DNA replication origin
tccccaggcaggtcatcccaatgtctctgtgagtctggctgagtccaggatttttataggcttcagaagggaagaagtgagtgctgattggtttatgggtgggcctagaaggagagagggagagagggaaagaaagagagagatgggaaagactgaaggtcctattgctgcaccctaatgggcaatcagggactggagtggaaagaaggatggaaggaagggagggagggagggaggaaggaaggaaggaaggaaggaaggaaggaaggaaggaaggaaaagagagagatgggaaagactgagggtcctagtgctacaccctaatgggcaatcagggactggaggggaaggaagggagggaaggagggagggagggagggagggggggagggagggagggaggggggggagggagggagggggggaggaaggaaggaaggaaggaaggaagggaggaaggaagggagggagggagggagggagggagggagatgggaaagactgagggtcttagtgctacaccctaatcggcagtcagggactgaagtcagtccaggggcctttggataataccaaggagtagcctcagccagataccttcagttgccccaggacctccttccaatccacacaaccgctagacctccatgaagggaaactggattggaacaaagcccacattcccaacaccagagggtgatgggggattgacagtgttctccctggcaagcctgtcctctgtgtcctaagtccggcagccacgatagtcatttctagttggccgacagagacccagtattttcctttcattctgttgactgtggagtttagggactctgaaaaatgaacagaaagcagcaaatccactagtactcacccttccacagatcctggatgagcccctaaaaatgtcacaagatccttaggttgtcacttttccagtcagaagcctctgtggccagtagcacctttgcctgaattttactc

SEQ ID NO: 7107 - DNA, 1096 bp, Artificial sequence
  DNA replication origin
ccgatcgagccccgcggcggccgccgtgtcccccgccgcgccccgtccgcctgcaccgcctatggcagagcccgtaggcggtccccagcaaccgccgagcagcattgaccaacagacggccggtttatcaaacagactgtcgatttcaccaatagtagtggaaaggcgggcatgaacatgattggcagcttgcgtcttccaataaaaactgggggcgtgggtgggcggagccggaagtagagcccagccgagaggcccctgtccggctagggaggagggaagggggagggaactagagaggaggaggaggttagcctaggcatctacggcggcggcggcggcgcaggggctggtacgcgctgggcggcgagagcctcatggcggaggaagagagcgaccaagaggccgaacgcctcggagaagagcttgtggccattgtggagtccccgctgggccctgtggggcttagagctgcgggcgacggcagaggcggcgctggcagcggcaactgcggcggcggcgtcggaatcagcagtcgggattactgccgacgcttctgtcaggtgaggcgtccgttggccgccccgacttgtcacccgggtcctgggcctctctgcgtctcctggtcttctcgtccatgaatctggtctatgtccagtgcccgctcctccccaacaaggagggtgaggctgaagctccctcctccacttatccggcttggggtggggggcggggagcaaggcgagggtgacccacgggcttagggttgctgagaaagtgagtttgtcggggatggaggggctggaaagaaggaaggtcggctgtccggaaagctctgtcctgacatgccttccctaccccaaacagaccttcctgcccgagagtcccgcctttcttatgtttcctaccctggtctttctcacctcatttggcacctctggtaacattttctgccttcccctctccgccgattgccccccgtgttctcccctttttttccgggatgggagacatgccatctttcctgtcactgccactgttccccctcttctagggtctcctgtcatcccctcacaagatcccgctgggccggttc

SEQ ID NO: 7108 - DNA, 1054 bp, Artificial sequence
  DNA replication origin
ggcagaggcgctcctcacttcccagacgatgggcagccgggcagaggcactcctcacctacccgatggggcagccgggcagaggcgctccccacttcccagacagggtggcggccgggcagagacgctcctcacctcccagatgcggtggcggccaggcagaggcgctcctcacctcccagatggagcggccaggcagaagcgctcctcacttcccagacggggcagccaggcagaggcgctccccacttcccagacggggtggccgggcagaggcgctcctcacttcccattcagggcagccgggcagaggcactccccacttcctagatggggtggcggctgggcagagacgctcctcacatcccagacggggtggcggccgggcagaggcgctcctcacctcccagacggggcggccgggcagaggcgctcctcacttcccagacagggcggccggccaggggcgctcctcacatcccagatgatgggcggccaggcagagacactcctcacttcctagacagggtggcagccaggcagaggcgctccacacttcccagatggggcagccgggcagaggggctcctcacatcccagacgatgggcggccaggcagagacgctgctcacttcctagacggggtggcgggcaggcagaggctgtaatcttagcactttgggaggccaaggcaggcggctgggaggtggaggttgtagcgagccgagatcacgccactgcactccagcctgagcaacattgagcgttgagtgagcgagactccgtctgcaatcccagcacctcgggaggccgaggtgggcggatcacccaaggccaggagctggagaccagatcggtcaacatggcgaaaccccatctccaccaaaaatacaaaaaccagtcaggagtggcggcgcgtgcctggaatcccaggcactcggcaggctaaggcaggagaatcacaggagcccgaggcagggaggttgcagtgagccgagatcatggcagtacagtccaggctcggcaagagagggagactgtagaaagaaagaaag

SEQ ID NO: 7109 - DNA, 1202 bp, Artificial sequence
  DNA replication origin
gaggagcgtctctgcccagccgccaccccatctaggaagtggggagtgcctctgcccggctgccctgaatgggaagtgaggagcgcctctgcccggccaccccgtctgggaagtggggagcgcctctgcctggctgccccgtctgggaagtgaggagcgcttctgcctggccgctccatctgggaggtgaggagcgcctctgcctggccgccaccgcatctgggaggtgaggagcgtctctgcccggccgccaccctgtctgggaagtggggagcgcctctgcccggctgccccatcgggtaggtgaggagtgcctctgcccggctgcccatcgtctgggaagtgaggagcgcctctgcccggccacccatcgtctgggaggtgaggagcgcctctgcccggccgccccgaatgggaagtgaggagcgcctctgcccggccgcgccgtctgggaagtggggagcgcctctgcccggccgccccgtctgggaagtgaggagcgtctctgcctgcccgcccctcgtcggggaggtgaggagcgcctctgcccgccgccgcatctgggaggtgtacccaacagctccgaagagacagtgaccatcaagaacgggccatgatgacgatggcggttttgtcgaaaagaaaagggggaaatgtggggaaaagaaagagagatcagatggttactgtgtctgtgtagaaagaagtagacatagaagactccattttgttctgtactaagaaaaattcttctgccttgggatgctgttaatctataaccttacccccaaccctgtgctctctgaaacgtgctgtgtcaactcagggttaaatggattaagggcggtgcaagatgtgctttgttaaacagatgcttgaaggcagcatgctcattaagagtcgtcaccactccctagtctgaagtacccagggacacaaacactgcggaaggctgcagggagctctgcctaggaaaaccagagacctttgttcacgtgtttatctgctgaccttctctccactattatcctatgaccgtgccacatccccctctccgagaaacacccaagaatgatcaataaatactaaaaaaaaaaaaaaagaaagaaagaaaaaaaagagttaaaatgccagagcccccaactgatctgtagatttaaggcaattccaaacaaatcccagcatgagtctttgtagatata

SEQ ID NO: 7110 - DNA, 960 bp, Artificial sequence
  DNA replication origin
cagatggggtggccgggcagagacgctcctcacttcccagacggggtcacggccgggcagaggcgctcctcacatcccagacggggcggcagggcagaggcgctccccatatctcagacgatgggcggccgggcagagacgctcctcacttcatctcatacgatgggcagccgggcagagacgctcctcacttcctaaacaggatggcggctgggcagagacgctcctcactttccagactgggcagccaggcagaggtgctcctcacttcccagatggggtggcggccgggcagaggctgcaatctcggcactttgggaggccaaggcaggcggctgggggaggtgggggggtcagacccctgcccagccagccgccctatctgggaaggaggtggggggggtcagccccccgcccagccagccgccccatctgggaggtgaggggcgcctctgcccggccgcccctactgggaagtgaggagcccctctgcctggccaccaccccgtctaggaggtgtaccgaacagctcattgagaacaggccatgatgacaatggcggttttgtggaatagaaaagggggaaaggtggggaaaagattgagaaatcagatggttgctgtgtctgtgtagaaagaggtagacatgggagacttttcattttgttctgtactaagaaaaattcttcagccttgggatcctgttgatctatgaccttacccccaaccctgtgctctctgaaacatgtgctgtgtccactcagggttaaatggattaagggcggtgcaagatgtgctttgttaaacagatgcttgaaggcagcaggctcgttaagagtcatcaccactccctaatctcaagtacccagggacacaaacactgcggaaggccgccgggtcctctgcctaggaaaaccagagacctttgttcacttgtttatctgctgaccttcccttcact

SEQ ID NO: 7111 - DNA, 1075 bp, Artificial sequence
  DNA replication origin
aaaaaaaaaaaaaaaaaaaaagaggaaaaaaaaggccatttatttccttccatatggactaaagaaacgcccgggcgtgaacgcggaacaccgccgggtagccaggcctccgggctgccaccacttgcgggccggcgtggcggggcggggcgggggctggagcacggcccggagcgtgcccacgctgccccgcctccagccgctgcgccgcaacgcagtgggctcgcggccgcgagcaacaggccgtgccgggtgagtggggcgctctcgtgggcatcccagcgccggggcaggccgggtagtgcccgatcccgcggggcgcgcgctgctgctttaggcacccgggctcgggtgcgggtctgggagacctgtcggtcggcgagaagcctcggtggccggcgctgtggttgcgggacctgggacgcgctcccaggcgtcccacctccccggagactggggcagggtgggtggggcccggatctaggggtagggtcgcggaagccttggttacagagagtcgcacacgtggcctgctaatggtcgcgacaccggtgacgagcgcacggaaagtttggaggcttagcaaggagggtggtgccggcctccgcccggtggtggcagaactgcctgtgcgagcacggcttccacgtgggctgcgccgccgggcgtcatgtcgggcctaagagacacgctctacagctgtgaaatctgaagttcaggtgtgtggggagaagggcagctgcattacatcatatgcttccaattcatttaccagcaaataattccgcaacgattggccgacagctgggttgtccaacaggttactgagaccaggttattcactgttttcaggaaggatagactgggaggaagaggatctgatttcgccactcattagctgtaaatctggtgcctcgggtttcatgtcactgggctcatctttgagcagaggaacctgatttactcagcttcttctgctggtactggtttttgcctcctggacatcaagctttgtaacctcatggtcacgaaaatacattgaggtatagtccgtttcctctctaaaatcagacta

SEQ ID NO: 7112 - DNA, 1497 bp, Artificial sequence
  DNA replication origin
ggaaagtatgaaagccaaaccttgggacccgaagagtaatatgtctgtgaaggtaccatcactgtcgggcaccccctacagaaggacgcataatagatacatccccagagacagtattttattttatttttagtagagacgaggtcctgttatgttgctgaagctggtcttgaactcctgagcttaggcaatccttctgccttggcctccgaaagtgctgggattacaggcatgagctaccgcacccagccaagaaagaaaatagctatttttcctctttccaagcaatggtcaacaccagggatacattttctatagacctgctgttcttccagttctgagtgtctcggggagagaggtggttggaatatgtacatgaacatgatggtactgggtggtagtggtgtgtggtggtggatagtaataatgtgagatggatggtggtggtaggtgatggaggtggtgaattgtggtggtgggtggtgggtggtggtggtggtgaatggtggtggtgggtgatagatggtgggtggtgttgggtggtggtggttatggtggagagtggtggtgatatgtggtggtgggactgttggtgaatggtggtggtaggtattggtgtctggtggtgatggtagatggtgctcatgatggtggcgtttggtagtggtggatggtggtcatggtgggtggcggtaagtggtggtggtggatggtgacagttgatggtgagtggtgggtggtaggtggtgaatggtggtagtggtggatagtggtggtgggtggtgagtagggtagaggtagtgagtggggatggtggtggtggtaggtggtggtgggggtggtagttggcagtggtcatggttggtggtgttggtagatggtgcatggtggtgcgggtatatggtagtggtggtgggtggtgagtggtggtgatggtggtggatggtgttggtgatgttattggtggatggtgggtgacggtggtagatggtggtgttggataatggtggtgggtgatagtaggatgtagtggtggttgatggtggtgggtggtggttagtaatgttagtggatggtggtggtgttggtggatggtggtggtggatggtggtgaacagtggttgatgatggtgttgggtggtggggatggtggtggtggatgtggggatggtgtggtggtaggtggtaagtggtggttggtagtaagtggtggtcagtgggtgagtgggtggtgtgtggtggtgtttgatggtggttaggggtagatagtggtagtgggtggtaagtgatgggtggttagtggtgagtagtggtggtgggtggtgggtggtggtggtggtggatggtggtagagggtggatggtgctgggtggtggatgatggtgggtggtggatggtagtagtaatggtggtaggggggtgatgaaaacaagttttgcctgatttgttttcatagagaggaactccatagcgaggcctaacattccagccctttct

SEQ ID NO: 7113 - DNA, 1611 bp, Artificial sequence
  DNA replication origin
ggacgccgcaggcggcgataggatccggactacagctcccagcgcgccccagttcccgcccccgcctccggagcccgacgctgcagcggctcttctcgaaaggttctttccgcctgtgcagctcgccggctcaatactccgggggtctgggtggggggctcaaacgcagggctctgggacgcaggcactgctccaggtgatagtgcgggaacatggccttgcagctgggcaggctgagctcgggcccctgctggctcgtggcgcggggcggctgcggagggccccgcgcctggtcccagtgcggcggcggagggctccgagcctggtcccagcgcagcgcagccggacgcgtctgccggccccctggcccggctggcacggagcagagccgcgggctggggcacggctcgacgtcgagaggcggcccctgggtggggacagggctggccgcggcgctggcggggttggtggggctggccaccgccgccttcgggcatgtgcagcgggcggagatgttgcctaagacctcggggacgcgggccacttcgctggggaggccggaggaggaggaggatgagctggcccaccgctgcagcagcttcatggccccgcctgtgaccgacctgggcgagctgcgaaggaggccgggcgacatgaagaccaagatggagctgctgattctggagacccaggcccaggtgtgccaggctctggcacaggtagacgggggcgccaacttttctgtggaccggtgggagaggaaggaaggtaaggaggccggcccctggcgggagttggagacagggaaaaagggtcaggttccaggttgcagacagaaaatataatagttcacaatatgggatggggtaggtagggggtacccacagagaggccgcttggttagaggccgctgataaaaagatggacacgaaagggtcactagccctctgcttgcaggtatggacccggatcagctgtcactgtagtactgcatttcaaaatctttgcaattccgtagcagcatttttttgtagaactcttaaggggtatttgcagctaacaagcttagatgtccaaagttcgttactgaacataaatttcaatagattatggaacacattttctctccttctctgggtgaatttgccctttttcctctttaggagatggaaagaactcatctcctgtgcgctaagtgtcggctaaactcctccagccaggatgtcattgtgtcagaatcttcccacttctttttactgttacacaagatatatttgattcgtttctcagtagcactaccaaatgcacgcatcagatttcctgctaggaaaatcttctcttccaatatcaaaatacttgagcatcaaaacccagttctcgtagaggcgtacattcatgaccatgttgttgcccatacagtgaaaccccacatcttgagtggaaacttgaaagattcctgacttttcctagctggaaatacaacagcagcttctcaccggcagattttgagctgtgatactgacacatctatattaaatgaagttcagtctagttttccatcttatgttttcaagcaaagaccactgaaccaggacacaacctcaagtacta

SEQ ID NO: 7114 - DNA, 1224 bp, Artificial sequence
  DNA replication origin
gcgaagtggcccgcgtccccgaggtcttaggcaacatctccgcccgctgcacatgcccgaaggcggcggtggccagccccaccaaccccgccagcgccgcggccagccctgtccccacccaggggccgcctctcgacgtcgagccgtgccccagcccgcggctctgctccgtgccagccgggccagggggccggcagacgcgtccggctgcgctgcgctgggaccaggctcggagccctccgccgccgcactgggaccaggcgcggggccctccgcagccgccccgcgccacgagccagcaggggcccgagctcagcctgcccagctgcaaggccatgttcccgcactatcacctggagcagtgcctgcgtcccagagccctgcgtttgagccccccacccagacccccggagtattgagccggcgagctgcacaggcggaaagaacctttcgagaagagccgctgcagcgtcgggctccggaggcgggggcgggaactggggcgcgctgggagctgtagtccggatcctatcgccgcctgcggcgtccctgcgcggggcgggagataagaatccgacgcgcccagaagggctggtccgaagggaagagagtggggcggggacggtgctgtggaagggacgggagagataaaagaggctttcttgtcacgtacaacctcgggtcggctgtttactcagccaaggagagaagatagagtagggctgggaggctgagggcggactggggcggaaatgtggcagagatcccagtcccgcttacattttcaaacaggatttgcgaatacagagcctggctcaggatctgtatagacccgcccttcgccctgggtcctggtcctctagagtttttagaggggatgggcaggctgggaaactctttgctgaaggatggttttctaaagagagtgggagaagctagtaatggactcggaagagagtcgaggagaagactttctgtgatcgagtccacatcacagttctgtccttaagatttccccaggctggggccgggcgcggtggctcaagcctgtaatgctagcattttggaaagccgaggcggttggatcacatgaggtcaggagttcgagaccagccaacatggtgaaaccctgtctctactaaaactacaaaaaaatagccgggcgtggcggcgtgcacctgtaggctcagctactcgggaggctgaggcaggagaatcgcttga

SEQ ID NO: 7115 - DNA, 1390 bp, Artificial sequence
  DNA replication origin
cccacccccaaccctgagcctcagaggctgcaaagccggagggtcggggcagcacagaccccaggccgcccggaccccggcccagaccggtcttcccgcacccccaatttccctcacccgggcagtgcaaacccgcagcgaagccggccggcaagagtgacccgccgaggcccaggagcgacgaccgcagaggcgcaccgggctccgagacctgaggggccgctgctccagccggctgctgcctctctcgcggcgcctgccacatcgggccgcagaagcccgaggccggcagaaaccaaaggaaggtggcgcgggccaggggcggcgcgggcacgattccttccccgcggatctggcgggggagcagaggagggagcagccctgcccggagtctcaggctcccgccagccccaatcccgggcgactgcgccgagcgcctccggagtcgcgggaagctcctcctgctccgcggctggcgccagttgcacggtggccgcccccaaattcgaggaggaaggtgcaaagtggtgggaggctgcgggtctcccggagggtgaggcgttggggaccaggcgggagcacagccgaacccctacctttcgggcggggcggacaccagccgcgcgccctcgccgggcgccgggaccggaaaatcaccgcgaagggagggacgaggaaaggcggcgggtggcttcaggacaaggtaggaggatcgatttccacagccaagaagacactcccatcccgccctggtttgtttggaaagctgcaggagctaaagtgaggggtggccgggtactccccttccccgcccggctggcaggcggcagaagtaaacactgaggcttgtggcgccgcggactgactgtgacacaaggctcagcagaaggtttggtccctatcagaaggggaggagtgttcagagagctcctgaattccggggctctgcccttcaagggcaaatgtgttcgtactttttatcttttgaaggagataaattactttagggagaacgaaggtggaacgtgctgtttgcgttttcttttctctccataggcaaaaccctacgttattaatgtcctcttacttggatggctctgaatactttttaaagtgtgtttgtcaaataattccttgtctagaaacattcaagtcatagctccaacctttgggccctgagcagtgtaatcacgtgccatcaattgaccccagagagaagacccacggacttggatgtaattcaaagttggcaatgtgtcacgaactggaacaaagtccttcatctgtgatgggctttctggtatttgtccttttttttttttttttttttgagacagaatcttgctttgtcacccaggctggggtacaggggcatgatcttggctcactg

SEQ ID NO: 7116 - DNA, 887 bp, Artificial sequence
  DNA replication origin
tcctttggtttctgccggcctcgggcttctgcggcccgatgtggcaggcgccgcgagagaggcagcagccggctggagcagcggcccctcaggtctcggagcccggtgcgcctctgcggtcgtcgctcctgggcctcggcgggtcactcttgccggccggcttcgctgcgggtttgcactgcccgggtgagggaaattgggggtgcgggaagaccggtctgggccggggtccgggcggcctggggtctgtgctgccccgaccctccggctttgcagcctctgaggctcagggttgggggtggggacacggagcgctgtttgcccctccacatatcctgccagcaccaaggaggtggcgtgcggaggcgtaaagggaccatgggcgctgggacccgcgagccagccggcgtgcgccgcagccaccgccgagagggcacccggggatcctggagccccagtgaagggcgggagggacgcgcagcctcgcgggtaagcccaggagccgtgggggccgagagaatctgctctgggaccctcttttgtcgaatcgccggcgaggttgtgcaattgggaagccaagaggagtgtccagctcctcgttcactattgttttcttgtaaaagggtctgtacgcgaggagggttgaggggtctggaaggttctggtctcttaccgtataaagtttttcgagaaaccctttttccctccacaatggaactagacctaacaaaacaagctccgaggcagtttaggagaaaggaggacggtgagtaaattgcagtgtttgggctgctgttaattttcaagataagggagaagcaacttgtcattttgaggccgccggctccggagatcccggcaatctcaagcctctttcttgtgtgctg

SEQ ID NO: 7117 - DNA, 1041 bp, Artificial sequence
  DNA replication origin
gggtgtcggccccccgcccggccagccgccccgtccgggagggagatggggggggtcagcccccccgcccggccagccgccccgtccgggaggtgaggggcgcctctgcccggccgcccctactgggaagtgaggagcccctctgcccggccagccgccccgtccgggagggaggtgggggggtcagccccccgcccggccagccgccccctccgggagggaggtgggggtgtcggccccccgcccggccagccgccccgtccgggagggaggtgggggggtcggccccctgcccggccagccaccccgtccgggagggaggtgggggtgtcggccccccgcccggccagccaccccgtccgggagggagatgggggggtcagcccccccgcccggccagccgccccgtccgggaggtgatgggcgcctctgcccggccgcccctactgggaagtgaggagcccctctgcccggccagccgccccgtctgggaggtgtgcccaacagctcattgagaacgggccaggatgacaatggcggctttgtggaatagaaaggcgggaaaggtggggaaaagattgagaaatcggatggttgcggtgtctgtgtagaaagaagtagacatgagagacttttcattttgttctggatctcaaatttcataacgcatgggcccttttcaccaaaaaataatttccatgggttccaattgagtagcattaactgtggaactaacgttccatgttatacaaatttcatccacagacttccacctctggcaattactaactggtaccagatctaccctcctctgccactgtaaacaatcagaaaactgagcaaaatattggaggcaaccattttcaggcaagggacaacaggcagtgcagaaccagagcacctgccggcagggaagcagctggtaaatatgtggatacatacaaaacagcagcttttcttttgtcctcttaatttccttaagatgcaagtggctatttaaaataataatattgcaaggtgaggtttacatacacacacaca

SEQ ID NO: 7118 - DNA, 1441 bp, Artificial sequence
  DNA replication origin
gacggggcggctggccgggcagaggggctcctcacttcccagtaggggcggccgggcagaggcgcccctcacctcccagacggggcggctggccgggcggagggctgacccccccacctccctcccggacggggcggctggccatgcggggggctgacccccccacctccctcccggatggggcggctggccgggtgggggtgctgacccccccatctccctcccggatggggtggctggccgggctgaggggctcctcacttcccagtaggggcggccgggcagaggcgcccctcacctcccggacggggcggctggccgggcggggggctgacccccccacctccctcccggacggcacggctggccaggccgggggctgaaccccccacctccctcccggatggggcggctggtcgggcggggggctgaccccccccacctccctcccggacggggtggctgccgggcggagacgctcctcacttcccagatggggtggctgccgggcggagaggctcctcacttctcagacggggcagctgccgggcggaggggctcctcacttctcagacggggcggttgccaggcagagggtctcctcacttctcagacggggcggccgggcagagacgctcctcacctcccagacggggtctcggccgggcagaggcgctcctcacatcccagatggggcggcggggcagaggcgctccccacatctcagacgatgggcggccgggcagagacgctcctcacttcctagatgtgatggcagctgggaagaggcgctcctcacttcctagatgggatggcggccgggcggagacgctcctcactttccagactgggcagccaggcagaggggctcctcacatcccagacgatgggcggccaggcagagacactcttcacttcccagacggggtggcggctgggcagaggctgcaatctcggcactttgggaggccaaggcaggcggctgggaggtgtaggttgtagcgagccaagatcacgccactgcactccagcctgggcaccattgagcactgagtgaacgagactccgtctgcaatcccggcacctcgggaggctgaggttggcggatcactcgcggttaggggctggagaccggcccggccaacacagcgaaaccccgtctccaccaaaaccagtcaggcgtggcggcgcgtgcctgcaatcgcaggcattcggcagactgaggcaggagtatcaggcagggaggttgcagtgagccgagatggcagcagtacagtccagcttcggctccgcatgagagggagaccgtcgggagagggagagggagagggagagggagccttgggatcctgttgatctgtgaccttacccccaaccctgtgctcccttctttctttctttctttttctttctttccttccttccttccttctttctttct

SEQ ID NO: 7119 - DNA, 1150 bp, Artificial sequence
  DNA replication origin
tggccgaggattggccgcggtgcctagggggcgtggccggcgcgcgcgagagggagcgcgagggagctggctgcgggcctgcctgccagctagccggagccgcgggtgagcgcggcgagcggcgaccctggtgaggagcgcggcgcgggaggcacgttccttagctccgccgcggccgtcctccgcggctcgaggactccgcttccttccctcccctcccctgcgctccggcctggggtctcggcgcggggagcggagggaagggacgaaggaggagtaggtgaaagcggggtgaggggcggaagggtcccggcgcggggtgaggcgagggctgcctcttgttctcccgccgctgccgccgtctcctggtcgggtgccgcggccagaggcgcgcggggctgccgaggcacccgcactatgcaggcagactgccggccgccgcgatggcgagccgggcggtggtgagagccaggcgctgcccgcagtgtccccaagtccgggccgcggccgccgcccccgcctgggccgcgctccccctctcccgctccctccctccctgctccaactcctcctccttctccatgcctctgttcctcctgctcttacttgtcctgctcctgctgctcgaggacgctggagcccagcaaggtgagtggtcccaggggagtgagcggcgggggaacctccgtcggggctgcgggtctcttggcccctgaacaaatctgcagacgctgcagggaggcgcggtgcgctttcgtgcgtggccggacctggctgggtactcacggggttgagttgcaaaggcaaggtcttgcccgtctgtcccccaagttggcgcggctttactttttggcaaggccatttatttttctgaaagggggacgtgagaccctgctatgaaagcctcgttgatattaggtccttctggggaaaattttggggaggaaaaagaacctttggaggtaatgacccctaaagttaagctgcacggatggatggacactgtaggaaggcaggttaattaaatagcatcttaagcctattaaaggtaagtggtggtaattatgatcctttgtgaaagagcccgggttctgaagcgaatggaatagtttctgcttatctctgagtcttggattcagaacatgttctt

SEQ ID NO: 7120 - DNA, 1481 bp, Artificial sequence
  DNA replication origin
cggcggccgcggcccggacttggggacactgcgggcagcgcctggctctcaccaccgcccggctcgccatcgcggcggccggcagtctgcctgcatagtgcgggtgcctcggcagccccgcgcgcctctggccgcggcacccgaccaggagacggcggcagcggcgggagaacaagaggcagccctcgcctcaccccgcgccgggacccttccgcccctcaccccgctttcacctactcctccttcgtcccttccctccgctccccgcgccgagaccccaggccggagcgcaggggaggggagggaaggaagcggagtcctcgagccgcggaggacggccgcggcggagctaaggaacgtgcctcccgcgccgcgctcctcaccagggtcgccgctcgccgcgctcacccgcggctccggctagctggcaggcaggcccgcagccagctccctcgcgctccctctcgcgcgcgccggccacgccccctaggcaccgcggccaatcctcggccagctctggtccgtctccttccgcgaaacccaatcagcatgctcgctcctcgctcgacccgctagttctccggcccattcctcgagctccaccgccccttacctccctcttccaatccccttcggcctttggaggcgtcccacccgcctcctccaatccaggtcccgccctccagcttcggatccccgcggcccccgcccggcccgggcgcctgttattgttgggccctcagcccaaactgatcccgcagaggcggcagccagctcgtcagtgacttccgggacgtcccccatcccgcgctccctgctcctcaggcccagcttgctccttgctcctttctcctcgctcctccgacgcacatcagaccactggaagggggtgggaaacctggatcctgggttgttttagctgggagctgagtctaagggactttttttttttttttaatggcagagcgtggcttgttttgttaaaactgccgccagttgttgcaacagctccgagttagaataatagatgcagtgttcagtttttaatatatgtgttccctgttttctctgctctttttatggcggggggtgggggacaaaaaagtgtaaaacaagatccgtgccgcaaaggcaatttaaacctaacatcccaaccttcatgcagccattctacaaggagttgttgagcacctgctgtctatctacagaaatcttgaaatgtggaacagagatggaaatatagcatgcaagtcagaatgaagtaagtgctaattagagtcacaagcagtttgatggagactgtaagcctatggaacgacaaaaagaattttaggaaagaggaatgcagaggtctacgcagtgatttattttagaagagagtggccatgtaggatgtttttaacagcagtccctgaaaggacaatggtgtcattagcaaatacaaaaaactgctaaggtggaacaagttgtgtgggaaagta

SEQ ID NO: 7121 - DNA, 1109 bp, Artificial sequence
  DNA replication origin
gaggaggtcacgcaacttgaaaacacccaagggagttggatcctaccaccgcggcccacaccgtggagaaatacacgtccatcagcctctgtcaagcaggacgcggcgggtgccggcgcggccgggtggcctggtgctttctgggcctcgcccgccaccccggaagcctggaatcccgggagtgcgcccggccgcccggccacgcgatcccggacccacgcggacgcccgcctcagggaaggccgcgcacggcggggacgcggggcggaggggctgagccggccgagccaccgccggcgccgctccaaagcctcccccgcggcccgaactcgagctgcagcgcgcggccgcgccacttacaggtcatgactctgcagacaagcaccacctgcggcgcggactgagcgctggagatccggcggaccgcggcgtcgctacggtggggcggggaccgcgtcagaggccccgccccacccctcctcctggccccggccgggaggagagaagggtctgcgttcattccagtgcgcctgtaacaccaggacggaccaacgagaaatggttaattgcaacacagtccggaaaaagcatgcctcgaaaggcaaagggcaaaagggaacggcctaagtcgaggtggtgtgctggtgaatgtcttaacaaccagacttttcagggaggaaagccctgatttgtagcgtttgctgattctccgcaaaaggactgaacttctagctggttgaatcacctctgtggccaggttaacaccgtatgctgatgggcttgagctatttgaacaagtctctgtgacggggacggaatgaccctggttggtttaggcacgcgagacgtctgtaaaatctgactacaaggctgctaggccaacgggaaagatgctgagggttcaacgccatgccctcaacaagtcagtcctcgaatacattgtcatctctttgctaatatccttttttgtttgtttgttttagacagggtctcactctgtcatccagtcaggagtgcagtgcagcagtctcagcccattgcagcctcaacctcccggctcaagcgatcctccgtcctcagcctcccaagtagctgggactacaggcaca

SEQ ID NO: 7122 - DNA, 999 bp, Artificial sequence
  DNA replication origin
gagggaggtgggggggtcagcccccccacccgccagccgccccgtccgggaggtgaggggcgcctctgcccggccacccctactgggaagtgaggagcccctctgcccggccagccgcccagtctgggagggaggtgggggagtcagccccccgcccggccagccgccccatccgggagggaggtcggggggtcagccccccgcccggccagctgccccgtccgggagggaggtgggggggtcagccccccgcccggccagccgcctcatccgggagggaggtgggggggtcagccccccgcccggccagccgccccgtccgggagggaggtggaggggtcagccccctgcccggacagctgccccgtccgggaggtgaggggcgcctctgcccggccgcccctactgggaagtgaggagcccctctgcccggccaccgccccgtctggggggtgtacccaacagctcattgagagtgggccatgatgacaatggcggttttgtggaatagaaaagggggaaaggtggggaaaagattgagaaatcggatggttgctgtgtctgtgtagaaagaagtagacatgggagacttttcattttgttctgtactaagaaaaattcttctgccttgggatcctgttgatctatgaccttacccccaaccctgtgctctctaaaacatgtgctgtgtcctctcagggttaaatggattaagggcagtgcaagatgtgttttgttaaacagatgcttgaaggcagcatgctcgttaagagtcatcaccactccctaatctcaagtacccagggacacacacactctgcctaggaaaaccagagacctttgttcacttgtttatctgctgaccttccctccactgttgtcctatgaccctgccaaatccccctctgtgagaaacacccaagaatgatcaataaaaaataaaaataaaaataaaaaaataaaaaataaaaaatataaaaataaaaaaacaaaaacaaa

SEQ ID NO: 7123 - DNA, 1311 bp, Artificial sequence
  DNA replication origin
ccccccacctccctcccggatgaggcggctggccgggcggggggctgacccccccacctccctcccggacggggcagctggccgggcggggggctgaccccccgacctccctcccggatggggcggctggccgggcggggggctgactcccccacctccctcccagactgggcggctggccgggcagaggggctcctcacttcccagtaggggtggccgggcagaggcgcccctcacctcccggacggggcggctggcgggtgggggggctgacccccccacctccctcccggatggggcggctggccgggtcgggggctgaccccccacctccctcccggacggggaggctcgccgggtggggggctgactcccccacctccctcccagactgggcggctggccgggcagaggggctcctcacttcccagtaggggcggccgggcagaggcacccctcacctcccagacggggtggctggccgggtgggggctgacccccacctcccttccggacggggtggctgccaggcggaggggctcctcacttctcagacggggcggttgccaggtggagggtctcctcacttctcagacggggcggccgggcagagacgctcctcacctcccagaccgggcggtggggcagaggcgctccccacatctcagacgatgggcggccgggcagagacgctcctcacttcctagatgggatggcggccaggcagagatgctcctcactttccagactgggcagccaggccgaggggctcctcacatcccagacgatgggtggccaggcagagacgctcctcacttcctagatgggatggtggccgggaagaggcgctcctcacttcctaggtgggatggcggccaggcagagatgctcctcactttccagactgggcagccaggccgaggggctcctcacatcccagacgatgggcggccaggcagagacgctcctcacttcccagacggggtagcggccgggcagaggctgcaatcttggcactttggggggccaaggcaggtggctgggaggtggaggttgtagccgagatcacgccactgcactccagcctgggcaccattgagcactgagttaacgagactctgtctgcaatcccggcacctcgggaggccgaggctggcggatcattcgcagttaggagctggagaccagcctggccaacacagcgaaaccccgtctccaccaaaaaaatacgaaaaccagtcaggcgtggcggcgcgtgcctgcaatcgcaggcactctgcaggctgaggccggagaatcaggcagggaggt

SEQ ID NO: 7124 - DNA, 1455 bp, Artificial sequence
  DNA replication origin
aagttctcgctaggcttgttgggtcagcgcgattggccggggcccgcgcgagcctgcgagcgaggtgcggcggtcgcgaagggcaaccgagggggccgtgaccaccgcctccccgcgacgccccagtccagtggcctcgcgtccgcccattcagcggagacctgcggagaggcggcggccgcggcctccgcaagccggtatggccactggagacgggggttgcgggcgctctgtccgaggaggccgggagactaggaggcgctgggagggcctcgttcgaaccgcgcggcagctggggtcggaggcactgtgggaaggggctggagggaggagggggtgggagggaggagggggtgggagggaggacgaggccgggggggagggcgggcggggccttgcatggggggaggggaagggaggtcgcggagggggaggggagagaggcaacccctggctgcggtggccaggaggcgcgcctggggggctccgggaggggagtgcgccagctaatgccttggtgcagcctgcctccaagcgtttggattgagaggagaggggctttgggaggtttggggcggccggcgcccaatacccgaaggagctcggaagggtgtggagtggcgcctacgggaataagttgattggggtcatagaatcggagcctagttccttggctaagtcagcgcttaatcaagcgccggctggaggcccagcctggtttatagtgatgattctagctaactttaagagtttgctttgctggacactacagtaagtattttggatgcactgtctcatttaatcatcacaaggattcctccaaattcagatatggttgttttcatttcgaatgtgatgaaagtgagccttggaggacttaagatcacatagctagtagtgagaatctttaccgtcttgctgcactgcctttgaggcagggtttgaggcctcttggcattctttagaataattacaggttgacttggcttagtatttcttgaaggaaactgctcccctcaggaggtgcttaagccacagcctctgaaattgagcagggtcttacccttagaggtagtagaaccagaagtttgtccgccgaacctagaacctggttcaggaggcaggctttttatatgaccttgggcgtgtcagattattcccagtgctgagaaaagtgtacctggtagagggttatattatacaagttagaagccgagtcatttctggacttcagagggggcggggcaaggacaagatgggagaagagcttgtcgtagggctcctactggcagttctaggaactagttaataccagtctctactttggaagagaaaatgagtaccagaattctgtatgtgaagtaatgttgggttgggatttccccttgaagggaaagttttgttgcacacttacttttgagatacttttgtgtttactctggggagatgactgca

SEQ ID NO: 7125 - DNA, 774 bp, Artificial sequence
  DNA replication origin
gccagtccccgaacttccaggaggcatctgcaggaactgccagcaggctgggtgggcctatgcctaggctcccagacagtgcatgtcaggtaggcttgtactcagtccgccagaagccatgtgcaggagccattggtggtgtgctccctagtcgatccctagtccccctgacaatacatgtgctcattggcagtgatggcagtgggtaagatggacttgtcctctagccccactgatggtgtgtgcagatggttacagatggggcaggttgattttcaggctcccggaagaatcatgggggtaatgacttaagcggtggctggcaggaagtacctgtcctcatgctccctgatggagtgcacaggcagtggctgtggcaacctgggtgtgtcatttcccaggcctctggatggcgcactgtggtgctggcaatggtggtcatgatggctctgtggacaccagcagtggtgggcagggaaggccccaggtccctgaatgatgtgtgtgggtgccgccagcagaagttgtgagggggcaggtctctagtcaggctccccagtggtgtgtgcaaggctctggccataatgggtgggttggattaatccttagacgtgttgacagtgcacttgggtgccagcagtggtattggtgggtggggtgggcctgttttcaggccccagaatggctcatgctgcctgtgatgttggtgggtggggtaggcctattgtcaggcctctcaatggtatgtgctggtactggtggtagttggtatgg

SEQ ID NO: 7126 - DNA, 1015 bp, Artificial sequence
  DNA replication origin
gtaggggcggctgggcagaggcgcccctcacctcccagacggggcggctggccgggcggagggctgacccccccacctccctcccggacggggcggctggccaggcggggggctgacccccctacctccctcccggacggggcggctggccgggtgggggggctgacccccccatctccctcccggacggggtggctggccgggctgaggggctcctcacttcccagtaggggcggccgggcagaggcgcccctcacctcccggacggggcggctggccgggcggggggctgacccccccacctccctcccggacggcacggctggccaggcggggggctgacccccccacctccctcccggatggcacggctggccaggcgggggggctgaccccccacctccctcccggatggggcggctggccgggggggggctggcccccccacctccctcccggacggggtggctgcccggcggagacgctcctcacttcccagatggggtggctgccgggcggagaggctcctcacttctcagacggggtggttgccaggcagagggtctcctcacttctcagacggggcggccgggcagagacgctcctcacctcccagacggggtctcggccgggcagaggcactcctcacatcccagatggggcggcggggcagaggcgctccccacatctcagacgatgggcggccgggcagagacgctcctcacttcctagatgtgatggcggctgggaagaggcgctcctcacttcctagatgggatggcggccgggcggagacgctcctcactttccagactgggcagccaggcagaggggctcctcacatcccagacgatgggcagccaggcagagacactcctcacttcccagacggggtggcaccgggcagaggctgcaatctcggcactttgggaggccaaggcaggcggctgctccttgccctcgggccccgcggggcccgtccgctcctccagccgctgcctcccgggcggcgctc

SEQ ID NO: 7127 - DNA, 932 bp, Artificial sequence
  DNA replication origin
cgcctctgcccggccgcccctactgggaagtgaggagcccctcagcccggccagccaccccgtccgggagggagatgggggggtcagcccccccacccggccagccgccccgtccgggagggaggtaggggggtcagccccccgcctggccagccgccccgtccgggagggaggtgggggggtcagccctccgcccggccagccgccccgtctgggaggtgaggggcgcctctgcccagccgcccctactgggaagtgaggagcccctctgcccggccagccgccccgtccgggagggaggtggggggtcagccccccgcccggccagccgccctgtccgggagggaggtgggggggtcagccctccgcccggccagccgccccgtctgggaggtgaggggcgcctctgcccggccgcccctactgggaagtgaggagcccctctgcccggccaccaccccgtctgggaggtgtgcccaacagctcattgagaacgggccaggatgacaatggcggctttgtggaatagaaaggcgggaaaggtggggaaaagattgagaaatcggatggttgccgtgtctgtgtagaaagaagtagacatgggagacttttcattttgttctgcactaagaaaaattcctctgccttgggatcctgttgatctgtgaccttacccccaaccctgtgctctctgaaacatgtgctgtgtccactcagggttaaatggattaagggcggtgcaagatgtgctttgttaaacagatgcttgaaggcagcatgctcgttaagagtcatcaccaatccctaatctcaagtaatcagggacacaaacactgcggaaggccgcagggtcctctgcctaggaaaaccagagacctttgttcacttgtttatctgctgaccttccctccactattgtcccatgaccctgc

SEQ ID NO: 7128 - DNA, 1233 bp, Artificial sequence
  DNA replication origin
ctacagcctcaaggggccgcccaaggaggcggacctggcgcagcccaggcgtccggcccctccccgcggctggcccggcctccggggaagcccccttggtcccacccagggccagggcccgcccccagcttcgccggcctccttcctgtgggaagtgcggctcctttcgcgtcccccaccctctcggctccgcctggcagcagctccgccgcccagaggcgtccgagaccctccgactcgtgggtacgcataggcctcgccagcgagccttgcccaggcaacgagtcgccagcccgccccctcgccgcgggctaggtctcacctcgccaccagtacgtcttggacaagtagtgccaggtctgatgccgggtgtggtgagtgccgccgggacccaggtgcgccgcctcgatgaggtcccggcgtcgctccggctgcagcaccacctccagctccgcgaaggtcttgcggtgccgctgccgccgctggtaatacagagtcccgccgcgcaccacgtagcaggcggcagcttttcggattttacgcttgacattgccctcggtgcccggcgcatacggctcgcgctcgttcgtcaggtaacgcaggatggcccggtagctttcctcgcttgacatcgcggaccgcggctccctgagggcgcctgtcagggacaggtgaggaaaacggcccgctacctacgggcggctgcaggaggagcggcggcaccgtagggagaaacggctgcgcctttggcgagcgctcttcgacggctcccttagtccgaaggaaaagcgggcgagttggtaaccagggggaactgcacttctccagcgcgcgggatccgctggcgactgacaaaatggctgctgcaccaccggaagtgacgcaaggcaagggcggggactgagccctgattggagcgcactctcgttttctggcttgatggagccgatccagtgacgtcaggaatgcgggtggacattttggaagcgggtaggacccttcactgcagttcgagggagtctttaagcagacatcttaagtcctggcagtttctcttttcatttttcccttttccacgctttctaaggagccacgtgtagggggagctggtggacagttgagagttcagccgaaacatccagagggttaggagtccgtttttacgtttgagactcccaacatcataaaagcatattttcaggcttctggaaaaatattagtctcttgacacgg

SEQ ID NO: 7129 - DNA, 997 bp, Artificial sequence
  DNA replication origin
cgaggagttgggtcgtgagaggggccagacctcgatccgcggggcgacagctgcagtgtcgcgtcgcgagcaggagcttggcggcgtagagcgccagggtgccaacttcgcttccaggcctgtgggttccgcccggcgcgtgctgctgtcagtcaacgccctcggcccgcccccgccgaagctccaccaatcgtagccgggggtcggaggtgaggagacgtcgccgggtgaggaagcggggggctagcggcctggcgctgcggcgaccgaccggggcgtcaggatccctggcccccggagagcgaagggcgggcgggtcccggaggtgagtgctggatgtggtctgtgtgcggacgtcgggaggggccgctgcgggcggagcgacccattgcccggctctgccagcgcgctcctagactgcgaagcccctccctccgcgcgcatctgctcccgagtccccagccccgtgctgataggtgcagcccctggagtcgtggctgtgggcataggtgccagggaggggaggcccgggtcgaaggcataggcagaattggagccctgggttgccaaagcgtcgcagctaagaagccggagcccaggctagtaccggcggggcggggcggggcggggccgggagcgagcatctccatcctcagtttcctccacttgcggcaacgccacagctcggtacagttcggacctccacgccgcagcgaaagacttctgtcctccaggcaccttcactaacccggtgcggagcacttggcgacgcctccctgcccatctcatatctctcggctcatcgctgctctgggcaccagctgcctcttggctggcgctgctgtcacacggtggactgttctggccttactgagctgccgtttggggacatcagattcaggtcgtatggggagaaacgagtgtaactttacaaggtgtgatatggagaccctggcctgttgcccatttctgcctgatcaaaggccactagggtggt

SEQ ID NO: 7130 - DNA, 945 bp, Artificial sequence
  DNA replication origin
cttcccggccgccatcccatctaggaagtgaggagcgtctctgcccggccgcccatcgtctgagatgtggggagtgcctttgccccgccgccccgtctgggatgtgaggagcgcctctgcccggtcgcgaccccgtctgggaggtgaggagcgtctctgcccagccgccccatctgagaagggaggagaccctccgcctggcaactgccctatctgagaagtgaggagaccctccgcccggcagccgccctgtctgagaagtgaggagcccctccaccccgcagccaccccgtctgggaagtgaggagcgtctccgcccggcagccgccccgtccgggagggaggtgggggtcagcccccacccggccagccgccccatccgggagggaggtgggaggtcagccccccgcccggccagccgccccacccgggaggtgaggggtgcctctgcccggccgcccctactgggaagtgaggagcccctctgccaggccaccaccccatctgggaggtgtgcccaacagctcatttagaacaggccatgatgacaatggtggttttgtggaatagaaagcggggaaaggtggggaaaagattgagaaatcggatggttgccatgtctgtgtggaaagaagtaggcatgggagacttttcattttgttctgtactaagaaaaattcttctgccttgggatcctgttgatctgtgaccttaccccccaaccctgtgctctctgaaacatgtgctgtgtccactcagggttaaatggattaagggcagtgcaagatgtgttttgttaaacagatgcttgaaggcagcatgctcgttaagagtcatcaccactccctaatctcaagtacccagggacacaaacactgcggaaggcctcagggtcctctgcctaggaaaaccagagacctttgttcacttgtttatctgctgacc

SEQ ID NO: 7131 - DNA, 1274 bp, Artificial sequence
  DNA replication origin
cacatgtttcagagagcacagggttggggggtaaggtcacagatcaacaggatcccaaggcagaagaatttttcttagtacagaacaaaatgaaaagtctcccatgcctacttctttccacacagacatggcaaccatccgatttctcaatcttttccccacctttccccgctttctattccacaaaaccaccattgtcatcatggcctgttctaaatgagctgttgggcacacctcccagatggggtggtggcctggcagaggggctcctcacttcccagtaggggcggccgggcagaggcacccctcacctcccgggtggggcggctggccgggcggggggctgacctcccacctccctcccggatggggcggctggccgggtgggggctgacccccacctccctcccggacggggcggctgccgggcggagacgctcctcacttcccagacggggtggctgcggggtggaggggctcctcacttctcagacagggcggctgccgggcggagggtctcctcacttctcagatagggcagttgccaggcggagggtctcctcccttctcagatggggcggctgggcagagacgctcctcacctcccagacggggtcgcgaccgggcagaggcgctcctcacatcccagacggggcggcggggcaaaggcactccccacatctcagacgatgggcggccgggcagagacgctcctcacttcctagatgggatggcggccgggaagaggcgctcctcacttcctagatgggatggcagccgggcagagatgctcctcactttccagactgggcagccaggcagaggggctcctaacatcccagacgatgggcagccaggcagagacgctcctcacttcctagacagggtggtggccgggcagaggctgcactctgggcactttgggaggccaaggcaggtggctgggaggtggaggttgtagcgaaccgagatcacgccactgcactccagcctgggcaccattgagcactgagtgaaccagacaccatctgcaatcctggcacctccggaggccgaggctggcagatcactcgccgttaggagctggaggccagcccggccaacacagtgaaaccccgtctccaccaaaaaaatacgaaaaccagtcaggcgtggtggcacgcacctgcaatcgcagggactcggcaggctgaggcaggagaatcaggcagggaggttgcagtgagccgagatggcagcagtacagtccagcttcagctcggcatcagagggag

SEQ ID NO: 7132 - DNA, 984 bp, Artificial sequence
  DNA replication origin
gaccaggtgtgaggaggggaggtgataaaaagattatagggtggaggagcagaggctgaggaagaattgggacctagcttcgcctggcgaggagcagcctggggaggaagggagaggtcagatgggtctgtagaaaaggaagattagaaagactcagtgacgcttggcgttggtactgaggggacaggcaggagggaaagaaggaagatttgggacgagtcgcactgggcacagagactaggaagggactgatgtgtaaaagaatctggacgtcaggcacctcagactgtttgcctattttatgacaagaattatttagattttgcaggatggaaaaattcaaagtgtcattttctggctatttggaactactgtcaagtttgtattggggtcaagcggcattgcagaagaaaatcaggcatttaggttttaggtcaggtgtgagttgaagaggttttaaatttttgagaacacaggccaagggagtagaaggaggaatggagggtggaagtttgctcatagtgaaagaagcaagcctagagaaaagagagagtagagaaatggagagaaggggttcgggggttcttaccttccagaaaagtgggaaaaggggttggggcacagagataagaggtcggggtgtggaaataagggattggggcacagagatataagaggttggggagcggaaataagggattggggtgcagagatacgaggttggggcatggaaataagagattgggacacagagataagaggtcgggttgcggaaataacggattggggcacagagataagaggttggggtgtggaaataagtgattggggcacagagataagaggttggggtgcagaaacaagggattgggggttcttgccccatagaaaagcgggacttgccgctaagggtgaaggagaaggggttgaggggtacttgcccctctcccagaaaagcagagaaggaggagagacaaagagaag

SEQ ID NO: 7133 - DNA, 977 bp, Artificial sequence
  DNA replication origin
acccctctgcccggccagccgccccgtccgggagggaggtgggggggtcagcccccgcccggccagccgcccagtccgggagggaggtggggggtcagccccccgcccggccagccgccccgtccgggagggaggtggggggatcagcccccgcctggccagccgccccgtccgggaggtgaggggcgcctctgcccggccgcccctactgggaagtgaggagcccctctgccccgccagccgccccgtccgggagggaggcggggggggggtgtcggccagccgccctgtccgggagggaggtgggggggtcagccccccgcccggccggccgccccgtccgggaggtgaggggcgcctctgcccggccgcccctactgggaagtgaggacccctctgcccggccagccgccccgtccaggagggtggtgggggggtcagccccccgcccggccagccgccccatccgggaggtgaggggcgcttctgccccgccgcccctactgggaagtgaggagcccctctgcccggccacgaccccgtctgggagttgtgcccagcggctcattggggatgggccatgatgacaatggcggttttgtggaatagaaaggcgggaagggtggggaaaaaattgagaaatcggatggttgccgtgtctgtgtggatagacgtagacatgggagacttttcattttgttctgtactaagaaaaattcttctgccttgggatcctgttgatctgtgaccttatccccaaccctgtgctctctgaaacatgtgctgtgtccactcagggttaaatggattaagggcggtgcaagatgtgctttgttaaacagatgcttgaaggcagcatgctcgttaagagtcatcaccactccctaatcttaagtacccagagacacaaacactgcggaaggccgcagggtcctctgcctaggaaaaccagagacctttgttcacttgtttatctg

SEQ ID NO: 7134 - DNA, 1299 bp, Artificial sequence
  DNA replication origin
gcgcccctcacctcccggacggggcggctggccaggcgggggctgatccccccacctccctcccggacggggcggctggccgggcggggggctgaccccccacctccctcccggactgggcggctggccgggcggggggctgacccccccacctccctcccggacggggcggctggccgggcagaggggtcctcacttcccagtaggggcggccgggcagaggcacccctcacctcccggacggggcggccggccgggcggggggctgacccccccacctccctcccggacggggctgctggccgggcggggggctgacccccccacctccctcctggatggggcgactggccgggcagaggggctcctcacttcccagtaggggcggccgggcagaggagcccctcacctcctggacggggcggctggccgggcggggggctgaccccccccacctccctcccggacggggtggctgccgggcggagacgctcctcacttcccagacggggtggctgccggacggaggggctcctcacttctcagacggggcggttgccaggcagagggtttcctcacttctcagacggggtggccgggcagagacgctcctcacctcccagacagggttgcggcccagcagaggcgctcctcacatcccagacagggcggcggggcagaggtgctccccacatctcagacgatgggcggccgggcagagacgctcctcacttcctagatgggatggcggcggggaagaggcgctcctcgcttcctagatgggatggcggccgggcagagacgctcctcactttccagactgggcagccaggcagagaggctcctcatatcccagacgttggggggccaggcagagactctcctcacttcccagacggggtggcggctgggcagaggctgcaatctcggcactttggggggccaaggcaggcggctgggaggtggaggttgtagcgagccgagatcacgccactgcactccagcctgggcaccattgagcactgagtgaacgagactccgtctgcaatcccggcacctcgggaggccgaggctggcggatcactcgttgttaggagctggagaccagcccggccaacacagcaaaaccccgtctccaccaaaaaaaaacgaaaaccagtcaggcgtggcggcgcgcgcctgcaatcgcaggcactcggcaagctgaggcaggagaatcaggcagggaggttgcagtgagccgagatggcagcagtaccgtccagctttggctcggcatcagagggagaccgtggaggg

SEQ ID NO: 7135 - DNA, 879 bp, Artificial sequence
  DNA replication origin
gggcgcctctgcccggccgcccctactgggaagtgaggagcccctctgcccgccagccgccccgtccgggagggaggtgggggggtcgccccccgcccgccagccgccccatccgggagggaggtgggggggggtcagcccccccacccagccagccgcctgtccgggaggtgagggcgcctctgcccggccgcccctactgggaagtgaggagcccctctgcccggccagccgcccgtccgggagggaggtgggggggtcggccccccgcccggccagccgcccgtccgggagggaggtgggggggtcagcccccctgcccggccagccgccccgtccgggagggaggtgggggggtcagcccccctgcccgccagccgcccgtccgggaggtgaggggcgcctctgcccggccgcccctactgggaagtgaggagcccctctgcccggccaccaccccgtctgggaggtgtgcccaacagctcattgagaacgggccaggatgacaatggcggttttgtggaatagaaaggcgggaaaggtggggaaaagattgagaaatcggatggttgccgtgtctgtgtagaaagaagtagacatgggagacttttcattttgttctgcactaagaaaaattcctctgccttgggatcctgttgatctgtgaccttacccccaaccctgtgctctctgaaacatgtgctgtgtccactcagggttaaatggattaagggcggtgcaagatgtgctttgttaaacagatgcttgaaggcagcatgctcgttaagagtcatcaccaatccctaatctcaagtaatcagggacacaaacactgcggaaggccgcagggtcctctgcctaggaaaaccagagaccttt

SEQ ID NO: 7136 - DNA, 1051 bp, Artificial sequence
  DNA replication origin
cctccctcccggacggggcggctggccgggcagaggggctcctcacttcccagtaggggcggctgggcagaggcgcccctcacctcccagacggggcggctggcgggcggagggctgcccccccacctcctccggacggggcggctggccaggcgggggctgcccccctacctcctacggacgggcggctggccgggtggggatgcccccccatctcctccgacggggtgctggcgggctgagggctcctcacttccagtagggcggccgggagagggcccctcacctccggacggggcggctggccgggcggggctgcccccccacctcctcccggatggcacggctggccaggcgggggctgacccccccacctcctcccggatggcacggctggccgggcggggggctgaccccccacctccctcccggatggggcggctggccggacgggggctgccccccccacctccctcccggacggggtggctgccgggcggagacgctcctcacttcccagatggggtggctgccgggcggagaggctcctcacttctcagacggggcagctgccgggcggaggggctcctcacttctcagacggggtggttgccaggcagagggtctcctcacttctcagacggggcagccggcagaaacgctcctcacctcccagacggggtctcggccgggcagaggcgctcctcacatcccagatggggcggcggggcagaggcgctccccacatctcagacgatgggcggccgggcagagacgctcctcacttcctagatgtgatggcggctgggaagaggcgctcctcgcttcctagatgggatggcggccgggcggagacgctcctcactttccagactgggcagccaggcagaggggctcctcacatcccagacgatgggcggccaggcagagacactcctcacttcccagacggggtggcagccgggcagaggctgcaatctcggcactttgggaggccaaggcaggcggctgctccttgccctcgggccccgcggggcccgtccgctcctcc

SEQ ID NO: 7137 - DNA, 1102 bp, Artificial sequence
  DNA replication origin
ggtaagggcggcccgggatccgctgctgctcggatgggagccgctcggggccgggatccctgggccttgcgggggcgcggcagcccctccccccggagcccgcgcttccgcccgagccccggcggcggcggcggtgaccgtggccccgccgcgccttccgcctgggagctgccgccgcccgcccgcgcccttgtgcaccgcgcccacaggccgcgggaacccagagcgcccgggcccaggggcctctgccgcgcgactgagacgcactccgagctggacgtgtggaaggttcggccagctcggcgtttcgcccccgctggggatgggccactgggcacctgcagccacccaagagcggggagttggccgggccctggccaggggccgccgccacagcgtactggcagggagaacagagctagctaagcctccttcctctcccagattcccagggaaactggacagcccgacgcccagagcggacgggcgagagcccctgaggtgccaagtggaccccggttctgctgctgccactggccgattggggacgccggcacttgcgctgtgggcgtgtggtggggcatttccgttatcctctcgaagacaccccgccactattcctgctcaaacaagcacagtctggtgtgcaagccgaccgtacctcctcccctccctcctttcttgcacgcaccttcgttcgtctatctattcttaccttcttccccagagcgccaagacaaatgtggacaagagtgaagaagttaggatactgccaagtgtgtgtgtattggggtgggggggtagtaataagcggggagaaagtgatgaaaataaaattagaaatcccagagtatgtagcaacacacacacacacacacacacgcacacacacacgttcccagcctgttagcaatcttggctatgtccaagtggaagcaaattttaatgctcggtctcagaagaaaatttcacatatacaggcttcagaggtaacggggtaaccgatagcttccttttacttctcggcatttatttttgcttttctgaagcatagtcctatgtttattaaagggaccacaggagtacacgctgtttgaaagcc

SEQ ID NO: 7138 - DNA, 1260 bp, Artificial sequence
  DNA replication origin
gcccgccggcgtgagggctctgttgttgttttcctggggccgctccagcccgcgccccggcgcccgtgcccctctcaggcggcgctgcctgtgtgccgagaggtgctggttgcaaacgcagcctggcaccggctggcctactactccccagcccggcccccagcctcccgctcgcagggcactgcctcagcgccccccgccccccggccccagccggcgcggccgccgcgaccctcgcccccgacctctcccgacccaaagttttggcggagggggaaagtgcccagggagcgggccggctggcggcggctccggacgcgcggggttccctccgtcttcctcaagtccaccctaccggctgccgccgccgccgccgccgccgccgccgctgctcctgccgcggagtccttggggctgcagcccggcggctcgcaagtgagtaggaaaacagaaagtgaggggagtgcgcccagggagggctggggatggggggcgcctacctcgcgggctcgccgggcgtgagggcgtgtgtgtagctagccctcagcggccagtcagggtttctctatgggaaagtggagagaagctcgcggagccgctctgcctccgcttcactgtacactgctccacatacagtacatgcaacccggagagactgaaaacactcattttatataaggcagcctgccattggcccgcgcagtgacggacaggccgcgcagccaaacaagaggcccgttacacccaaacacacgcacacatacacacattttacagagacacacaaagatcatcacattttctattttctaatgttcgggacctgtagacagtaggagaggacaggtaaagaggcccagcagagtggggtaaaggggaaaacccctgtctgcaccaagttgcaaggcttgaaactggtgtccttttgacttgggagggttatggtaataaactacaactccactggatatggaagtgaggggggtttttcatcgctgccttttggtgccccatggaagaggcctgcattgtgttacgattttacagcctgacccggctaacaagtggccaagaaaggcttttatcaccttggatttcttttgtcaatgggttagctatcacataggccaaaatagtgcaagataagtttatcaggactctaatgcattgaggttgttagtgcctcattcgtaggtagattcaaaaaaatcaatataacaacacacaaagataaacattttgctgaaatagccaaacaac

SEQ ID NO: 7139 - DNA, 1244 bp, Artificial sequence
  DNA replication origin
ctactcacttgcgagccgccgggctgcagccccaaggactccgcggcaggagcagcggcggcggcggcggcggcggcggcggcagccggtagggtggacttgaggaagacggagggaaccccgcgcgtccggagccgccgccagccggcccgctccctgggcactttccccctccgccaaaactttgggtcgggagaggtcgggggcgagggtcgcggcggccgcgccggctggggccggggggcggggggcgctgaggcagtgccctgcgagcgggaggctgggggccgggctggggagtagtaggccagccggtgccaggctgcgtttgcaaccagcacctctcggcacacaggcagcgccgcctgagaggggcacgggcgccggggcgcgggctggagcggccccaggaaaacaacaacagagccctcacgccggcgggcggctcgtggccgcccggggagccccaaacttcatctcggcgaaagtacgtggagccctgcctggtctcggctgccggggaggtggggcctggggagcaggggcagtggaggaaggtacgaggagccagccttcggtggatttattgaacgtttcgtctgcgttggtgaccgggaacagcagcccagttgctcgttcatctggagagttgggatttgggtgttccggccccgcagatcagtgccctctcaccccccacccctacccaaatgcgcggcgagtagagaaagtgctgttttagtgccagagtagcctggaggaagaatagggggagagggggaagagggcgagggagaaggggagagagaagagggagggaaggggggggagagagggagacagagagagagggagagagagaacgggagggaagagaggagggggaagaggaggagggaggctgtgtcaggattttgcttgaatgtgggattatgttgtgtcaataagtttaaggtggagagagcgaggctgagggtggtggtggaggggaggaggaaggccttggccgtttaaagtcttatttctgaaggtaagttacggctttgcctggtcgcgatgacagaaaacttgcagatcctttatccggggatggggtcgatgcctctagaaagagctccctagccctcttaagccacactcgtgttacactgttatttgctgcgatccgggtcgctagtaaattacagaaatcagactcgaggtttcttttcctcctccacctcgtctcgctcactcaccctctg

SEQ ID NO: 7140 - DNA, 880 bp, Artificial sequence
  DNA replication origin
gggggatggggacggagcgagctctgcctctgctaatggtcattggcctggggctttgaaaccattgcctgtcctgctaatgacacgtccagttctcttctcccggccgcggacgccgggctgccgttcccggggtggctgactgggactggggtactttccccgcgcggggaggggcgttcttcgccatctcctggggttgcccactggcggcgtgggggcccccacgcggccccccgcccctgcgcgccgccgccacctctgctcgcgcgacttttgtaggcagccagcggcccaggggcgccgggggtccccggcgccgacgtccccgcgcggccaccccgggtccggccccacgcgctctgcgccgcgcggtccaagcccggaatggcagcgccgggccgggcgccggcggtgcctccctggggggcagcggaggcagaggcagtggcggcgggatcttcgccggggcccgcgggaggaggaggaggagagggagaaggaggaggggaagaaggaggaagaggaggagagggaggcgttttctgcccagaccgccgccagttcgagcaggcacgggcacggggacaccccactcgttgctcctccgttatggaaaggtgtttagcagacttttacgcccggagtgtggtatttgcacttcattttttcttcccccctctttcccaaagcaagatggactctattccctttctctttctcccactgcctctgcctctgtcttgtcagcctttaagatcgacattttgtactaagatgcaaacttgatggtgaccagcaacaaagccggggtgggatccctcgctctcttcctccctccttgtttcctagctccccccaccccgacctcgcagacctg

SEQ ID NO: 7141 - DNA, 864 bp, Artificial sequence
  DNA replication origin
gaaaggtgtttagcagacttttacgcccggagtgtggtatttgcacttcattttttcttcccccctctttcccaaagcaagatggactctattccctttctctttctcccactgcctctgcctctgtcttgtcagcctttaagatcgacattttgtactaagatgcaaacttgatggtgaccagcaacaaagccggggtgggatccctcgctctcttcctccctccttgtttcctagctccccccaccccgacctcgcagacctggtggccctgcacttgccgctgtgggctttggcgaatgtgttttccctggtcggttcctatctccaatctggggattgtgacccgggctgggtgtttgggagacggcagtggccgcccaggtctgaaaggctgagggcttcgatacctggacccgctgccgccgcggtggcacctcccgccgtctcctgggcaaggcgaggctcgggctgcctatcgatccctatgatttggttactggtgtgtttgtcctgggggcggtgatcacttgtgcaagttgatgaatgatcgcggtgtggtttttgcgtttgcagaatggatcaactttctgctttgtacatgtggggagtaggaagcgagggtacgggagataccctagaatgccagttgggttgccccccagcctctgccctttcaatacggggagcttctttgccttctgttcccacagttctccagtgtcggggggtggtagagaaaggggaggggttagtgggagctggactcctgggttttggtaccttctcttcatagatgttacaggacttgggactgtactattgtaaagccctactatactgatgatgtacctttatttgata

SEQ ID NO: 7142 - DNA, 1149 bp, Artificial sequence
  DNA replication origin
gtgctggagatgtggctgaggtttctctcacagtggaggcaaggaattgcaactcagaaatacgttgctacttggctgcctctgttctattattgtacaccttgaaggtgaggttaattaagtcctgttgtggggtttgagggccggaatctaatttttggagctttttctaatgtcgggggcgggttgggtaataaaatgcatattgagaataagacggccttctgaccttttagggtctagggctataaagcatctcagggttgctaccaaacaagccatgaactgggttgagtttttacatttgatgaaaaagagcctaaatgctgtctgatttgggagaggtcggataaagaaaaaggaacattaaccctggctatgccttcagctccagccacctctttaagaggaaactgttgggcaggttggggagggctagttgaggaaagaaactgtaagccagatagggtgtgaggaggggaggtgataaaaggattatagggtgggggagcggaggctgaggaagaattgggacctggcttggcctagtgaggagcagcttggggaggaggggagaggtcagatgggtctgcagaaaaggaggattcaaaggactcaagagtttggggtggagactgaaggaacagacaggagagaaagaagaaggatttgggacaagttcgcactgggagtagagactagggagggactgatgtgtagtaaagaatgcctggacgtcaggcacctcagacccatttgcccattttttcgacaaaaatcatccagataaaatggagaaatcaaaagtgttgttttctggctatttagaacaattattgagtttgtattggggccaagcggtgttgcagaagaaaataagacgcttaggttttaggtcaggcaagagttaaagaggttttaagtttttgagaacacaggctaagggagaagaagggggaatggagggtggaaggttgcccatagtgaaggaggtaagtttaaagagaaaggtagtgacacggagaagggggtggtgagcagccctgggacgcaatgtgggtgagcagccaaagcaggtgtccccgcaattgacttgtcaccaagggtacgtgggtgaatgaccaaggcaggcatccccacggtgatcag

SEQ ID NO: 7143 - DNA, 913 bp, Artificial sequence
  DNA replication origin
agtgatccgccagcctcggcctccggcctcccgaggtgccgggattgcagacggagtctggttcactcagtgctcaatggtgcccaggctggagtgcagtggcgtgatctcggctcgctacaacctccacctcccagccgcctgccttggcctcccaaagtgccgagattgcagcctctgcctggccgccatcccatctaggaagtgaggagcgtctctgcccggctgcccatcgtctgagatgtggggagcgcctctgccccgccgccccgtctgggatgtgaggagcgcctctacccggccgtgaccccgtctgggaagtgaggagcgtctctgcccggcagccaccccatccgggagggaggtgggggtcagccccgccaggccagccgccccgtccgggaggtgaggggcgcctctgcccggccgcccctactgggaagtgaggagcccctctgcccagccaccaccccgtctgggaggtgtacccaacagctcattgagaacgggccatgatgacaatggcggttttgtggaatagaaaggggggaaaggcggggcaaggattgagaaatcggatggttgccatgtgtgtgtagaaagaggtagacacgggagacttttcattttgttctgtactaagaaaaattcttctgccttgtgatcctgttgatcggtgaccttacccccaaccctgtgctctctgaaacatgtgctgtgtccactcagggttaaatggattaagggtggtgcaagatgtgctttgttaaacagatgcttgaaggcagcatgctcgttaagagtcatcaccactccctaatctcaagtacccagggacacaaacactgcggaaggccgcagggtcctctgcataggaaaaccagagacctttgttcacttgtttatctgctga

SEQ ID NO: 7144 - DNA, 964 bp, Artificial sequence
  DNA replication origin
aacaaagcacatcttgcaccacccttaatccatttaaccctgagtggacacagcacatgtttcagagagcacagggttgggggtaaggtcaccgatcaacaggatcacaaggcagaagaatttttcttagtacagaacaaaatgaaaagtctcccgtgtctacctctttctacacacacatggcaaccatccgatttctcaatccttgccccgcctttcccccctttctattccacaaaaccgccattgtcatcatggcccgttctcaatgagctgttgggtacacctcccagacggggtggtggctgggcagaggggctcctcacttcccagtaggggcggccgggcagaggcgcccctcacctcccggacggggcggctggcctggcggggctgacccccacctccctcccggatggggtggctgccgggcagagacgctcctcacttcccagacggggtcacggccgggtagaggcgctcctcacatcccagacggggcggcggggcagaggcgctccccacatctcagacgatgggcagccgggcagagacgctcctcacttcctagatgggatggcggccaggcagaggctgcaatctcggcactttgggaggccaaggcaggcggctgggaggtggaggttgtagcgagccgagatcacgccactgcactccagcctgggcaccattgagcactgagtgaaccagactccgtctgcaatcccggcacctcgggaggccggaggccgaggctggcggatcactcgcagttaggagctggagaccagcccggccaacacagcgaaaccccgtctccaccaaaaaaatacgaaaaccagtcaggcgtggtggcgcgcctgcaatcgcaggcactcggcaggctgaggcaggagaatcaggcagggaggctgcagtgagccgagatggcagcagtacagtccagcttcggctcggcatcagt

SEQ ID NO: 7145 - DNA, 1232 bp, Artificial sequence
  DNA replication origin
accgccctggagcaggcatccggcctccgtggagcgggcaggcgggccccgggtctggagcctgcgactggggagggcgccgcgtcaacagcagcggttgcggggcggggccgagtgcgcgtgcgcggctctcgcgggcggggagcaggcgggggagcgggcgggaagcagtgggagcgcgcgtgcgcgcggccgtgcagcctgggcagtgggtcctgcctgtgacgcgcggcggcggtcggtcctgcctgtaacggcggcggcggctgctgctccggacacctgcggcggcggcggcgaccccgcggcgggcgcggagatgtggcccctggtagcggcgctgttgctgggctcggcgtgctgcggtgagtggctcctcgctcccagccctgcggctgctgtcgcttcgcccccgcgggcgtgtgggctgcgccccagccagcccggcggcgccctgaagagggtggccggggcgcagaacactcgggccctgagcgcccgaagtgcagacgtgggagggccccacggggaatcgggcgccccccttcttcctcccttcctttccctggtcgtcttcttccccctgggtgagagcggggctcatctcctccacccggttctccatctccaaatgcacacacacaggaagactccaaaccgcgcacctcgcgcaaaaattaactagcaagaaagggcgcgatcagaggcaaggggctgcagctgctagggatccccttctttcgcacccctctcccttctcagtgcttagacgcatttggggttgagggagggagagtgggagggcccgggcctcttgcgatggaagtgcgcattttggcgaagtcggtgagaaggggtttctgccgtttgcctcccacatgaacataggagcgaagaggacgtaaaggacacaattaagtttcattttcaactcagcattcaatcagaagaatcttccggccgtgtaatttttgctgtcgtttttaatcctaaaaataagcttgctggaaactcttcctttctcgtgaccctcacgccccatcagccacttgcatacattctaaattgtacgttgaagtttttcccactttatttgggggaaccgttttaaaagtaatctggttttcgcctgaaataggaagacagtaacctccagtcaaaacatgtgcagcagaatgggatttggtgtttttcgacgccaaagaacctccacccccccacccccaccccga

SEQ ID NO: 7146 - DNA, 1358 bp, Artificial sequence
  DNA replication origin
atgtctacttctttctacacagacacggcaaccatccgatttctcaatctcttccccacctttcccccctttctattccacaaaaccgccattgtcatcccggcccgttctcaatgagctgttgggtacacctcccagacggggtggtggctgggcagaggggctcctcacttcctagtaggggtggccgggcagaggcgcccctcacctcccggacggggcggctggccgggcggggggctgaccccccacctccctcccggacggggcggctggccgggctgggggctgacccccctacctccctcctggatggggcgtctggccgggcggggggctgacccccccacctccctcccggacggggcggctggccaggcagaggggctcctcacttcccagtaggggcggccgggcagaggcgcccctcacctcccggacagggcggctggccgggcggggggctgacccccccacctccctcccggacggggcagctgccgggaggagacgctcctcacttcccagacggggtggctgccgggcagaggggctcctcacttctcagacggggcggctgccgggcggaggggctcctcacttctcagacggggcagatgctgggcggagggtctcctcacttctcagacggggcggctgggcagagacgctcctcacctcccagacggggtcgcggccgggcagaggcgctcctcacatcccagacggggcagcagggcagaggcgctccccacatctcagacgatgggcggccgggcagagacgctcctcacttcccagatgggatggctgccgggaagaggcgctcctcacttcctagatgtgatggcggccgggcagagacgctcctcactttccagactgggcagccaggcagagaggctcctcatatcccagacgatggggggccaggcagagacgctcctcacttcccagatggggtggcggccgggcagaggctgcaatctcggcactttgggaggccaaggcaggcggctgggagatggaggttgtagcgagctgagatcacgctactgcactccagcctgggcaccattgagcactgagtgaaccagactccgtctgcaatcccggcacctcgggaggccaaggctgacggatcactcgcggttaggagctggagaccagcccggccaacacagcgaaaccccgtctccaccaaaaaagtacgaaaaccagtcacgcgtggtggcgcgcgcctgcaatcgcaggcactcggcaggctgaggcaggagaatcaggcagggaggttgcagtgagctgagatggcagcagtacagtccagcttcggctcggcatcagagggagaccgtgga

SEQ ID NO: 7147 - DNA, 947 bp, Artificial sequence
  DNA replication origin
agaagtgaggagaccctccgcccagcatctgccccgtctgagaagtgaggagcccctccgcccggcagccgccccgtctgagaagtgaggagcccctctgcccggcagccaccccgtctgggaagtgaggagcgtctcctcccggcagctgccccgtccgggagggaggtgggggggtcagccccccgcccggccagccgccctgtccgggaggtgaggggcgcctctgcccggccgcccctactgggaagtgaggagcccctctgcctggccagccgccccgtccgggagggaggtgggggggtcagccccccgcccggccagacgccccatccaggagggaggtaggggggtcagcccccagcccggccagccgccccgtccgggagggaggtggggggtcagccccccgcccggccagccgccccgtccgggaggtgaggggcgcctctgcccggccacccctactaggaagtgaggagcccctctgcccagccaccaccccgtctgggaggtgtacccaacagctcattgagaacgggccgggatgacaatggcggttttgtggaatagaaaggggggaaaggtggggaagagattgagaaatcggatggttgccgtgtctgtgtagaaagaagtagacatgggagacttttcattttgttctgtactaagataaattcttctgccttgggatcctgttgatcggtgaccttacccccaaccctgtgctctctgaagcatgtgctgtgtccactcagggttaaatggattaagggcggtgcaagatgtgctttgttaaacagatgcttgaaggcagcgtgctcgttaagaaacatcaccactccctaatctcaagtacccagggacacaaacactgcggaaggccgcagggtcctctgcctaggaaaaccagagacctttgttcacttgtttatctgccgacc

SEQ ID NO: 7148 - DNA, 1046 bp, Artificial sequence
  DNA replication origin
cccgccccacgcaagagggggaaaagaaaccgactctcagagcgggcgcccgactcgcccgccctccccgcgcaactccacctcccgtctgatccccgggcgcaagccctgtctcctcccaccccgccctcctacacatgctcctcccctttcaaaaaaaaatattcttttcatccactttgataacggggtttctcccacagcagagatttaaaagggacaggaaaatctggaataggttagtcggccccgcccctcgttcctgcctggtttccccccttccctgcctttccaatggtctcgcccactccacccctcgcgggtccacgggggccccggcgccgactgaggcgagggctgcgggacaatcacgctcggccttctcctctcccgggcggcgctctccctgtggcggggacctgggacgagggggtggggtggggaggggaaggcaggagggggctgcccttccgttgcccatgctaaaggttcctgtgtaggaagctggacgcagcctgctggactagtaatcttcctcctcgctggggcgcggggcactgaagggagggagagactttctcctccttcctgttccccgggacagctgtgctctccgaatccttcccttcttcccagcccacttattccccgctcgccaaggcacgtttgcacaggcatttttcctgctcttttttctgggagggcagcttggtagaatggtcggcggagctgggcgaggagaggggtcttcagaaggtttgctttcttgctcttgcttctcactggccgctgggctgtccactttccgcgccgggcgactggcaacaggaggccatggatttcccccaacgagtgcgttggtgtttttctttggttttgtttcctttgcatgttcgtatgtgtagttttattttcttgcctgttttcgtttgatggcagagaggcgacctcgggaagtattaaacatttgcccgtataagaagagcgtctgtggtccaccatgaccctcgctcatcccaggtggctctccgccctgccctctccat

SEQ ID NO: 7149 - DNA, 1014 bp, Artificial sequence
  DNA replication origin
gcgcgcgccggaccttccacagcctccgcccagagcctgaggcgccggggccgggggagccggggggcgggcgggcgagcgggccggggggagggtgggggatggcgcggaccctgcggccgtccccgctgtgtcctggaggcggcaaagcacaactttcctccgcttctctcctcggagccgggctcctgctgcagcccccgacgccacctccgctgctgctgctgctcttcccgctgctgctcttctccaggctctgtggtaggtgaacctcggcggccggcgtgggctgagggagccgccactgagggtgcgggcgccgcggccggctctgccagccgttctctggagcagcgaggcggttggttgtgcgagcgagtgccgaggactttggctggaaacttttcgccgcgcccggggcgaggccctggaagggccaggccagcgaatgctgagccggcggcccgctgccctcccccgcggccgcgcgggtcgccgtgcggatggccgagggttggcgatggtgcttcgtgcgccgaactccgggtttgctccggggaccgttacttcctcgctcattctctgggaaccctcgtaggttaaggtgccgggatgcacgtttgccgctttttttcccggtgaaacttgagctgtgagcccagaaaccctagggaccggagcccgatggaatgaagcctccgggtccacttctcatggccttccaccctggagaaggcaccattttagcccacccagccgcagaatcccctacagctagttttcttctgtcttgtgcccactcccccggctctgccctgacagcttctggagctctctagattgaccctcgtccctgccctccagcttgtgggacgtctctcacactgcccgtgcttattttaccaaaccgcaggaacaagatttacgtgttaaatacctgatttcatggactgtgtgccccggctgttctaaccaaaacagtcacgcgcctgtttcccatctcttgaccctcgt

SEQ ID NO: 7150 - DNA, 1043 bp, Artificial sequence
  DNA replication origin
tggggcaaacagccatgcccttccagcagccgtgaaagccccaacagcaaactgcctgggagcggggcaggtcaccaacttcgttgctcgaactccctgggtgcccgccgcggtggttacaaagggggtcaagagtgccggacccagccgcgcggagcccaccattgcggcccgagggggacccgacgggggcccgacggtgtggcgtggcgcaaggagcgcgcctgccttctctcgccgccgggaacgggctgcaccaatggccaggtgaggaggcggcggtggtcgcccgggaggagggggtggtgccgactccgtgtgccaggagtgcgtcccggggacgctgcctcccccgcggccgagttggttgccgccggttgcgctgcggagggttgggggcggagaggaggcagtggctgcccgggccgaggaggggcgcgctgactgctcaccgcgagtcaggaggggccggcgggctcacggagggagacagggtgggcgggggcaaaggctaggcgctagggcggcggcgccagcgtagagcggcggtttggaggaaagatgagacggtgagtgggctccggggacacagagtttctttgcttctttacaggctgtagggacaaaagcccgggctggggtcggcagtgcccaggctgcgcagctgggtgggtgggggtggcgaaccccgttgtgcatgactctcggggggctgggtagatctccggttgaggggatcccggggagggagtgtctggtagggaagatgcttccagagtgattgtagaaaacaggcagaatgtgggggaactgggggcaactttttccagcaactctggaatgcacatggagagagggatggggatccttgggatagctccctgagaaagagaaggtccgctgctggatggtgtagggcgcgggattcagagaagactccctccccgcaaatatttggctagctgcgcttctagttccactttctttcaagagtgaacctacgagctttaaccgccaaaagcggctgatttcgatttggcctt

SEQ ID NO: 7151 - DNA, 908 bp, Artificial sequence
  DNA replication origin
aaagttttctggaccctgggtaaggatgggggtggggagaatcagaagtttgagaggtgtcagtgcttccagtcaggtctgcatgttttcgtgactacagatcctatcaagacctccctgcaaattcccacacccttcaatggctctagttctttatcagtctccagtcccttttaggcctaggagtgttaacagcttctcgctattgctagtccctgggtacgtcaccatgccttgttgattcccttaacccttgctccttggttaaaaaacctgttcaaaaatcccagctgagaatgcagcctgattcttgcaagatccacctgttggagcagaagtcagtgcaggtcagcagatgagtcactgcagactccccttagcaggcagatggatccaaagttcaggggatctggtagcaggcatcagactgctggagacaggatatctaggctgtgtctcaacatcaggtactgaagatgccagacttttggactcaagtcaacatatttggagtggagctgatttatatgcttcttgttaatggtctggtcttaatgtgtgtgtgtgtgtgtgtgtgtgtgtgtgtgttgcgtggagggtgagaagtaaggagcaagactattcggaacagaagcttgagagttgaggcccttggcccaacccatgctgtgcttaacaaacataattccatgctaactaaaccggaagttctgaactacagatagggtgtcaaggagattgtgtgtgcgcgtgcattgtgtgtgtgtgtgtgtgtgtgtgtgtgtaaggcccctcctctcaaagataaataataatggtcatttatgagtgcttgctgtgtcaatcactgttctgagtgctttgcttacaacaacccttgtaatcctggtaacaactacatttaggag

SEQ ID NO: 7152 - DNA, 942 bp, Artificial sequence
  DNA replication origin
tccaggaggtgaggggcgcctctgcccggccgcctctactgggaagagaggagcccctctgcctggccagctgccccgtccgggagggaggtgggggggtcagccccccgcccggccagcagccccgtccgggagggaggtggggaggtcagccccccgcccggccagccgccccgtccgggagggaggttggggggtcaccccccgcccggccagccgccccatccgggaggtgaggggtgcctctgcctggctgcccctactgggaagtgaggagcccctctgcccagccagcagccccgtccgggagggaggtggggggtcagccccccgcccagccagccgccccgtctgggagggagttgggggggtcagccccctgcccggccagccgccccatccgggaggtgaggggcgcctctgcccggccgcccctactgggaagtgaggagcccctctgcccggccgccaccccgtctgggaggtgtacccaacagctcattgagaacgggccatgatgacaatggcggttttgtggaatagaaaagggggaaaggtggggaaaagattgagaaatcggatggttgccgagtctatgtagaaagaggtagacatgggagacttttcattttgttctgtactaagaaaaattcttctgccttgggatcctgttgatctgtgaccttacccccaaccctgtgctctctgaaacatgtgctgtgtccactcagggttgaatggattaagggtggtgcaagatgtgctttgttaaacagatacttgaaggcagcatgctcgttaagagtcatcgccactccctaatctcaagtacccagggacacaaacactgcgaaaggccgcagggtcctctgcctaggaaaaccagagacctttgttcacttgtttatctgctgacattccctccactattgtcctgtgacc

SEQ ID NO: 7153 - DNA, 1251 bp, Artificial sequence
  DNA replication origin
cccaactccctcccagacggggcggctggctgggcggggggctgaccccccacctccctcccggacggggctgctggctgggcagaggggctcctcacttcccagtaggggcagccaggcagaggcacccctcacctcccggatggggcggctggccgggcggggggtgaccccccaacctccctcccggacggggcggctggccgggcggggggctgacctccccacctccctcccggacggggctgctggccgggcggggggctgacccccccacctccctcccggacggggcagctggccaggcagaggggctcctctcttcccagtagaggcggccgggcagaggcgcccctcacctcctggacggggctgctggccgggcggggggctgaccccccccacctccctcccggatggggcggctggccgggcggggggctgacccccccacctcccttccggacggggcggctgccgggcggagacgctcctcacttcacagacggggtggctgccgggcggaggggctcctcacttctcagacggtgtggctgccgggcggaggggcttctcacttctcagacggggtggttgccaggcagagggtctcctcacttctcagacggggcggccgggcagaaacgctcctcacatcccagatggggcggcagggcagaggcgctccccacatctcagacgatgggcggccgggcagagacgctcctcacttcctagatgggatggcggccgggcagagacgcacctcactttccagactgggcagccaggcagagaggctcctcacatcccagacgatgggcggccaggcagagacgctcctcacttcccagacggggtggcggccgggcagaggctgcaatctcggcactttggggggccaaggcaggcagctgggaggtggaggttgtagcgagccgagatcacgccactgcactccagcctgggcaccattgagcactgagtgaacgcaactccgtctgccatcccggcacctcgggaggccgaggctggcggatcactcgcggttaggagctggagaccagcccggccaacacagcgaaaccccatctccaccaaaaaaatacgaaaaccagtcaggcgtggcggcgcgcctgcaatcgcaggcactcggcaggctgaggcaggagaatcaggcagggaggttgcagtgagccgagatggcagcagtacagtccagcttcggctcggcatcagaggaagaccgtg

SEQ ID NO: 7154 - DNA, 1291 bp, Artificial sequence
  DNA replication origin
ctctagggcagttttcccgttaacacccactttttgctgtgcctcagacccgcgctctcctccaacttcttttgctttcccataccaaaagcaccatcttctcccttttccccgaacccagggggctcccctgaagccttcactttctctttagcttcacctcgcacccttgctcttccatgtacaatccttccctcctttcgcctagtctcttccaagactttcctgacacccacctctcaatggtcttcttcttctgcaagacaaactgttggataaatcattaaaagcaaactcatcagaaaatgggacagcggcggtggagaaaatgataaggaaaccaatctcagggaagccttaacgcagcctcccccgaccccctcggtcggttggggagggtttgccgcgtcgtccattgacagcgccctgacctccattcatcatcccaggatggagccagggaggaatggggagggagagctggggctggggttgggggcatgggttgggggtgctagtggccacggaaaagttagttacctatgcgtgtgtatgtgtacgcgcacgcgcgcgtgtgtgttggtcagaaaactttcagagctgtggttctcaaacttgatctgcagcaggactccctggaaggcttgctaaatccctttgctgggccccacctccagagtttctgattcagtaggtggacctgggaatttgcatttcaaataggttcccaggtgatgctgatgctgcaggtcaggggccacgttttaaaaactacctttccagggcagtgagaaggcaaatgttgagttggtggcaaattggattcccttcttattttttaggaatgaagcacaggttgtgagcggtcatccattccgtatcttcattgcagctgagaaaaccaagtcccagcagggctaagccatttgtttaaagtgaactgggagtttgtgccaagctggtgaggaagctgtcctggaaataagacagccaggctagtagtagggtgaatgggggtgctgccttccctgtgtggctggacagctgcactgggagtcaggaagccactgtgactttggaaagtcacttaacttttctgggcctctgggggttttgtgtgtgtgtgtgtgtgtgtgtgtgtgtgtgtgtgtgtgtgtgtgtgtgtttgtttgtttgtttgttttttgacagagtctcactctgtcgcccaggctagagtgtagtggtgcaatctcggctcactgcaaagtctgcctcctgaattcgagagattctccagtgtcagcctccc

SEQ ID NO: 7155 - DNA, 1121 bp, Artificial sequence
  DNA replication origin
ggagaggagggggcgggaggcggccgcaggccgaggcagcgccagcgagtggctgccgggggacgtgccggcggcgggagccgggtcccagcgctcggccgggcgcccggggctgggagctgcggccgaggctgggcgcgccgggcgccgggcgaagaagttggggcgaggcgggcagcgggggtcccgggggctgcagccgctacggggcccaggggcgccgcatctcgttccctgccgcagcggtctggccgggcgatggtggtttcgcctcagcggttcccagaagcttctcgggtggaagaaggatccagccagcctcccaaacttccaccgaaggttgacaccagcgccccggccccatgctccaggccgtggggggaacccgaggcgtggcggcaaatgcgtagagtcactcaacacgcactcggcctctttggagggtgagggtttctcatagttggcgtcttctaaaggaaaaacactaaaatgaggaactcagcggaccgggagcgacgcagcttgagggaagcatccctagctgttggcgcagaggggcgaggctgaagccgagtggcccgaggtgtctgaggggctggggcaaaggtgaaagaggtgtgtgtgtgtgtgagagagagagttcgtgtgtgcgtgtacgtgtgtgcgcgcgcgtgtgtgcgtgttcgcgccagcagcgtcctcctggggtttttgttgatgtaactgtgagaaggtgtgggaaatgaatctctggaaccagtgggacggggctgtggggagggcagggaacccaggaagaattttcatgggggtgttgaagggcctgcttgactttcaggatgttcagtattaatttgcttttccaggtgatgggagaatgctgagggatgagagaggcaggcagacctgaaggagttaatggagcctcggggatttgtttggcagagttttgttttggggatgggggtggcagtgccagagttgcttggaacagagttgtgctcctccagagatgtggcagtagagctaagaataccgaaaccacacaccagcaatcccaaactggcactttttgggtgtggtggggtgttctgctgctcccctcatcccttctctgcaag

SEQ ID NO: 7156 - DNA, 932 bp, Artificial sequence
  DNA replication origin
ggagaaagggaaagaaagtcccctggtccccgaagtctcccaaggtcaattcccaggggactccaaagcagcgacggggctctgagatctggcaagttctaggagtcgagcgaggggagcgagtgtcttacctggtcgggctggctggtgtagttgaaagagtagatgttctcggtgctgaggttcaccaccccgctgtagacatgatcgaaatcggcgcccctggcagcgtcgaaggggtcgcggcgcggtgccgggggctgcctgggggatttcgccgggtgcccgggcgacgccgccagcaggagccagggcagcgcgcagagcagcgcgagccgcaggcagccgcgcatggtgggcaccgcgcccgggctcgaaagcggagccaccctggggagggggcgagcgcagagagggtccttccaaagcccggtgcagggccaggcgtccgcttcagagccgagcgggtgatgcctggcgaacccagccggccagggctggcagcgtgctgacgaagggccgatcaaatactgatgctgccgcctggggtctccactggaggtcacgggtggagagtagggcggactggagaagtggagatgtggggctgctgattttcctccggcttctaagtcccccgtttctcatcgccgagaatccccccacttacccagccagaatttagaccgatctcttctccctcaacctcaataacagcaataataaaaaggcattggagtcattaaaaagaaatacccgctagtctcgaaaagtcaacctgacgccacatcgaggaggaaattcggtctgtttcaaatacgtgtgcaccctggctgcaggagaagaaatagaaagcaaaagagcccgtcccccaagagggtgcgcgagttcgctttcccaggctgctacctgcagagaactcttgcctgtct

SEQ ID NO: 7157 - DNA, 913 bp, Artificial sequence
  DNA replication origin
cggcgggggcggggggagaggagggcctgggcccgcgctcccccagccccggaggagcaggcggtggccgcggacggagagattcgcccagacggtcagacactcctgccttcccctcctgggatcatgacccaggcgggggtcgccgccgtcgccgccgccaccgcggccgagaccgcgcagccggcgggtaagtgactgcgggagggggccgctgacagccggggcggggggcgggggccagggctgcgggggcggctccggagggcggccccgggctcagctccacccacccccttcctgctccgggaggccagggctgcgctaagtgcgcctccttcctggggacccttgcgtgcggcacctggtggggcgtcagcgcccgcggcgagcgcacccctcatctcccgcccgccctgcgtccccggctgccaggcccgtggggggctcgcactgcgccccagctcctagatgcgcgcggggcgagaggggccccacgctgccctgggtgcataaagagctgggcagccaggttcacaccagatggcctttgcccgcctccttcaccttttcctgtcttcttcattccccttctttccttgccctctgaatttctttcgtacccgttcgtcagactcatgtggcttgctttttccctctcacccctctgtcgaagtgttaggcttgtgttttctttttagaagccgttcttttgctttctgagtagaagcagtgcaagtgaatgaccaactcttgaaatctactttcatgtatccggatgaaatataagattcctggactcttgttcatgtttacaattttgatagttgaattcaccccactcgttcttgaagcttgtcctcccaaccctcctcgttacattgggatatggtcctttgcgtttattaacttt

SEQ ID NO: 7158 - DNA, 1433 bp, Artificial sequence
  DNA replication origin
gcacgcaagggtccccaggaaggaggcgcacttagcgcagccctggcctcccggagcaggaagggggtgggtggagctgagcccggggccgccctccggagccgcccccgcagccctggcccccgccccccgccccggctgtcagcggccccctcccgcagtcacttacccgccggctgcgcggtctcggccgcggtggcggcggcgacggcggcgacccccgcctgggtcatgatcccaggaggggaaggcaggagtgtctgaccgtctgggcgaatctctccgtccgcggccaccgcctgctcctccggggctgggggagcgcgggcccaggccctcctctccccccgcccccgccgcctctttttgcggccaccgcagccgctgcgagcccgagccctcaaggccggagacccggcggcagcgcggcctcaactttcccagcccccctccccccgcccctccccgcccctcccgcggccgcagctcagcaagcgaacagcctaccctgggcgcgccgcgttcccgcctctttcactcaacccgccaatcaggctgcgggaacgctgccgtggtagccaataagaagacagaatgccgttgcactacgctagagggcgggaggaggcggagaggaaaccaaggagtgaacggggatcgggcggcccaatgaggagggccggggggcggaggtgtgcaagttgggttgaagaaacaggaaatattcttaaaggtagagtgacggacaggaaggaaagccagtaggtgaatgggaaagaggtgggcctggttccttaaaggggacgccttgagaacctagaaaagaaggtgttttaagaaacttctttgtatcttcttctgtggtctcttttcttcgtctttcggtaggagtttggaagtggaaaaattgaaaaggaagagggcacggaagtctttcggaatagttagcccctcttaacgtggagggcaggaaggtgagaagatacgtcttagtaaatgtggagaagaaagaatcagacgtttccgacttctcgataactggaagattgttgctgacttgacgctgctcgcattcgtaggctgtggtctcttgtcatcctttatttgcaacaacacacagatttctgtgaattggagatggccatgttcagaaatgccctgggggcctcccagctgggacaagggagtttggcattgggggatggggtttgagatctcaagcctgggttactaaatacctggatctaggagaggtagggccaggggtcacgaaatggagacctgagtgccccttaactccaggatctgtgtggagcccttggaaccgtgatcacaactccctcttcctagtttcgcttcatattttataacctcctgctgaaacaggtgtcctccacctagttgcggttatagatttccaagcccttccacaa

SEQ ID NO: 7159 - DNA, 1478 bp, Artificial sequence
  DNA replication origin
gggccaatcacgtgatcttaaaacttgaggcgtgctggagggtagccaatctatctggccgattgttaactacgtttgttttaaaacacctaacttaaacttgagctttccacagatttctttacatttagaagaactaactttataaaaccctactaggaggcaacagcgtttgaaggtcactctggagaccacaaactgggaagaacggggctgagaaaaactatcttgcggatatgggacaagagagggaggggtggaaaaatctggattttaccgccagggcctaccgagccagccccacaagcagtgtcgtaagcgggtgggagggaggagcatgaccccagaaggcccagtccaggagaaagatggaggttccggagtggagggggcagggtgcgcggaggcgagcagtgcggctgcgcgtgaggcggcggcgcgccggcgcgcgaggggcggggtgaaaggtcacagcgcggcagcgggtctggctggcggcagcggcgggagggagccgagagacccgagtgcacgtgtggagaagcggcggcacaagcgcggcggcgggagacactcccgcccccaccagactcaagccctcactcgactctcgcggccttcgttgctcgcacagctccctgcccaggctaggaggccggcttgcggggttgagtggcccgagctaagggtgcggagacctaagggcggcgactacgacggcgttgatatcggtggtaacgacggcctcagcaggcggggaagatgaaagggtgaggaagggcagccgggcagggcccggccggtggggtagaagggtccgggcccatgtagagggggagagccgcaaaggcgaggagagattcagggcgaagacgggcggagggagatttctctgcttctcagttccctcggctcccggagggggcggaggcgaggctcgggctgttggcgggctgaagggccagcggaggcaagacccggggggcttcagggtttcggttcggagacgagtgtgggttgttgagtggggagaagcgaccgagtggggcaacatggaaaggctattgtgaagcgcccggggcctccttcccgggagcggaccgctgagccacgccggcccgcagctccaggtggagtggtttggttgtcttccacctccagactcaactctggaactgcggtgtttgacacctttcagtttaattcacgcttgggagctgtgcagaaccttctggaggaagaagaaattggaataaagagcacggggatgagtattaagagctagtgactcaactagatttgggttgggtcacagcgagtggaggagggggagagagcgcgatcactgtagacttggggtgccaacatatttaaggaagtatagggtggatcagtaggtggagctgttgcttcagtagttcactattgcccctgagtgctgaggcggtcctgggtagttctaccacgctgctcctttc

SEQ ID NO: 7160 - DNA, 814 bp, Artificial sequence
  DNA replication origin
gacgcgtctcccgatctctgctacgcggagccccgggcgtgacggcaggagtctccgggacccgggctccgctcggccgctccctcgccgcagccgcccacctgtgaccacagcccgccgcggcccgggcggcgcgcccgcctccccgcgccgtcccaaccgcccctccgcccgcccggctcggtgcgccaggtccacgcgcgcttccgggtgccccgcccccggcgccggggttccccgcctgtccgcacgtgcgccgcccgcctccccgcggtgcccgcgggcgaggctcctcctcctggcccgcggccctggcgccgggaaggggaaaatcggctcccgagagcgcgtccaggaggcaggggcaggaggtgggtcccgcacctccggcctgccccgccacgccacgccccgccccgccccagaggcggcagccgggcgccgccggtgcctgcgggcggcgcgccggtgggacagcctccggagccccggggtgcggacgaggtgcggagacggaaatacgggaaacccgggaacccggaggatttccgaactacgtgagaccgtggagccgccagccttcattcagactccggcaacaggcggtgagggagctttccaccgcaaaatgttatccaagtacctcccccagtttcgctgaccttctcttaaaggcccatcactgctgccggatctgttcatttagcaacctgttcgtttcatgatttctggctagcagcctttacattggaccagcaggcctcgctagtacttttgttccagtcgtctgtgtatttgagatgaaactgccctg

SEQ ID NO: 7161 - DNA, 1268 bp, Artificial sequence
  DNA replication origin
ggagactcctgccgtcacgcccggggctccgcgtagcagagatcgggagacgcgtctgtgcctccggggaagccgacccatctcccctccgcctctttggctgcagttgcacctccggccagagggcaggtaacttcccttccaaggtcattctcctggcggggtggtgcgcgaggcccgcccacgtcctccggattggcgggggcgggagaggcgcaccctgcaaggggcccgaccagttgggctggaccgcgacccctgagcactgccagggagcctggtgtgtcagccgctgctagcgggcatatgcttcgcctttccctatagccccgaggctgagttcccaccagcgcccaggcttggagcggagaccgctcggccctcccagcctgcacccgcaggtgagcgcaaccgcccgcgccccggctgtcccggacgcgtggtcggctgtcgccataggaacggctggtgcccagacggcgcctgcccaggctgggaaggggcggtgaaggcagctcagacctccaagaaccctggagccccctgtgtggccaggcggagccacagaagcctgatgaaaacgggaccccctccccctctctcttctcatttttgattgctcaggcgttggaggttaagcagagagagagaggcgtggacctatttacgagatgtaagttgtgttctttccacctttaccttctgagggcttcttacgcctcatggtgacaggtgcaaatcatgacacagaagggcagtatgaagcctgtgaagaaaaagaaaaccgaagaacctgaattggagcccctgtgctgctgcgagtacatagatcggaatggggaaaagaaccacgtggctacttgtttgtgtgattgtcaagatctggatgaagggtgtgatcggtaagaacagagcatttcttgacgctggccccatcacccttctgagaactgccatgtgtactttcaacctagccacccagaatgctagaatttgctcttgattctatttccaagcatctaaaatgagagttggcttctgtgtcaagtgtgaggattttagaaagatggattacgcagtagtgcacagctgtctgtctgctctgttttataggatattatttttcgtttaaagagagatgagggagagaacaggcagtttaaagggatagtaggcaagttagtataaaataaaatgcaagccagcagaatctgtaagtttaaaatgaacacaatagttccagaaagttcctgccttctcagaggtct

SEQ ID NO: 7162 - DNA, 908 bp, Artificial sequence
  DNA replication origin
cccggctccacaggcccagcgcgctccagacacctgcctctcactggccaccgccgctgcccctcaccccgcagccctctcggcaattggccccaggccgccgctcgtcatcctcagccttctcctagagtaccgcctccgtcgccgggtcatttaagtttatcacaaataaataaataaaggaggaaatagaaatgcgtagaaagtaaaagcagtagggggtgggggagatggggcgtggaggaaaaggagggaggagcggaggagtaagcaacctaacctgattgcgcctgtgtcgaccaatcatggctcactccagtccggtctgacgggctccctgaaccaatagccttccacctcccggatcactgaacaacgagatacgattgaccttttcagaaagggtgaaggtgcggcggggggagggggttgtgggggtgggcgaagtggaaggattgtccaccaatcgcctgttaatacttctctgagcgaagtttccgcgtcccaatggatgtttgagatagcggattgggcctcttttagcccaatcgaaggtgacagagatgagggaagaggaagaaaggggcggggacgggggggcggaggggagaaggaagagtgcattttgtttatgggcggcaacctcacgaggggcgtcccattctcattggctcactgaagccaagattggcgtgagagctatcctatagcggggagagatagagggttcgcggagtgaagcgtccaatgtgggccttctgccgaagaagtaggggcggggggaagtttaggagttgaggaaagaagattaaagagcgcgaggaggtaatgccacaaactctaatttgttgtgggacgggcgggagagagggaggagtgtgtgcgtgccgagggggatgaggcgtctg

SEQ ID NO: 7163 - DNA, 711 bp, Artificial sequence
  DNA replication origin
gggggacttgtgttggccctgaatttgttctctggttcctcaaggttaggaatccactccactagaggagcctaggtgctcccagaccactggtttctacactccagtgggtgttgccagccaaagcattttgtagggcagtggcagcaggatccatcctcattcacatgttccagcagtagcagtgctgcagggcacatgcttgtcagctgtggcagagtgaaaagcaggcttcagagtgccagcctccctgtgggcattcacaacactggcagaggtagtacagttggggggtcaggggtctctgactggtgcctgtgtgcacatttgcactggtgatggtgttaacacaggggcagggcactggcaggagtgggtctgaatgtgccatttgtgtatgttcacccaggctggggtggctagtcagggtgggggagggactctgttctccttgcctagtttcattctggtagcagtgttggtgcaagggcagggcactggaggggatggggctggtgggctctgtgccctccaagacttgaatacaatggtggtaaggcaagggaaggggagcagagtggtgcaatggtggtaaggtaggaaggggaatggggcagggaacacacacacacgcatgctcatgggtcagggaaggcaaaatccaaaggtacacacacatgctggcagagcaatgtgtggggtggcagtggg

SEQ ID NO: 7164 - DNA, 1241 bp, Artificial sequence
  DNA replication origin
agaatgtttaaaatgcaatatatttatgtggatttttttccaggatattggaacatatataaaatatgcttgtgcatatctaagctttgtatttatttcaggttatatgtatactgagaagaatatataaacagtgtatgatatttacatgttatttcattttttgagggaaattaacctccacaattattaactatgcataaaatgtaatggcagatatgacttatattgtataggactgactacaattcctctttagaaatagctgttctttgcttttataatactaggaaaagaggaaaagagttcttaaagaaatacaaggattcctcaagcccctcttccctaaaacatgctctatcatatctcctggattgactggaatatccttctctgcccccaccccatcaccctctcaatgcagtggaaaagtcggtgggtaattgggtccagattggaggtgtttaaatattcatgaggctggcaggggactgggagggggcgactgtctagaatgggggtaggggctgggggaagtgattagtcactgaaggctagagaacaattccgagaaagagacggagagagagggaagaaaaagacagatagatagatattggggggaaggagaaaaaaggagaagagagggaagagaggacagcggagagagagcaccagagagagagggagagagagagagagcgctagagagagggagcgagcatgtgcgatgagcaatagctgtggaccttacagttgctgctaactgccctggtgtgtgtgagggagagagagggagggagggagagagagcgcgctagcgcgagagagcgagtgagcaagcgagcagaaaagaggtggagagggggggaataagaaagagagagaaggaaaggagagaaggcaggaagaaggcaagggacgagacaaccatgctgtgctgtatgagaagaaccaaacaggtagagctaaagattttttacttcttgctgttgtgaaataacccgagtacagtatttccccgtaaaggcaaacaatttttttactgcttctgctctggccgtggtgctcgcgcttccttagcatatggtaactgatggttgcatcccagcttttattcttttctgtctttcatgctctggttttggaatgctgctactaattagggtgagggtagaaaaaacatgcctgtttggctagaaataatttttttttttcttattagtgaatgctcagcattt

SEQ ID NO: 7165 - DNA, 1290 bp, Artificial sequence
  DNA replication origin
ataatcatgcatcactgaatgcgaagcctcagtttgtgcaacagatgccgatcttaatggctatattctcttcccatggataagctagctttagttaaatgaatcattaagaataaccatttaaaatgttaatgaaaacagtgattataaccaccaagattttttttttaacttctggctctattactttttattttcgaaaggactttgggaaggtaagaaacttattgcctgtgtatgttgttttaaacagagaaggccgatacagtttctgttcacagcagccctgaggccgcatgcctgtattattaacaccaaccgtacttggagactaactctcttttgttctcatttgtcatttcttttaaatattcatttagggtataagacagaattgggtaagtaggatccttgacagtccaactagttggtaaacaaatattttgtcttcctgaaagtatcattatactatcgcaaattaagactgaaaaggaaaaaaataccaggatgttgatatttaagaataaatactttatcttttcagaacaacaataagaaggctggtttaggctttatcgctggaaaatggagtttgtgaaacaaagaagtaatagatgcatagcaagagctcagtgtccttccacattgtgtcaccggttgtaccctgagacagattctccaagtcttagaacatggatatgcagtgagagtgaggtttacgtagaaaagtctttgtgtcttgggagtgccatgtgtattgaatgtctatgactcatgtctccccttgactcacttcttggctgggctacatgactcatcaggcctggtaggttcagggcagtgtagctggtggggaagggctaagtgaagaggggctgtctagacctggggagcatggttataatgagctttttcaaacgtacaactcaactctcttgcacctaggaagtatcttcatccagaaggagttctcagtcctttttctggtgagttgtcttgattctggaaaatatgtttgtttttctttgagaattggcccaaatattaatatatctgggtaaatcaatgctgcttgaaggctctgtaatctcatgattgttaatatagagcctggggtttatatattaagaatagtaagtgcaggttgagttaattgtctaagagacagaaaataggaatgttcatagtccaaggacttaaagtccaagtgagaggtgacagcgtgctgtcagtcctcacagccctcgctcgctctctgctcctcctctgcccgggctcccactttggcag

SEQ ID NO: 7166 - DNA, 1097 bp, Artificial sequence
  DNA replication origin
aagagtgagtgtagctgaaggatccgggaagcagaaagtatatgcgtcaggtatgaggaagaaattagattttggaagttatgagaactgtagagagtgagttgagcatagtttgtgattttgagggcctctaaaagtattaaagcagcggcagccgctgcacacagacatgaggcctaggctaaaacagtaaggtcaagttgtttggacagaaaggctacagggtgcggtcctggctcttgtgtaagaattctgaccacactaaccatggctaggaaggaaaggagttgttttgtagaaggtgctggggtttgagagatcagttggacacgattggcagggagagcacgtgtgtttttatgagaattatgccgagataggtaacagatgaggaagaaatttgggcttgattgaagtaatgggggctgtctgtgaagctttgcggcagtacagcctaggtaatttgctgagcctgatgggtgtcagggtcagtccaagtgaaagcgaagagaggctgggattaagggtgcaaaggaatagtaaagaaagcatgtttgagatccagaacagaataatgggttgtagaggcaggtattgaggataggagagtatatgggtttggcagcatggggtggataggcaaaacaatttggctgataaggcgcagatcctgaactaacttgtaaggcttgtctggttttaggacaggtaaaatgggggaattgtaaggagagtttatagggtttaaaaggccatgctatagcaggtgagtgataacaggctttaatctttttaaagcgtgctgcgggatgggatattggcgttgagtggggtaagggtgattaggttttaatgagatggtaaggggtgcatgatgggtcgccaaggagggagtagaggtatcttatacttgtgggttaaggtgggggggatacaagaggaggacgcaaaggaggctttggattgggaagaagggcagcaatgagatatagctgtagtccaggaatagtcagggaagcagataatttagttaaagcgtctcagcctaataagggaactgggcaggtggggataactaaaaaggagtgcttaaaaga

SEQ ID NO: 7167 - DNA, 1192 bp, Artificial sequence
  DNA replication origin
ctgggtttttatatttgatgaaaaagagcctaaacactatctgatttgggataaacaaaaaggagcattaaccttgactatgcctttggctccagccacctttttaagagtaaattgctgggcaggtgggggagggctagtcaccgaacgaaactgtaagccggaccaggtgtgaggaggggaggcaataaaaagattatagggtggaggagcagaggctgaggaagaattgggacctagcttggcctggcgaggaggggagaggtcagataggtctgtagaaaaggaagattagaaagactcagcaacgcttggggttgggactgaggcgacaggcgggagggaaagaaggaagatttgggacgagttgcactgggcacagagactaggaagggactgatgtgtaaaagaatgcctggacgtcaggcacctcagaccatttgctcattttacaacaagaaatatttagatcttgtaggatggaaaaattgaaagtgccgttttctggctatttggaactactgtctagtttgtattggggtcaagcagcattgcagaagaaaataaggcatttgggttttaggtcaggtgtgagttgaagaggttttaagttcttgagaacacaggctgagggagaaggaggaggaatggagggtggaaggttgcccatagtgaaggaggcaaacctagagaaaagagagcatagagacacggagggaaggggttcgggggttcttaccctccagaaaagcgggaaggggggtcggggcatggaaataagggattggggcacagagataagaggatggggtgcggaaataagggattggggcacagagataagaggtcggggtgtggaaataaaggattggggcacagagataagaggtaggggtgaggaaataagggattggggcacagagataagaggtcggggtgtggaaataaggaattgggggttcttgccccctagaaaagtgggacttgctgctaagggtgaaggagaaggggttgaggggtacttgctcctcccccagaaaagcagagaaggggtagagacaaggagagaaggggttggggtacttgccctttccccagaaaagcagagaaggggtagagacaaggagagaaggggttggggtacttgccctttccccagaaaagcagagaaggggtagagacaaggagagaa

SEQ ID NO: 7168 - DNA, 947 bp, Artificial sequence
  DNA replication origin
ctttggcttttaatcttagactccactgtcaagtttctcctcagtttccttctcccatctttcaggacattccccaccctcactccccacctcaaagctttcctgtcctctgtcccactcccctcatttgcaactctccttcccacctcctttttcttctttcctcaccccttccctctcctttcctggactctttctcctgttcttttataacttaagtccctctccttctcccctctctcctgaacagtacctctaagctccgttcccccttcttaaggaaatcagccaggcctcagatggagctgtcgtcctgacaacccaaaggcgcatcaggctttcattgaggctggctgctgctgaagggggcagttgtgcaaagcgaggggccacgtcgaggggagggcggaggggatgacgtggaggggctgttgaaaaccagcagggtggggggagggtgggggggtgggggggaggtgctgagctgagagagcgccagggactgggagaaacaggaaagggaggagggggagagaggctctgggttgctgctgcttctgctgctgctgctgctgtgtggctgtttctgtacactcactggcaggcttggtgccggctccctcgcccgcccgcccgccagcctgggaaagtgggttacagagcgaaggagctcagctcagacactggcagaggagcatccagtcacagagagaccaaacaagaaccctttcctttggcttcctcttcagctcttccagagggcttgctatttgcactctctcttttgaaattgtgttgcttttacttttcacccttctgcttgggttttatgagggctttgttaagtcttagagggaaaagagactgagcgagggaaagagagaggcaaagtggaaaggaccataaactggcaaagcccgctctgcgctcgctgtggatgaaagccc

SEQ ID NO: 7169 - DNA, 869 bp, Artificial sequence
  DNA replication origin
cacagacacagtagcaatctgatctctctttcttttccccacatttcccccttttctattcgacaaaaccgccatcatcatcatggcccgttctcaatgaactgttgggtacacctcccagatggggtggcagccgggcagaggggctcctcacttcccagacagggtggtggggcagaggcgccccccacctcccagacggggcggctgccgggcggaggggctcctcacttctcagacggggcggctggtcagagacgctcctcacctcccagacggggtagcggcggggcagagacactcctcagttcccagacagggtcccggccgggcagaggcgctccccacatcccagacgatgggcggccgggcagagacgctcctcacttcctagacgggatgacggccgggaagaggcgctcctcacttcccagactgggcggccaggcagaggggctccccacatcccagacgatgggcggccaggcagagacgctcctcacttcctagacggggtggcggcagggcagaggctgcaatctcggcactttgggaggccaaggcaggcggctgggaggtggaggttgtagcgagctgagatcacgccactgcactccagtctgggcaacattgagcactgagtgagcgagactccgtctgcaatcccggcacctcgggaggccaaggctggcagatcactcgcggtcaggagctggagaccagccccgccaacacggcaaaaccccgtctccaccaaaaaatacgaaaaccagtcaggcgtggcggtgcgcgcctgcaatcccaggcactcggcaggctgaggcaggagaatcaggcagggaggttgcagtgagccgagatggccgcag

SEQ ID NO: 7170 - DNA, 937 bp, Artificial sequence
  DNA replication origin
aagtctcccatgtctacctctttctacacagacacggcaaccatccgatttctcaatcttttccccacctttcccccctttctattccacaaaaccgccattgtcatcatggcccgttctcaatgagctgttgggtacacctcccagacggggtggaggccgggcagaggggctcctcacttcccagtaggggcggctgggcagaggcgcccctcacctcccagacggggcggctggccgggcggggggctgacccccccacctccctcccggacggggcggctggccgggcggggggctgacccccccacctccctcccggacggggcggctggccgggcggggggctgacccccacctccctcccggacggggtggctgccgggcggagacgctcctcacttcccagacggggtggctgccgggcggagggactcctcacttctcagatggtgcggctgccgggcggaggggctcctcacctctcagacggggcggccgggcagagacgctcctcacatcccagacggggcggcagggcagaggcgctccccacatctcagatgatgggcggccgggcagagacgctcctcacttcctagatgggatggcggccaggcagagacgctcctcacttcccagacggggtggcggccgggtagaggctgcaatctctgcactttgggaggccaaggcaggcggctgggaggtggaggttgtagcgagctgagatcacgccactgcactccagcctgggcaccattgagcactgagtgaacgagactcggtctgcaatcctggcacctcgggaggccgaggctggcggatcactcgtggttaggagctggagaccagcccggccaacacagcgaaaccccgtctccaccaaaaaaatacgaaaaccagtcaggcgtggcggcgcgcgcctgcaatcgca

SEQ ID NO: 7171 - DNA, 922 bp, Artificial sequence
  DNA replication origin
gaagtgaggagcgtctctgcccggccgcccatcatctgagatgtggggagcgcctctgccctgccgccccgtctgggatgtgaggagcgtctctgcccggccgccccgtctgagaggtgaggagcccctccgcccggcagccgcaccatctgagaagtgaggagtccctccgcccggcagccaccccgtctgggaagtgaggagcgtctccgcccggcagccaccccgtccgggagggaggtgggggtcagccccccgcccggccagccgccccgtccgggagggaggtgggggggtcagccccccgcccggccagccgccccgtccgggagggaggtgggggggtcagccccccgcccggccagccgccccgtctgggaggtgaggggcgcctctgcccagccgcccctactgggaagtgaggagcccctctgcccggcctccaccccgtctgggaggtgtacccaacagctcattgagaacgggccatgatgacaatggcggttttgtggaatagaaaggggggaaaggtggggaaaagattgagaaatcggatggttgccgtgtctgtgtagaaagaggtagacatgggagacttttcattttgttctgtactaagaaaaattcttcttccttgggatcctgttgatctgtgaccttgcccccaaccctgtgctctctgaaacatgtgctgtgtccactcagggttgaatggattaagggtggtgcaagatgtgctttgttaaacagatgcttgaaggcagcatgctcgttaagagtcatcaccactccctaatctcaagtacccagggacacaaacactgcagaaggccgcagggtcctctgcctaggaaaaccagagacctctgttcacttgtttatctgctgaccttccctccactattgtcctgtgaccctgcca

SEQ ID NO: 7172 - DNA, 1120 bp, Artificial sequence
  DNA replication origin
gccgcggtggtgttcgctatccccgtgtccccggtgctgatatcactgcattcctcctctttcaggagggaattggcattaagtttaggaggctaggtatccgcttggcacctggtacttgtatctctctgcaaaatagccccaccagattcttctgccccgagatggaggagggatgcgggagggaagggaacggtgagtggggtggggggagggggacacggggagggggggaggaggagaagagggagggaggaagagagtggggtgggggagagagagagagagagagagagaatgaatacgagaattcacgggtaatcgctgcgctggctcataatggtcaatgtatttcatgcttgcaggacaaaattgctagcgctgggtgtttactttgaagggattgtaggtttctatgttttggggaggttgtaaaataaattcatgaaggttaaaaatgaaaatacatacatggtgtttgcatttcacttacaagctggcatccagagccctcactgatgttaaacatacctataatacacgaagtaattccaacataaaaatatattatctttttaatcttcctgtctcactcttcctgctcgtgagaggaaccttgcacaattagccatagagagtctgtgctatattgctctaccactgacggttctactacatcttcatgtttgggcattctgccatcattaggacatttacccacgcacatctctcatgctacagaacacactccatttacacacagtgtacacatgcacacacaaagacacatacgcacacacactgcctctcaagaacacttggcatgaaatgaccagactggcaatcctactcctgatttttttctgacagctggttgctaatgttacattggtgggtttcatttttcattgctgggggatattttgtgtagctataaagccctcttgctaaatgaaaagagaatagactccctggctgtttactgttgaagcattgcaagggaatgaatactatgtcgaagttatagtttaaaatatgcttaggggaacagctggaactcacccataatacaattacaagttacaggttctaaaaactttctcatctcagaactcactga

SEQ ID NO: 7173 - DNA, 928 bp, Artificial sequence
  DNA replication origin
ctgccccgccgccccgtctgggatgtgaggagcgcctctgcccagccgcaaccccgtctgggaggtaaggagcgtctctgcccggctgccccgtctgagaagtgaggagaccctccacctggcaaccgccccgtctgagaagtgaggagcccctccgcccggcagccaccccgtctgggaagtgaggagcatctccgcccggcagccaccccatccaggagggaggtgggggtcagcccccgccaggccagccgccccgtccgggagggaggtgggggggtcagccccctgcccggccagcggccccgtccgggagggaggtgggggggtcagccctccgcccggccagccgccccgtccgggagggaggtgggggggggtcagccccctgcccggccagccgccccgtccgggaggtgaggggcgcctctgcccggccacccctactgggatgtgaggagcccctctgcccggccaccaccccgtctgggaggtgtacccaacagctcattgagaacgggcggggatgacaatggcggttttgtggaatagaaaggggggaaaggtggggaaaagattgagaaatcggatggttgtcgtgtctgtgtagaaagaagtagacatgggagacttttcattttgttctgtactaagaaaaattcttctgccttgggatcctgttgatcggtgaccttacccccaaccctgtgctctctgaaacatgtgctgtgtccactcagggttaaatggattaagggcggtgcaagatgtgctttgttaaacagatgcttgaaggcagcatgctcgttaagaatcatcaccactccctaatctcaagtacccagggacacaaacactgcggaaggccacagggtcctctgcctaggaaaaccagagacctttgttcacttgtttatctgctgacctt

SEQ ID NO: 7174 - DNA, 968 bp, Artificial sequence
  DNA replication origin
tgggtacacctcccagacggggtggtggccgggcagaggggctcctcacatcccagtaggggtggccgggcagaggcgcccctcacctcccggacggggcggctggccgggcagggggctgacccccccccacctccctcccggacggggcggctggccgggcggagggctgacccccccacctccctcccggacggggccgctggccgggcagggggctgacccccccacctccctcccggacggggcggctggcctggcgggggctgacccccacctccctcctggatggggtggctgccgggcggagatgctcctcacttcccagacggggtggctgccgggcggaggggctcctcacttctcagacggggcggttgccaggtggagggtctcctcacttctcagacggggcagccgggcagagacgctccttacctcccagacggggttgcggctgggcagaggcgctcctcacatcccagacggggcggcggggcagaggtgctccccacatctcagaggatgggcggccgggcagagacgctcctcacttcctagatgggatggcggccgggaagaggtgctcctcacttcctagatgggatggcggccgggcagagacgctcctcactttccagactgggcagccaggcagaggggctcctcacgtcccagacgataggcggccgggcagagacgctcctcacttcccagacggggtggcagctgggcagaggctgcaatctcggcactttgggaggccaaggcaggcggctgggaggtggaggttatagcgagctgcgatcacgcaactgcactccagcctgggcaccattgagcactgagtgaaccagactccgtctgcaatcccggcacctcgggaggccaaggctggcggatcactcgcggttaggagctggagaccagcccggccaacacagcgaaaccccatctccaccaaaaaa

SEQ ID NO: 7175 - DNA, 1696 bp, Artificial sequence
  DNA replication origin
ttcttttccccacatttcccccttttctattggacaaaaccgccatcgtcatcatggcccgttctcaatgagctgttgggtacacctcccagacagggtggtggccgggcagaggggctcctcacttcccagacggggctgccgggcagaggggccccccacctcccagacggggcggcggccgggcagaggggcccccacctcccagacggggcggcggctgggcagaggcgccccccacctcccggacggggcggctggccgggcgggggctgccccccacttgccgggcggggcggctggccaggcgggggctgcccccccacctcccgggcggggcggctggctgggcggctgccccccacctcccggaccaggcagctgcccggcggaggggctcctcacttctcagacagggcggccagtcagagacgctcctcacctcccagacggggtggcggcggggcagagacactcctcagttcctagacgggtcgccgccgggcagaggcattcttcacctctcagacggggtggtggggcagaggcgctccccacatcccagatgatgggcggccaggcagagacgctcctcacttcctagacggggtggcggccgggaagaagcgctcctcactttccagactgggcggctgggcagaggggctccccacatcccagatgatgggcggccaggcagagacgctcctcacttcctatacggcgtggcagcagggcagaggctgcaatctcggcactttgggaggccaaggcaggcggctgggaggtggaggttgtagcgatccgagatcaagccactgcactccagcctgggcaacattgagcactgagtgagcgagactccgtctgcaatcccggcacctcgggaggccgaggctggcagaccactcgcggtcaggagctggagaccagcccggccaactcggcgaaaccccgtctccaccaaaaaatacgaaaaccagtcaggtgtggcggtgcgcgcctgcaatcccaggcactcggcaggctgaggcaggggaatcaggcagggaggctgccgtgagccgagatggcggcagtacagtccagcctcggctcggcatcagagggagaccatgcaaaggggagacgaggaccgtgcaaaggggggagggagatggggagggagacagagagggggagggggaggggaaaagctgagtgattcttgcaaaaggtatatattatgcttccaggcatcatatgctcaagacctggggactatgtgggtataagtaactgattgtataacgccactggatgaaatccagtaatgtcctttttcactaaatgtggttatacacccttacagcatgttacaaagggaacacaaaaaaataagtttcacactggaccttgttcaggagcagtgttgacctatttcactgacctatcctcaactgccactaggtggccctcttttccagcttccaagggcctacattgggcctatgcggcctcagtatagcctcagatttcctgctatgaagcttaatgagcccagcactggctctagctatggtttgttcctttttgggtggagtggatgtgtggttcttggagaatctactactttcccgtgagtgcagtgggagactgcattagagaatctagctatcctgactgcctaaacagagcctaccataatttttcactc

SEQ ID NO: 7176 - DNA, 822 bp, Artificial sequence
  DNA replication origin
tgaggagcgtctctgcctggccgcccatcatctgggatgtggggagcgcctctgccccaccaccccgtctgagaggtgaagaatgcctctgcccggcggcgacccgtctaggaactgaggagtgtctctgccccgccgccaccccgtctgggaggtgaggagcgtctctgactggccgccctgtctgagaagtgaggagcccctccgccgggcagctgcctggtccgggaggtggggggcagccgcccagccagccgccccgcccgggaggtgggggggcagcccccgcctggccagccgccccgcccggcaagtggggggcagcccccgcccggccagccgccccgtccgggaggtggggggcgcctctgcccagccgccgccccgtctgggaggtgggggcccctctgcccggccgccgccccgtctgggaggtggggggcccctctgcccggcagccccgtctgggaagtgaggagcccctctgcccggccaccaccctgtctgggaggtgtacccaacagctcattgagaacgggccatgatgacgatggcggttttgtccaatagaaaagggggaaatgtggggaaaagaaagagagatcagattgttattgtgtctgtgtagaaagaagttgacataggagactccattttgttctgtactaggaaaaattcttctgccttgggatgctgttaatctataaccttacccccaaccccctgctctctgaaacatgtgctgtgtccactaagggttaaatggattaagggcagtgcaagatgtgctttgttaaacagatgcttgaaggcagcgtgctc

SEQ ID NO: 7177 - DNA, 945 bp, Artificial sequence
  DNA replication origin
gccgggggcgcgggctttcctgtcgccgcagcgtgtgagtccccagcgccgaaaggggatcagaaaccgctgggcggagcagcgggaggaagctgcggcgcgcagagcagagtcagcgccaccgtctttcgagctggagcggagggaacgtggccttgacgttgctgaagctgaagcgccgggcgggcgcccggaccccggggcggggcagaaacgagtccgttccctactgcggggcgggggcagggctggaacgggagttcaggagggacaaggacgtggaaggagcccagcagagggcacccgggacccccgcggccgggccgagtttgaagggagcccctctccccctccccctggcggagccccctgtagggtctgacctggtgccccgcaacaggagcgggaggaggagcaggcccagagcggccgggccccagcctagaggggcgctcgaggggaagcgagtgaagtgagggctccgccagagcagcacccccttccccgccgtccctcccggactggccggttctcgtcagagattcctttgtcttcgacgctggtccctccacaccaaggtgggaggctgaggtgggaggtggcagagcggtgggagtgggagcaaggccggagcgtgggtggaggcgctggccgcgggcttgcaaggatggcacaagggagacatccaggacaaaccatggggaacacagctgccactgagagaagctgcccggaggaggaaggggctgcaaagttcaaccaccaggcaaggcaagtccacgaacaaaatcccggctctaaaaacagagcagcaattgtcactgtgggttagacgctttgagttacctctattttcatttatgtctaagataaattcaagagacaaggagaaagtcaggaggttaaaattccagcctctggtcccagctccctaaagccagctcc

SEQ ID NO: 7178 - DNA, 1296 bp, Artificial sequence
  DNA replication origin
ccccgccccgcagtagggaacggactcgtttctgccccgccccggggtccgggcgcccgcccggcgcttcagcttcagcaacgtcaaggccacgttccctccgctccagctcgaaagacggtggcgctgactctgctctgcgcgccgcagcttcctcccgctgctccgcccagcggtttctgatcccctttcggcgctggggactcacacgctgcggcgacaggaaagcccgcgcccccggccgcttcccggaacgccctcggggacggctgagtcacttggcgcccgcccgcgcggccaccgagcccagaagcggggaaagcccagaagcggggaaaccccagggacagccgccggccctgggggcagccagcgctccaggccgcccagcacctcgggcccggatgggcttctcgcgccccagggctgcggccacaccccgccggcccagaccccgcgggtagagaaaggaggtgcaaccctgagagccaagacgttgggcttggctttgctttgcgtttctttccttttttcttttgtttcttttcttcttcttttttttttaaccacatccaggaagaggagaaacctgtctcatgacaggaaacgaagagggaggatgcatccgaactgagggacattgtttcagttgcctcacctgacatactgtctcacctgagagagggaggccgaagaggcagccaatggtggctggagcaagccctgtcctcgttacctgggctgtggctgagccctggggctcaccggctgtatggccctgggcaagtcctcggagccttaggttctctgcaaaatggagatgatgtttaatagaaaatgtttctataacttttgtggcttactttttgaaaagcgagggagggacttttgtccttccctcctcgcatctcagtcgcagtgctggttcacaatcaggctgttaacgcggtttccacatttcctgtcctcccccttcccctttcctgctgggaataagaaggtgggcccccaaggagacagagggtacactcgtaaatgaaaaagaaaagtcagcacaaggaccctttgctgcggagatttctttttccaggtatcctaagtggggctcttgccatccctgccatccctgctctacaccgaaggggtgaagtcctgggactctgttatgcccatctgtatgtaatcctaggcaagattattacagtagcgctttcctctttttagaatatacccttgtctagcccctaccccatcttcaggacagtaaaggttctcaactcacttcaaaccctccta

SEQ ID NO: 7179 - DNA, 1360 bp, Artificial sequence
  DNA replication origin
ccagtgacaacatttaacttagtatttggcactatgacaaaacaaatctcaatcaaaacttggacctattaatacttccaagttaacttttgattaaacataaattatacggtggcaggttggtaatgtcaaaacaggaaggttaagagataacacatcaaaccacttatccaattgaacacaaatgcatacagagatgttactgctgctaggtatttattggctcccactagtcccttctaaagagagaaatcaatggcagcctccaaatgtgaatggttactgaggaagttcatccacagattaagaacaaatattatgtgtagtcatacaaacaagaaaaaaatgttgggagggtgggacatttaacgtctctattaagtatatcaaactatgataacccctgagacctaaaatattctctcattccaaattccaaaaattctgcaaatgtgcataatggtttagtaatcaaatcttgtccttctctttattctaaaggatgggcaagtaaacactgtcatcactactttaacgtggaaacactcgagcacttgatgaaactgactaccaacagcaagaaaagtacaagaaagcagtttgaaatcgaatcatccaaataaatatcatattatctcaattcaaggttaatgagaccgggggagggggtatgggaggagtaaaaagggagctgcttcatccttgactgaagataggttttgcccttttccattgcctgtttatcaggaggtctaataatttcagatcctggtatttcgaggtttcttattttaagggcgaggtggaaaaggggtgtaaaataaaaccaatactcactgctaactttcatgctgccaaaagctgaaggctgctgcaccggcttgcagctctccgcaaaggaggtggttctgggccgccctgacatgatcactctcttcgcgaatcaccttttccttccttcctccttttcttccttttgtctttatgttggggtgttaggttaacgataaatgcagcattaagttctcccacagaagaaaaagaaaaagacttcgtcctcttggcttttcactccttttgtatactataaaaaacaaaacaagcgatatatttctccttcaagacagatcggcacggatatttaacatatagatgatttaggacttgggaaaaaatacaattctttcccctccctttcctgggaggagagaaaagagagggcaaatcctaaaaaaatatgtatcacgtgaaacgggggcaaatacttgattgaaaatgagtacttcgaatattatattttcctcggggattttttttccgagtcaatgaagaagggaagcggcggaaggatcacgagtct

SEQ ID NO: 7180 - DNA, 1055 bp, Artificial sequence
  DNA replication origin
agcgtgtccaccgagacgctggagtctgagctggaggcgcggggggaggagcggcgcggggcgcgggaggcgctgctgcggctgctgctgcctcacaaccgtctggtgtcgctgccacgggcgctgggcagcggcttcccgcacctccagctgctggacgtgagcggcaacgcgttgaccgcgctcgggccggagctgctcgctctgcgcggcctgcgcacgctgctggccaagaacaaccggctcggcgggcccagtgcgctgcccaagggcctggcccagtcgccgctctgccgcagcctccaggtgctcaacctcagcggcaactgtttccaggaggtgcctgcctcgctcttagagctgcgcgcgctgcagaccctgagcctgggcggcaaccaactgcagagcatcccggctgagatcgagaacttgcagaggtgagcgggtgtgtgccggagggtggggaggcctcgggcggtgtccgggaaccctggggcgccgggcctgggcacctcaacgtttgtcacgtaactatttccaagctttctctttaactgtgcggtagtgagttctgcccaaccatctcagcaagttgttgtaaatacctagtatgttcgcatgtgtgactgtttggtgtgttgtgtttggcctatgcagattctcgaggcattttttctgtcttccttattgaatctggggcgtgatccaaactgagtggaaactcaaaacagatgtaaatcagaggttgtcacttctttgctcaaaagtcttccgtggatttccatctctatagatcaaagtacgtgcctttgagcgtggcgtacaaggtgctctgatctaacccttgctttccactacatttgcagcttcctcttctctgtggcagtaccaactaccatttgtggagttcagtgacctatgcattttcccacgtagagaaagcagcttggagttgctggtaggcactcagtatgtgttgaatggatgcagtgcctctgtacacgtgctgtttcccttgcttggaatgtttccttcacctggcaaacgcctatcat

SEQ ID NO: 7181 - DNA, 975 bp, Artificial sequence
  DNA replication origin
gaccctgcggccttccgcagtgtttgtgtccctgggtacttgagattagggagtggtgatgactcttaatgagcatgctgccttcaagcgtctgtttaacaaagcacatcttgcaccgcccttaatccatttaaccctgagtggacacagcatatgtttcagagagcacagggttgggggtaaggtcacagatcaacaggatcccaaggcagaagaagttttcttagtacagaacaaaatgaaaagtctcccatgtctacttctttctacacagacatggcaaccatccgatttctcaatcttttccccacctttcccgcctttctattccacaaagccgccattgtcatcctggcccgttctcaatgagctgttgggcacacctcccagacggggtggtggccgggcagaggggctcctcacttcccagtaggggcggccgggcagaggcgctccccacatctcagacgatgggcggccgggcagagacgctcctcacttcctagatgtgatggcggccgggaagaggtgctcctcacttcctaggtgggatggcggccgggcagagacgcttctcacgttccagactgggcagccaggcagaggggctcctcacatcccagacgataggcggccaggcagagacgctcctcacttcccagacggggtggcagccaggcagaggctgcaatctcggcactttgggaggccaaggcaggcggctgggaggtggaggttgtagcgagccgagatcacgccactgcactccagcctgggcaccattgagcactgagtgaacgagactccgtctgcaatcccggcacctcgggaggccgaggctggcggatcacttgcggttaggggctggagaccggcctggccaacacagcgaaaccccgtctccaccaaaaccagtcaggcatggcggcgcaagcctgcaatcgcaggcactgggcaggctgagtcaggagaatc

SEQ ID NO: 7182 - DNA, 1397 bp, Artificial sequence
  DNA replication origin
ccgcgggggccgctgcagcagaagggggaggagaatggggaggagctgggggggcaggcaggcggggaaggagaggtcttaaggggcggcgaggggaggtcgcatttcctccgaggctggcgatcggcggagctcccacctccgcttacagctcgctgccgccgtcctgccccgcgcccccaggagacctggaccagaccacggtgagcgcagggcgcacggcgcggaggccggactcttcgggcggccgggggtgcttgggcggccggagcgagcctgcgggacccgagcaagtttcccaggtcagcgcggggcccggcgccttcagactcgctctcttctctcttccgcagatgtggaaacgctggctcgcgctcgcgctcgcgctggtggcggtcgcctgggtccgcgccgaggtaggcgaggggccgaggagtccgaactcggtccccggggcctcttgggtctgcgcgctgggcgggtgggcgcgcgtcctggggatgctctcccggggtggcgctgggagtttcggtccttggggtgtgctggggtggagctggggcagtaatgctgcttacgaaacttaaatctttaaagcaggaaaagtagttcgggccgtaagcgggagccccgccgcggctaacatggagggagagcggggaggaggagaggggacgggctgggccgacggggacgaggcggcgactggagcagcagcgagttcaaaaaggcgcctcagttccgtccttcacttcagaggagactgagagtagttggggacttttccctcccaagtctgtctcctgggggcgggggcagaggaatcgggattcttcttttggggcaaaattaattttcctttctctcttttaaagtgagatcatgattctctgaaatgtattttcttctttgtgaagtgtcctcgggttttgtgttatcatctgggcaatgtaacggccttttcccaagtgttccctgtaacgttgcgcaagtgtaagagaagatccattgctctgctctttgggggctcgagtttccagttaaagcatttcagcgcttgtttttttgtaccaattttttcaactctaacgaccttcctgagacactacaaacaaaccaacaaactctttgctcagaagccgctccattaactcaaaggtttatggacagaaaataaacaattctaaattccccgggctccagtctccaggaaagtgaggtcagaaactaaacatttgataattatggcaggaaatatggaaggaattaaaaagcatgagggagaagaaatggaatgcacattacaaaagaaatagctccctggtgggtggtttatgctccctgtttgaattttttccttcatattacagtttaaccacacccttagcatcgcagct

SEQ ID NO: 7183 - DNA, 1511 bp, Artificial sequence
  DNA replication origin
cggcggcagcgagctgtaagcggaggtgggagctccgccgatcgccagcctcggaggaaatgcgacctcccctcgccgccccttaagacctctccttccccgcctgcctgcccccccagctcctccccattctcctcccccttctgctgcagcggcccccgcggctcccgctccccctccttccgacccctgctccggggagcccgcgggagtcctggcgccgccgaacccctctctccgcacggtccctcgtccggcgccccttcggccccctggacgtggagcggaggcagagggggtgtcccgtgggtccctgccacaaaggggtagggggaagggaaaccccaccccgggaggggctgctggctggcggcggcccgggcgggctgcggcggtggccaggtgggcggtgccgtggggggcccgggaaggtccgggactggaacctggaggaaaagacgtcccgcggcctaggaagcggagccgccccccatggctgaagggggaggcccagggaggcagaggagaccccgcatcccggggtcacggcagcagggcagcggggcaccgggaagtgggcgcagggccgggaagaccggccggcgtggggaaggctgctgtgggttctacagtgcattgtcccgggtgaggtggcggccgccctgctctgctgggaagatcctgagtccagcgtttgccggcagcctcatcccctccttccctcgggccggggagcggtgtccccctcctctcttccgcccactcactcatcacctgtgtccctcctcccatccctgtcatcccaagtagcctctgtgttcaggattgccatcttcaccaccttcttcccagcccttggccttcgaaagtgtgctacctctttgacagggttaactccctaaaatgctcctaattaaggcgcctttcctgccataactagtaaggagagcagatccacttagcaactcagatttcacatgcccaagactaagcctcacttcccccagcttcagggcctgcttatctacctctttcagggtggttgccttcaaacctatctccttttctcagagccggcttgtacccatagcctggcagtttagccgctgagatctcatatgcatcccctcgcctccgttcacatgtccactttcctaggccagaccttcatcctccctcactcagaaattctggaaacctcctttcgttgtcctctgactccaggctctcccctgtagtctccactgcaatccattgtcatattctttcccttattttaaacattgtcttcctcgtgttcatgttcttcctctactcagaaacttcagcgttcttctacccacatcaaatccaaactctgcctttcttataagccctgcattactgggcccaccctgtccatctaacttctcttcaactacatcagcatacttcctccgctcaaagcaggcccatctcctcgttgtcctctgaacttgtcatactcactctgctgccaaggtttgttgagt

SEQ ID NO: 7184 - DNA, 1046 bp, Artificial sequence
  DNA replication origin
gaggcgtctgaggaaggtgcctaagtcctgggtcagatagtcatccctctgggacgccgccgccgctgccgccgtccagctgtggctccctcgcacctgtgtgtgtctgtgtgagtgtgtgtgtgtgtttgagagagagagagacagagagagacagagacagagagcgagcgcaccagcgcgcgaatgcccgtgtgagggtgtttgtgtgtgttctggctgggagcgcgaatgcctcggcgtgaggtgtttgtgtgttcgcgcgcccgcgggcgggcgagagccccgcgcctcagcgctgggcctgggggagggacagcgggagcggcggctctgcgcgcccagcaggctgaggcgggactcgggccgcagccgtcgccgccaccgcttcacgtcccccgagagcggctgccgtgcagcggggagagcggacggcgggcgggcgaacaggcgggagagcgcggcggcggctgcgggcagaggtggagggaggggagcaggagatggggagaggggggaaagaggacgcggggagggagatgagggggaggtgagggggaggcggagggacaagtggaaacagacggtgtcgccgttctcctcctccccccctccccggcagctgttgctgtgggtcactcgcagatgttttggggtccgggctgctgggggatggggactagaaaaagtacccccctccccgcctttcatagtgacaaaaaaggaagcgttgaagctgatgggggaagagcccggaaggtggtggcagagtaaataccggctcccccaacgtcgtttttctgaaaataaaatactctgagccgaacgtttcgaagaaggaaagtccgcccttaagagagagacagagtcttggtctgttgaactctggtttgattgtataataatgatgatataatgctaatgacgatgatgacactgccttttatttttaccccagtgctgataaagcgtagttacagctggggatacagtccttgaaaatctgatgtgtgaggagggaatactgttgcttttggagttgtgtt

SEQ ID NO: 7185 - DNA, 1080 bp, Artificial sequence
  DNA replication origin
gaatttttcttagtacagaacaaaatggagtctcctatgtctacccccttcaacacagacacagtaacaatccgatctctctttcttttccccacatttcccccttttctattcgacaaaaccgccatcgtcatcatggccccttctcaatgagctgttgggtacacctcccagatggggtggcggccgggcacaggggctcctcacttcccagacggggcagccaggcagaggcaccccccacctcccagatggggtggctggctgggcggcggctgccccccacctccctgacggggcggctggccgggcgggggctgccccccacctcccggatggggcagctgccgggcggaggggctcctcaattcccagatggggcggctgctgggcggaggggctcctcacttctcagacggggcggccagtcagagatgctcctcacctcccagacggggtggcggcggggcagagacactcctcagttcccagacggggtcacggccgggcagaggagctcttcatatctcagacggggcggcggggcagaggtgctccccacatcccagacgatgggcggctgggcagagacgctcctcacttcctagacgggatgactgctgggaagaggcgctcctcacttcccagactgggtggccaggcagaggggctcctcacatcccagacgatgggcggccaggcagagacactcctcactttctagacagggtggcggccgggcagaggctgcaatctcggcactttgggaggccaaggcaggcggctggcaggtggaggttgtagcgagccgagatcacgccactgcactccagcctgggcaacattgaacactgagtgagcgagactccctctgcaatcctggcacctcgggaggctgaggctggcagatcactcgcggtcaggagctggagaccagcccggccaacacggcgaaaccctgtctccaccaaaaaatatgaaaaccagtcaggcgtggaggcgcacgcctgcaatcccaggcattcggcaggctgaggcaggagaatcaggcagggagtttgcagtgagtcgagatagctg

SEQ ID NO: 7186 - DNA, 909 bp, Artificial sequence
  DNA replication origin
gaagtgaggagcccctctgcccggccagtcgccccgtccaggagggaggtgggggggtcagccccccgcccggccagccgcccagtccgggagggaggtggggggtcagccccccgcccggccagccgcccagtccgggagggaggtggggggtcagccccccgcccggccagccgccccgtccaggaggtgaggggcgcctctgcccagccgcccctactgggaagtgaggagcccctctgcccggccagccgccccgtccgggagggaggtggggggggtcagccccccttccggccggccgccccgtccgggaggtgaggggcgcctctgcccggccgcccctactgggaagtgaggacccctctgcctggccagccgccccgtctgggagggtggtgggggggtcagccccccgcccggccagccgccccatccgggaggtgaggggcgcttctgcccggccgcccctactgggaagtgaggagcccctctgcccggccatgaccccgtctgggaggtgtgcccagcggctcattggtgatgggccatgatgacaatggcggttttgtggaatagaaaggcgggaagggtggggaaagaattgagaaatcggatgtttaccgggtctgtgtggatggaagtagacatgggagacttttcattttgttctgtactaggaaaaattcttctgccttgggatcctgttgatctgtgaccttatccccaaccctgtgctctctgaaacatgtgctgtgtccactcagcgttaaatggattaagggcggtgcaagatgtgctttgttaaacagatgcttgaaggcagcatgctcgttaagagtcatcaccactccctaatctttaagtacccagggacacaaacactgcggaaggccgcagggtcctctg

SEQ ID NO: 7187 - DNA, 1276 bp, Artificial sequence
  DNA replication origin
ctcctcacttcccagtaggggcggctgggcagaggcgcccctcacctcctggacggggcggctggccgggcggggggctgaccccccacctccctcccggactgggcggctggccgggcggggggctgaccccccacctccctcccggactgggcggctggccgggcggggggctgacccccccacctccctcctggacggggcgactggccgggcagaggggctcctcacttcccagtaggggcggccgggcagaggagcccctcactcccggacggggcggccggccgggcggggggctgacccccccacctccctcccggacggggcggctggccgacccccccccccgcctccctcccggacggggcggctggccgggcagaggggctcctcacttcccagtaggggcagccgggcagaggagcccctcacctcccggacggggcggctggccgggcggggggctgaccccccccacctccctcccggacggggtggctgccgggcggagacgctcctcacttcccagatggggtggttgccggacggaggggctcctcacttctcagacggggcggttgccaggcagagggtttcctcacttctcagacggagcggccgggcagagacgctcctcacctcccagacagggttgcggcccagcagaagcgctcctcacatcccagacagggcggtggggcagaggtgctccccacatctcagacgatgggcggccaggcagagacgctcctcacttcctagatgggatggcggcggggaagaggcgctcctcgcttcctagatgggatggcggccgggcagagacgctcctcactttccagactgggcagccaggcagaggggctcctcatatcccagacgatgggtggccaagcagagacgctcctcacttcccagacggggtggcggccgggcagaggctgcaatctcggctctttgggaggccaaggcaggcggctgggaggtggttgtagcgagccgagatcacgccgctgcactccagcctggacaccattgagcactgagtgaacgagactccatctgcaatcccggcacctcgggaggccgaggctggcggatcactcgcggttaggagctggagaccagcccggccaacacagtgaaaccccgtctccaccaaaaaaaaaacgaaaaccagtcaggcgtggcggcgcgcgcctgcaatcgcaggcactcggcaggctgaggcaggagaatcaggcagggaggttgcagtgagccgagatggcag

SEQ ID NO: 7188 - DNA, 1193 bp, Artificial sequence
  DNA replication origin
accgcccttaatccatttaaccctgagtggacacagcacatgtttcagagagcacagggttgggggtaaggtcacagatcaacaggatcccaaggccgaagattttttcttagtacagaacaaaatgaaaagtttcccatgtctacttctttctacacagacatggcaaccatccgatttctcaatcttttccccacctttcccccctttctattccacaaaaccgccattgtcatcatggcccgttctcaatgagctgctgggtacacctcccagacggggtggcggccgggcagaggtgcccctcacctcccggacggggcggctggccgggcggggggctgacccccccacctccctcccggacggggcggctggctgggcggggggctgacccccccacctccctcccggagggggtggctgccgggcggagacgctcctcacttcccagacggggtggttgccaggccaaggggctcctcacttctcagatggggcagttgccaggcggagggtctcctcacttctcagacggggcggctgggcagagatgctcctcacctcccagacggggtcgcggccgggcagaggcgctcctcacatcccagacggggcggcggagcagaggcgctctccacatctcagacgatgggcagccgggcagagacgctcctcacttcctagatgggatggcggccgggcagagacgctcctcactttccagactgggcagccaggcagaggggctcctcacgtcccagacgatgggcggccaggcagagacgctcctcacttcccagacggggtggcggcggggcagaggctgcactctcggcactttgggaggccaaggcaggcggctgggaggtggaggttgtagcaagccgagatcacaccactgcactccagcctgggcaccattgagcactgagtgaaccagactccgtctgcaatcccggcacctcgggaggccgaggttggcggatcactcgcggttaggagctggagaccagcccggccaacacagcgaaaccccgtctccatccaaaaaatacgaaaaccagtcaggcgtggcggcgcgcgcctgcaatcgcaggcactcggcaggctgaggcagaagaatcagggagggaggttgcagtgagccgagatggcagcagtacagtccagctttggctcggcatcagagg

SEQ ID NO: 7189 - DNA, 843 bp, Artificial sequence
  DNA replication origin
cgtctctgcccggccgccatcccatctaggaagtgaggagcgtctctgcccggctgcccatcgtctgagatgtggagagcgcctctgctccgccgccccgtctgggatgtgaggagcgcctctgcccggccgcgaccccgtctgggaggtgaggagcatctctgcccagccgccccgtctgagaagtgaggagaccctccgcctggcaactgccccatctgagaagtgaggagccccttggcctggcaaccaccccgtctgggaagtgaggagcgtctccgcccggcagccaccccctccgggagggaggtgggggggtcagccccccgcccagccagccgccccgtccgggagggaggtgggggggtcagccccccgcccggccagccgccccgtccgggaggtgaggggcacctctgcccggccgccaccccgtctgggaggtgtacccagcagctcattgagaacgggccatgatgacaatggcggttttgtggaatagaaaggggggaaaggtggggaaaagattgagaaatcggatggttgccatgtctgtgtagaaagaagtagacatgggaaacttttcattttgttctgtactaagaaaaaatcttcggccttgggatcctgttgatctgtgaccttacccccaaccctgtgctctctgaaacatgtgctgtgtccactcagggttaaatggattaagggcggtgcaagatgtgctttgttaaacagatgcttgaaggcagcatgctcgttaagagtcatcaccactccctaatctcaagtacccagggacacaaacactgcggaaggccgcagggtcctctgcctaggaaaacc

SEQ ID NO: 7190 - DNA, 1346 bp, Artificial sequence
  DNA replication origin
acgcagtgccccgaagcccctgagctgaaaagggccagaaagggggcggcatggcatggcccaaactgcccgcaccttggctgctgctctgcacctggctcccagcaggtgagccttggaaaaatggtacccaccctggacccaaggagacaggaagccattgtggcgtggccttgcagagctggccgcgggcagggcagtggaggcctgggccgcgctctggtggcgcttggcatgggcgccaggaggtgcggggactggatcgagtttctgcctgtgggaacctgttgcttttctcttttgttagtccaggcccttcccaaacaggtgcaactgagaaacctggagcctttgaactttcgttcctgcagtcattaggcagttcttgatctctgaagctgaactgataggggcaaaagcaccgttctttaaaattcctaattactttttcctttcatctgatatggtgacaaccatattggcccagaagtgcatatatttcatttctgggaggttataatgtgtcctcagtatgtaaagcaatgtttggccagaatctgaatctactgtgcaggaccacaacatgtacttctgggctaaccatgttcaatgtcacttttctactttctctgtatccagtcactgccctaactttaccccttgctcatcctgcatcaggtgtccaaccatctaccctctcaggcttcattctcttaccctccacaccaatctcctctctgttttggaaaacatgattttgtgtatctctgtgtgtgtcctggaaatctgacagaagtgtgtatctccacgagtgaaaccaggtaggaaagggtagctgagggacagaatgggcaggctctttcagctcttttccaattaggatgtaggtgtgaccttgcaaagaagaatttataagttcccttggaagctccaccctgttttatttcattttacccctcccctccctttcagaatagctgccctcttacctctaagttgtcagtggaaggtcaacttagagtttgctcacagaccaatttgagtcttgtatttttaggttgggaacagatgcaatatgaaggtgtgttggcagaatgttctttctacaagctccataagacataacgaatttctcaggtataatcaaatcttattcagacaggattctaccataacttaagcgtaatgctgagaataaaagggagagaggcttgcaaaagggtagggaaactagaaaattgatatcccccaaggccctctggcttacaagattttctacaggatatagaccctagaaactgtctgaagttgacaagactagatgttggacacccacgatgcacagg

SEQ ID NO: 7191 - DNA, 1366 bp, Artificial sequence
  DNA replication origin
cctggacggggcggctggccgggcagaggggctcctcacttcccagtaggggcggccgggcagaggcgcccctcacctcccagacggggcggctggccgggcggagggctgacccccccacctccctcccggacggggcggctggccaggcggggggctgacccccacacctccctcctggacggggcggctggccgggtggggggctgacccccccatctccctcccggacggggtggctggccgggctgaggggctcctcacttcccagtaggggcggccgggcagaggcgcccctcacctcctggacggggcggctggccgggcggggggctgaccccccccacctccctcctggacggcacggctggccgggcgggggagctgaccccccacctccctcccggatggggcggctggccgggcggggggctgacccccccccccgacctccctcccggacggggtggctgccgggcggagacgctcctcacttcccagatggggtggctgccgggcggagaggctcctcacttctcagatggggcagctgccgggcggaggggctcctcacttctcagacagggtggttgccaggcagagggtctcctcacttctcagacggggcggccgggcagagacgctcctcacctcccagacggggtctcggccgggcagaggcgctcctcacatcccagatggggcggcggggcagaggcgctccccacatctcagacgatgggcggccgggcagagacgctcctcacttcctagatgtgatggcggctgggaagaggcgctcctcacttcctagatgggatggcggccgggcggagacgctcctcactttccagactgggcagccaggcagaggggctcctcacatcccagacaatgggcggccaggcagagacactcctcacttcccagacggggtggcagccaggcagaggctgcaatctcagcactttgggaggccaaggcaggcggctgggaggtgtaggttgtagtgagccgagatcacgccactgcactccagcctgggcaccattgagcactgagtgaacgagactccgtctgcaatcctggcacctcgggaggccgaggttggtggatcactcgcggttaggggctggagaccggcccggccaacacagcgaaaccccgtctccaccaaaaccagtcaggcgtggcggtgcgtgcctgcaatcgcaggcattcgacagactgaggcaggagaatcaggcagggaggttgcagtgagccgagatggcagcagtacagtccagcttcggttccgcatgagagggagaccgtggggagagggagagggagagggagagggagagggagagggagaaagact

SEQ ID NO: 7192 - DNA, 934 bp, Artificial sequence
  DNA replication origin
gaggtgggggggtcagccctccgcccggccagccgccccgtctgggaggtgaggggcgcctctgcccggccgcccctactgggaagtgaggagcccctctgcccggccagccgccccgtccaggagggaggtgggggggtcagccccccgcccggccagccgccctgtccgggagggaggtgggggggtcagccctccgcccggccagccgccccgtctgaggtgaggggcgcctcagccctccgcccggccagccgccctgtctgggaggtgaggggcgcctctgcccggccgcccctactgggaagtgaggagcccctctgcccggccagccgccccatccgggagggaggtgggggggtcagcccccctgcccggccagccgccccgtccgggaggtgaggggcgcctctgcccggccgcccctactgggaagtgaggagcacctctgcccggccaccaccccgtctgggaggtgtgcccaacagctcattgagaacgggccaggatgacaatggcggctttgtggaatagaaaggcgggaaaggtggggaaaagattgagaaattggatggttgccgtgtctgtgtagaaagaagtagacatgggagacttttcattttgttctgcactaagaaaaattcctctgccttgggatcctgttgatctgtgaccttacccccaaccctgtgctctctgaaacatgtgctgtgtccactcagggttaaatggattaagggtggtgcaagatgtgctttgttaaacagatgcttgaaggcagcatgctcattaagagtcatcaccaatccctaatctcaagtacccagggacacaaacactgcggaaggccgcagggtcctctgcctaggaaaaccagagacctttgttcacttgtttatctgctgaccttccctccactattgtcccatgaccc

SEQ ID NO: 7193 - DNA, 1270 bp, Artificial sequence
  DNA replication origin
ctgcgggctaaggagacggtgaaggaaccgggactaactggggtaggggttagaaggcagcccgcgagtgggctacgaggggagctgggctcggcagttggggaccccgagggggcaagcgggcggggagcaggagaggggcggagctccggggccggggccggggccgcagcggccgcccagagggtctgcgggggctgctgtggccggacccgaaggcgggcgccgggagcgcagcgagccagacgcgcctctccaagaccgtgaccttggcatagggagcggggctgcgcgcagtcctgagatcagaccagagctcatcctcgtggagacccacggccgaggggccggagctgcctctgtgcgagggagccctggccgcggcgcaggtaggaccggggaacccaaggagggcgggaggaaagcgcccctggtgggggaggggccgtggcggggtctgggggccaagggctccgggccgaacgaggggcacacgccggagcagctccagcctgggagcattgggcgtgaacgtgggggaaagtagggaccagattacaggatcaaggctttccccggctcagaactggattgttcagtgcccctagaaggggcagcgggtcgcccacgcgaatgaacgggagcgcgcaccaaaacgcctgctgttggtagtttcttgtgcctctgccttgtttctgcctgtgatatagtcagaaaggactcgcttgccacgtgttaacaaggggacaggtagcttttacagagtgtatgaatatggaggggagggccacagagtcagctctggccccaggggccgtcagtgcccccacaggattcctggtccaagctaccagctgtcttgggaactttgcttcagtggcatcaaattagattgtcagttcccggggcctgagcaccagcctccatgtgtatttcctggggagaaaaaaaaaaggcataccagactgatggagtcttatcattattttaacattatagctttcaatagataacatgcatatgtttctttttttaagtcaaataatacaaacatttatcttctacaggcaatgcgtgcactagcatgtgtgtctattgctgtctcctttctacacccatagcctttcccactctacgtgttctgtcgccgtcttttgattctttatccagaaaatgatgtcaccaccactgcccacatcccttaatctccagtgttcctccttgcaacgcctctcttgtcctcaaatatttttcacaaggtggtcctcag

SEQ ID NO: 7194 - DNA, 881 bp, Artificial sequence
  DNA replication origin
ccatcatctgggatgtgaggagcccctctgcctggctgcccagtctggaaagtgaggagcgtctctgcccggccgccatcccatctaggaagtgaggagcgcctcttcccggccgccatcccatctaggaagtgaggagcgtctctgcccggccgcccatcgtctgagatgtggggagcacctctgccccgctgccccgtctgagaagtgaggagaccctccgcccggcagccaccccgtctgggaagtgaggagcgtctccaccaagccagccgccccgtccgggagggaggtgggggtcagcccccgcctggccagccgccccgtccgggagggaggtggggggtcgcccccgcccggccagccgccctgtctgggaggtgaggagtgcctctgcccggctgcccctactgggaagtgaggagcccctctgcccagccaccaccccgtctgggaggtgtacccaacagctcattgagagcaggccatgatgacaatggcagttttgtggaatagaaaagggggaaaggtggggaaaagattgagaaatcggatggttgctgtgtctgtgtggagagaggtagacatgggagacttttcattttgttctgtactgggaaaggttcttctgccttgggatcctgttgatctatgaccttacccccaaccctgtgctctctgaagcatgtgctgtgtccactcagggttaaatggattaagggcggtacaagatgtgctttgttaaacagatgcttgaaggcaacatgctcgttgggagtcgtcaccactccctaatctcaagtacccagggacacaaacactgcggaaggccgcagggtcctctgcctgggaaaaccagggacctttgttcacttgtttat

SEQ ID NO: 7195 - DNA, 946 bp, Artificial sequence
  DNA replication origin
gagagcacagggttgggggtaaggtcatagatcaacaggatcccaaggcagaagaacctttcccagtacagaacaaaatgaaaagtctcccatgtctacctctctccacacagacacagcaaccatccgatttctcaatcttttccccacctttcccccttttctattccacaaaactgccattgtcatcatggcctgctctcaatgagctgttgggtacacctcccagacggggtggtggctgggcagaggggctcctcacttcccagtaggggcagccgggcagaggcactcctcacctcccagacagggcggctggccgggcgggggcgaccccccacctccctcccggacggggcggctggccaggcgggggctgacccccacctccctcccggacggggcggctggcttggtggagacgctcctcacttcccagacggggtggctgccgggcggagggtctcctcacttctcagacggggcagcggggcagaggtgctccccacatctcagacgatgggcggccgggcagagacgctcctcacttcctagatgggatggcggccgggaagaggcgctcctcacttcctagatgggatggcggccgggcagagacgctcctcactttccagactgggcagccaggcagaggggctcctcacatcccagatgatgggcagccaggcagagacgctcctcacttcccagatggggtggcagccgggcagaggctgcaatctcggcactttgggaggccaaggcaggcggctgggaggtggaggttgtagcgagccgagatcacgccactgcactccagcctgggcaccattgagcactgagtgaaccagactccgtctgcaatcccggcacctcgggaggccaaggctggcagatcactcgcagctaggagctggagaccagcccggccaacacagcgaaaccc

SEQ ID NO: 7196 - DNA, 1140 bp, Artificial sequence
  DNA replication origin
cctatggcaagtttgtctctgccgtagaggtgattgccatcctggcagccagctttggcttgctggcgtgcatcttcttcaacaagatctacatcattctcttcaagccatcccgcaacaccatcgaggaggtgcgttgcagcaccgcagctcacgctttcaaggtggctgcccgggccacgctgcgccgcagcaacgtctcccgcaagcggtccagcagccttggaggctccacgggatccaccccctcctcctccatcagcagcaagagcaacagcgaagacccattcccacagcccgagaggcagaagcagcagcagccgctggccctaacccagcaagagcagcagcagcagcccctgaccctcccacagcagcaacgatctcagcagcagcccagatgcaagcagaaggtcatctttggcagcggcacggtcaccttctcactgagctttgatgagcctcagaagaacgccatggcccacaggaattctacgcaccagaactccctggaggcccagaaaagcagcgatacgctgacccgacacgagccattactcccgctgcagtgcggggaaacggacttagatctgaccgtccaggaaacaggtctgcaaggacctgtgggtggagaccagcggccagaggtggaggaccctgaagagttgtccccagcacttgtagtgtccagttcacagagctttgtcatcagtggtggaggcagcactgttacagaaaacgtagtgaattcataaaatggaaggagaagactgggctagggagaatgcagagaggtttcttggggtcccagggaagaggaatcgccccagactcctttcctctgaggaagaagggataatagacacatcaaatgccccgaatttagtcacaccatcttaaatgacagtgaattgacccatgttccctttaaaattaaaaaaaagaagagccttgtgtttctgtggttgcatttgtcaaagcattgagatctccacggtcagatttgctgttcacccacatctaatgtctcttcctctgttctatcccacccaacagctcagagatgaaactatggctttaaactaccctccagagtgtgcagactgatgggacatcaaatttgccaccactagagctgag

SEQ ID NO: 7197 - DNA, 1284 bp, Artificial sequence
  DNA replication origin
tggtgagcaccgccgaggcgcgggccagctcttcgaggttgtgcgcgggagtggcacggcgggcgggcgagcgaggggctaacttcagcggtggcaccgggatcggttgccttgagcctggtgagtgctggggccttgcggccccggcccctccccctcccgccggcagatccgggcagtcccggagggactcaggagaggccctggggcgagggcgggtgccggcagggcctagagccggggttcctgggccggacgctcgcgccgcgtccgtgcgtcacgggcccggctgtcctaacggccacaaggccggcggaggagagggtgggggtggggagccctggtgtgatcgccatcgggaacgccggtcgaggctaggcggggcggggcggcgtggcgcggcggcggggctgtaagcggcgccggggactgcggggcgccgaggcagcgggcggagaggaggcgagcgcggagcctgcgccgcggccgggcggcgggcgggaggcgggggtgggccgcgcagagcgctgtgacagaggcaggaaggagcaggggtggcgtgtaaaaattctaaccctggcaaaaagggaccgtcttgggaattcacaagttacagaccgggtcggagccggcggcccggagggaggtgggggaagcggggggtggagacggccggctgcagtttaccgatgtcataacaacatgggcctggagcggctgatcgggggtgtggtaattatagcaatgacagaacttggtctgcacgccgcgtgtgcgatgcgagggaagcagcgaggtatcggattaagctcaaaacgggaggaggaaacaaggatgactggagtcaaggaagtcgtcatgaagtaatgttttaggattgggtcgtgttccacttttaaatgaaagcgttcaaaatatttgatttttaaggtttcaactcagaacaaacgattgccgagtttttgtttgtattttaaagagatggggtctcgctatattgcccaggctgtactccaactcctgagctcaaactgtcctcttgcctcagcttcccaagtagctgggactagtcttgggcaaccacacccagctctgcagagtatttttttttctgaaacgtactgtcaagtaatattaacttgaatttcacccttttttcttaaataaacggttgcttaaaaatctctattagtagatgaagtgatttcccccctcctgttttgtttttttttttcttaagagatggagtcttgctttgtttcccgggctgatctggaactcctg

SEQ ID NO: 7198 - DNA, 943 bp, Artificial sequence
  DNA replication origin
ttccaggaaacgaaagcgaaagagtcaaagttagcggcccggagttggcgcggcccctgcagtccggcggagagcggagctgaggatggctgtgcccggctccttcccgctgctggtcgagggctcctggggccccgaccccccgaagaacttgaacaccaagttgcagatgtacttccagagcccgaagaggtcgggaggcggcgagtgtgaggtccgccaggatcccaggagcccatcccgcttcctggtgttcttctacccggaggacggtgaggggcgcgaggggtggggtgaggagggggcacctctgccctccctccagggaaatggcggcagggcacgcacgggagggtgacccgcccgacttcggcggctgctgtagcggaggtggccggggcgggggcgggggcgggggcggcagaatggattccgagcgcacccggggcgctgcggttccccggcgccctgcgcttccaggcgcttaatggcgcggcccggaggtggcggcggaaccgcgcaagtaactctttatccctcgatcgttttctgtctttccctgttgtggtggtgttattgtttgttgttgttgttgtggaagtgagtctatcctcttatcatccttttctgtcttttcctgttgttattattcttgtgtggggaaggaaactgattaagaaacgtggcaagtcacagagattccttgtggttcttggagattcccaggggtcccggggtcacttgggagaggggcagaggcgctacctaaaatcacactgcctgaatgtcaacgtagagccgtcacagcggccacattggaggggctgtcgatcgaccacaggtgcccattgtcgagggcctgccggggcctcttctccgagtctctagtggccctcagattgggagcaaggatgatattctgaagtgattgtgggttgggaga

SEQ ID NO: 7199 - DNA, 1025 bp, Artificial sequence
  DNA replication origin
ccctcgatcgttttctgtctttccctgttgtggtggtgttattgtttgttgttgttgttgtggaagtgagtctatcctcttatcatccttttctgtcttttcctgttgttattattcttgtgtggggaaggaaactgattaagaaacgtggcaagtcacagagattccttgtggttcttggagattcccaggggtcccggggtcacttgggagaggggcagaggcgctacctaaaatcacactgcctgaatgtcaacgtagagccgtcacagcggccacattggaggggctgtcgatcgaccacaggtgcccattgtcgagggcctgccggggcctcttctccgagtctctagtggccctcagattgggagcaaggatgatattctgaagtgattgtgggttgggagatttgagctttggagggaaagtcggcaaagttccctccttacagacccaccactacttggtgggccaagagcccagaggtgatctgctggctcaagggcctccctggtctgcaatgggaagccagtgacctgcagctcccagaatgggcaccttttccactggcatcttatggatgatgacctatcgggatctagtcaacccctaattccgctttcatgtcgctagatttggagaagcattcgggccagaggagaggcaaggaggctgaggctgaggccatgcaattagagtgcccaagcagggatccaaaaaggaaaaatgaaacagaaaaagaatggcgcacagaaggaaggaaggagggggacaggagatatgcttggctcatggcccttatgaaaacaaaataccatgttttcctaggattaattttaccaaggagtgctcagaagggcaactgtgtgatattagtcatttctcttttgggtgtcacttttccttgagggttttccccactttgacttcagaggtcagcatcaccatcgatctggcccttaaggatgcttctttctcctttagattccattatccttagaagtaggtctgacctgcatctgaat

SEQ ID NO: 7200 - DNA, 1536 bp, Artificial sequence
  DNA replication origin
tcttttccccaccgttcccccctttctattccacaaaaccgccattgtcatcatggcccgttctcaatgagctgttgggtacacctcccagacggggtggcggccgggcacaggggctcctcacttcccagtaggggcggctgggcagaggcgcccctcacctcccggacggggcggctggccgggcggggggctgacccccccacctccctccgggacggggcggctggccgggcagaggggctcctcacttcccagtaggggcggctgggcagaggcgcccctcacctcccggacggggcggctggccgggcggggggctgacccccccacctccctcccagatggggcggctggccgggcggggcgctgaccccccacctccctcccggacggggcggctggccgggcagggggctgacccccacctccctccgagacggggcggctggccgggaggggggctgacccccccgacctccctcccagacagggcggctggccgggcggagacgctcctcacttcccagacggtgtggttgccgggcggaggggctcctcatttctcagatggggcggttgccaggcggagggtctcctcacttctcagacggggcggccgggcagagacgctcctcacttcctagatggggtcgcggccgggcagaggcgctccccacatctcagacgatgggcggccgggcagagacgctcctcacttcctagatgggatggcagccgggaagaggcactcctcacttcctagatgggatggcggccgggcagagatgctcctcactttccagactgggcagccgggcagaggggctcctcacatcccagacgataggcggccaggcagagatgctcctcacttcccagatggggtggcggccgggcagaggctgcaatctcggcactttgggaggccaaggcaggcggctgggaggtggaggttgtagcgagccgagatcacgccactgcactccagcctgggcaccattgagcactgagtgaacgagactccgtctgcaatcccagcacctcgggaggccgaggctggcagatcactcgcggttaggagctggagaccagcacggccaacacagtgaaaccccatctccaccaaaaaaatacgaaaaccagccaggcgtggcggcgcgcgcctgcaatcgcaggcactcggcaggccgaggcaggagaatcaggcagggaggttgcagtgagccgagatggcagcagtacagtccagcttcggctcggcatcagagggagaccgtggaaagagagggagagggagaccgtggggagaggggagaggggagaggagagagagaggagagaggagagaggagagagctgagatctaattttatcttttccaaaatggtaataggattgtcaggaccatcatttattttacagtttgttttcccttcatgatttgaaatgtctgtttaatcatatactagatacctgaacatatctgggtctattttgtccattggtctttctgcctatttatttagtgaggtc

SEQ ID NO: 7201 - DNA, 856 bp, Artificial sequence
  DNA replication origin
accgtctgggaagtgaggagcgtctccgcccggccagccgccctgtctgggagggaggtcgggggggtcagcccccctcccggccagccgccccgtctcggagggaggtgggggtcagccccctgcccggccagccgccccgtccgggagggaggtggggggtcagcgccccgcccggccagccgccccatctgggagggaggtgggggggtcagccccccgcccggccagccgccccgtccgggaggtgaggggcgcctctgcccagccgcccctactgggaagtgaggagcccctctgcccggccagccgccccgtcccggagggaggtgggggggtcagccccccgcccggccagccgccccgtccgggaggtgaggggcgcctctgcccagccgcccctactgggaagtgaggagcccctgtgcccggccgccaccccgtctgggaggtgtacccaacagctcattgagaacgggccatgatgacaatggcggttttgtggaatagaaaggggggaacggtggggaaaagattgagaaatcggatggttgccgtgtctgtgtagaaagaagtagacatgggaaacttttcattttgttctgtactaagaaaaattcttcggccttgggatcctgttgatctgtgactttacccccaaccctgtgctctctgaaacatgtgctgtgtccactcagggttaaatggattaagggtggtgcaagatgtgctttgttaaacagacgcttgaaggcagcgtgctcgttgagagtcatcaccactccctaatctcaagtacccagggacacaaacactgcggaaggccgcagggtcctctgcctaggaaaaccagaga

SEQ ID NO: 7202 - DNA, 967 bp, Artificial sequence
  DNA replication origin
tgggggggtcagcccccgcccggccagctgccccgtccgggaggtgaggggcgcctctgcccggccgcccctactgggaagtgaggagcccctctgcccggccagccgccccgtccaggagggaggtggggggtcagccccccgcccggtcagccgccccgtccgggagggaggtgggggggtcagccccccgcccggccagccgccccgtccgggagggaggtgggggggtcagccccccgcccggccagccgccccgtccgggagggaggtgggggggtcagccccccgcccggccagccgccccgtccgggagggaggtgggggggtcagccccccgcccggccagccgccccgtccaggagggaggtgggggggtcagctccccgcccggccagccgccccgtccgggaggtgaggggcgcctctgcccggccgcccctactgggaagtgaggagcccctctgcccggctgccaccccatctgggaggtgtacccagcagctcattgagaacgggccatgatgacaatggcggttttgtggaatggaaaggggggaaaggtggggaaaagattgagaaatcggatggttgccgtgtctgtgtagaaagaagtatacatgggagacttttcattttgttctgtactaagaaaaattcttctgccttggtatcctgttgatctgtgaccttacccccaaccctgtgctctctgaaacatgtgctgtgtccactcagggttaaatggattaagggcggtgcaagatgtgctttgttaaacagatgcttgaaggcagcatgctcgttaagagtcatcaccaatccctaatctcaagtaatcagggacacaaacactgcggaaggccgcagggtcctctgcctaggaaaaccagagacctttgttcacttgtttatctgctgaccttccctccactattgtcctatgaccctgccagatccccctctg

SEQ ID NO: 7203 - DNA, 1581 bp, Artificial sequence
  DNA replication origin
ggccgggcggggggctgacccccccacctccctcccggacggggcggctggccgggcggggggctgacccccccacctccctcccggacggggcggctgaccgggcggggggctgaccccccacctccctcctggacggggcggctggccgggcagaggggctcctcacttcccagtaggggcggccgggcagaggcgcccctcacctcccggacggggcagctggccgggcgggggctgacccccccacctccctcccggacggggcggctggccggacggggggctgaacccccaactcactcccggacggggcggctggccgggcggggggctgacccccccacatccctcccggacagggcggctggccaggcggggggctgacccccccacctccctcccggacggggtggctgccgggcggagaggctcctcacttcccagacggggtggctgccgggcggaggggctcctcacttctcagacggggcggctgccgggcggaggggctcctcacttctcagacggggcggttgccaggcagagggtctcctcacttctcagacggggcggccgggcagagacgctcctcacctcccagacggggtcgcggccgggcagaggcactcctcacatcccagacggggcggcggggcagaggcggtccccacatctcagacgatgggcggccgggcagagacgctcctcacttcctagatgtgatggcagccgggaagaggcgctcctcacttcctagatgggatggcggccgggcagagaagctcctcactttccagactgggcagccgggcagaggggctcctcacatcccagacgatgggcggccaggcagagacgctcctcacttcccagacggggtggcggccgggcagaggctgcaatctcggcactttgggaggccaaggcaggcggctgggaggtggaggttgtagcgagccgagatcacgccactgcactccagcctgggcaccattgagcactgagtgaacgagactccgcctgcaatcccggcacctcgggaggccgaggctggaggatcactcgtggttaggagctggagaccggcccggccaacacagcgaaaccccgtctccaccaaaaaaatacgaaaaccagtcaggcgtggcggcgcgtgcctgcaatcgcaggcactcggcaggctgaggcaggagaatcaggcagggaggttgcagtgagccgagatggcagcagtacagtccagcttcggcttggcaccagaggcagaccgtaggagagggagaccgtggggagacggagagagagagggagagggagaacaggtagtttttttaacccttgctcctctctctccctcccctcttttggagttcccagtgtttactgttcccatctttatgtctgtgtgtacttgatgtttagctcccacttataagtgagaacttgtggtatttggctgtttctgcattaatttaagataatggcttccatctgcatccatgttgctgcaagggaaatgattttgttcttttttatggctgtgtagcattccatggcatatatatatacacaccatat

SEQ ID NO: 7204 - DNA, 2087 bp, Artificial sequence
  DNA replication origin
gctgagggccagaacccctgcactcttcaccctgccctcctaccctgccctctgcttctacaagaaggctcccggccgggcgcggtggctcacgcctgtaatcccagcactttgggaggccgaggcgggcggatcacgaggtcaggagatcgagaccatcccggctaaaaacggtgaaaccccgtctctactaaaaatacaaaaaattagccgggcgtagtggcgggcgcctgtagtcccagctacttgggaggctgaggcaggagaatggcgtgaacccgggaggcagagcttgcaatgagccgagatcccaccactgcactccagcctgggcgacagagtgagactccgtctcaaaaaaaaaaaaaaaaaagaaggctcccaccttgaattccatgggtgtgtacttttcattcttcggggtgcctccgcccttgtagtgcaaatggttgggggtggcaggatggaccagtgtggactcctgggactgacgctggcagtgctggcaagacaggtacactgctagggtcaggagcccagagcccaagaagcaggagatgcccgtggccaccaagtggatgagattgaaccctaggggaagagaggcaggtagtaagatgagggccactgtgaagaggacagactcctgcctgcctccctgggagcagaaacagcaacaggaggctctgaggcatcctggaaagggctctgaggccacagccaaaggaaacagggaggctggggaggctgtcactggggacctctttcacaaggtaccctgtggctcaagtcagaggtggcaaccagagggtctagagtcagatgactcttccttgggtacagactgatgatggcctcctagctggggggggcatggagggaactgcccagaccaccctacacaccatctcaaagcagtggggaccccaacaaagcttggctgtctggagcaggatgtggaaagagtccagactttggagtggggtgccggagggctgggaggaccgcagcatgaggtaggtccggtttcttttacctgcacagtcggtggcctcctccatgctggaggctggcaggatgactgcaggaagaccagtggacagggtgtcaggggcggagacgagaggaggggggccctgcagggtaggcgtaagcctgggaggacctctaggtcaacgctcagacgtaggactaggtaggcgtgggggccttcattcccctccctctctcctcagaccccacctctgagaagggctagcccatccacaggatgaggagggcccaaaccccaaatgtgtgcatggaggcaaatatgggagttttctttcggcatctccttccccccacttccatgtttcatcctgtgccccctgctccccaccaggacacaagcttcagaaggagaaggaagttgggagtgcaggctgggaagggttgctgcgcaggtgctggcaggggtacctaccgggaatctcgctgtaggggcaggggcggctctggctgctgtttccagcacaggcgctggaccctgggaggagctcctcacagtgccggcttcggctctgggctccgtcgtcagtgcacttactccactcagaccagggcgaccagccttctggggattgtgggtaggatgaggttaactgcccagggaccccctggtggggatcagagggctccatgtcgcttcccagccctggcgggatgtgcctcatacctgggcaggcctgtgtggcacatagtgcctcctccgtgtgcagcccgagacagatgtcctcacctggggagggtgcggggctggtgcaggaacgggtgcgttgatagtgacccccaccacaggaagctgagcatggagaccatgaggtccagcaggaccaagcaccccgaactgcaaggggacggggtgtgtgaggggctgtaggggcagccagggcccaagacggtcttccatcccataccagcccagaccactctgccctgagccacagtgacctcaacatccacccgatccacccgccacccaacagtccactgttagggagtgcccccactccatgcggcaggtgagggaaacgcaggaagcagca

SEQ ID NO: 7205 - DNA, 1616 bp, Artificial sequence
  DNA replication origin
cggcagcatcgcccacgcagggcaggcccccgttgcggggctccgggttagtgcacgttctcttgcggacgcggaagcccagctcgcagtcccgggagcaggacgaccacgggccccaggcggcccagcccccgctcaccgtgtgcggggaggtgctcccgctgcgcaggaggacctccaccagggctgcggaggggctaggcctcagcgactgggcgcccggccaccccgaccccggcctgggcctccccggggctcccgcccccgccctcaccgctccggggctgggagagaggaaggagggggcgccgggcgcggggtaccgtcggtgtcgcaggagccggagccgtccgcgggacaggtcctcgtctcggtccttctcctgccgaactgcaggccgtgcgggtctgcaaggggcgcgcggcaggtgaagcggaaccgctgctcctgccgtgccccgccctgcgtcacgttcacgggcagccacggcgtccagggggtgttgcgccgcacttcggggcagccctcggggttgcacgtcttgaactcctgcgggtggcggcagaggcagctttagaaccccacggcctccaggcccgccctcccctcggctccagtaccctacaccgcgcccctggcccacggccccaaccctcaccacgccgcagcccaggcaggagttgccgttctcgcaggcccgacgccgcgactgcatgccccctccacagttgctgctgcacttgctccaggagccccaggaagcccagaagatgggcaccgggcaaggcgtgttctcattacagaacctggggtcgggggagaggcgtcaatccagggagggggacccccttccctgacgagaggtccctgggagtgcaagaccggaaaggacgagagtccccgggatcacgaggagaatccaggccactttctggggggcccggttagtctgggacctcagagcaagcctgttctccctcaccgttcctcccggctcttgcccacgcagatgcggcccccgtggcggggagcagggttgctgcaacttcgctggcggacctggaagccgatgccacaggacgtgctgcacagcgcccacgatgaccacggggtccacgccccattcctggcggggtgggaggggacagagacagatgcccctctgagccctagcttcttagatctagtctgtctctgggccgatgtattttctactgctgtcagaaagggctggacagtgacatagaaatatcttctcctaaacaggtcatctcaggcagactcgctcatccatccgttcatttattcctccttcagacatgtattgagagccttcttctatatatcatgctgtgctcaggactaaggacgtagaggtaggacatggccccatctcacaagggccaaaagggcagactctttagagaagaaggccctagtcccctttccagtctgcagcctccctttcagccttcctggctggtcccaatccttgcactgtaaccaacactctgtcccctgtactatattgcacatgctttgctccagcctcagacactgctcactcatgcctactctgacgccaattttcaaatctgggctctaccatttgctgg

SEQ ID NO: 7206 - DNA, 1095 bp, Artificial sequence
  DNA replication origin
gatttagttgttcaagatcatacggttagtagatgatggagttgagatggagccccaggtgtgtctggttccaccatgtgagtccttccccccacacccgaccatctctccccacatgtctgatataggccaaggttctcttcccacccagatatctggagatctgagggaaatcagtgttcggggcctatttctcttgccttctctcacaccaacagtcttacaaagtgtcctgaacatggtatgtcttagtaagtgtgtggtgtctcgctgatggagacttgtgttggggctgaagggagctggagtgtctgccctgagactccccctccttggctgcctcaccaagaccatccagctcctcttggccccacaggcctctgcccagctccgagcacaccccactggagctgaagaacagccctgtatcatggataccatttgtcttcccaatcttgaggacagatggcacagccaggactctcggttgcaaaggccacagaagctcgcatggctgtggtggtgccagcttctgagtatcatgaaaatgaggccatgcagcctgggagagcctcgggtggtaggagtctgggctacatttccatttggctttggaataggctttggtttcccccttaaacactgatgccacagttgtcaaatctgtgagtccgcttgaagctacggcatgaagaaccaagttcagaagcagtgggaagccagggcaactcctccacgtggcgcctcacctctgccctacctgcagcagccctctctacctcttctaaggaaggaagcaagaggagcaaaaacgtggggctgactcaaagcatcatctccatctgtccccacatctgggcaataagtgctgtggcttcaaagataaagaactctctgtacagaaaggactgagaataaatcaagtgggctagagatggttgactggccctagctatgtgtttgacaacagggataacaacagccacccaccaaaatttgctaagcacacacttcctccaggtactgataagtgctttatggagattatctcaattaaccctcacaaaaaccctgcaagatgttttacgaggagag

SEQ ID NO: 7207 - DNA, 1368 bp, Artificial sequence
  DNA replication origin
gcagccgtggaggctgcggctcgccgtggacagcgccttcaggatggtgcccgactctggaggagagggggagccagaccaaggtggccttgaaggccccggaagcttgcagccccgcgccgtccctcaacccacccccgacctgcagtccaggttggaccgggccggctcaccggtgccaatgtagagtacatggtagagcgtgtctttagcctgcaccaggtccaccacgaggtgtgagaagcgcacgctgtcctgggtgacacagggctcgggtgtcaccggctgcacggcctcgctcatcaggaagaggcgctgcgcgtcctgcaggctgcgctccgtcaggttctcgttgggaccggtctcaggcagggtgccacactgccgcggggagccaggtcacgcgcgccccggccaccagggctgccgccatcccccgccggctccctcctcctggcaacccaggtggccacagcagcggacgctgattctccagcaccccccacccctagcatccctgctgggcgtcctgcaccctttccagggtgggatgcctcttctttgggaactaagaacaggagactggggagatggggaaggaggatcctgccagggttggggaagaggagggaggagagcaaaggggactggactatctaaaaacggatactttgagtgtggacgagtgtccggtgatttttatgctgttgctgcaggctcccctctcctaccttgggccaagcctgctgtccctctcctgtgtccttgccagctcaaagttcttatgatttctaaaccaaagctggaagccttctgagcatctcctacattccaggcatatgaaccttctcacatatctgtgaggtattatctcttacagtattatccctagttccagataaggaaaaggagactgaaggaggttggatgacttttttgtccaaggtcacacagagataggctagatggtaggactgcaaagcttgaggtctttcccagctccatcccaccccctgggtgggaagctgggcgaacacgaaagtcaaccatcagcagcctcctctgccccctggttctttccctttctccatggggatgggggatactcacactacccacggctgggccctgaccacaccctgaccactcctagcactgaccacttccaggaattagtacccatgttgaacacactgcgagaaagctctgcttaacattcccaaattccagccagacagcttgtgtagtgctttcctggtcctctacactgtggagagctgaggtcccacttccctgcctccctggaggtgtgggctcacatttagagatggctcggagcatgcttcctcgcactgcccctcacccact

SEQ ID NO: 7208 - DNA, 1610 bp, Artificial sequence
  DNA replication origin
ctctgcccaccaggctccaggggcagtggctcagggccccgcactcccggctgggagggtggagaggggtgcggcagctggaagcagggacgcgagcggcgatttcccgatttatgtttctcatggtaatttgtctttgtggttggggctgcccattcactttccgctcacgtcctgcgggagatccagcgaggagggagggagcggggggcgctcgggcacagagagggatgcagacgggagaggggatcggggacccgcgcggggcgggagccaagagggaagtggtcgccggaccggcggaggaagaaggcgaggctcgagaaaacccggcccaacggagccgactcctttgcccaccgcaaactttaaacaaggaggaggatcacctgcagcgccgttctggccccctcctccccgcccccgccccccacctcgagcccagtctttgggtagttccgactgcccgccgcgccaggcgggagtgggccgagagtctggatggggagagaggagcgctggattctgcccgcacccctgcgatcctgcccaggctttctgcagaggggcggggtgagagcagcaggagccgggagggcgggctaccctggcatgcactccttcccggccaacggaattgggactgagggtttggaagcttgcctgtgtctagacctcaccacgatcctaccttctctggccctaaccccatctttttccttcagcccctagtgaatccgacctccttccgcttttctcaggcaccccaacccacttcggcctcggggcctctctccacagccctccctgcctgcttgctcctcggcctccccacttcagctcatctttttaagcctgttctcttcttgacaatcagcagtggcctctcaccttttctaagccgggacagatgaccttgaggaaggggcaagaggggaacttgaaccttgtaactggacctcaagattacggaaaaggggggcagatttgaaagcagcttggaaagaaacagccagtacctttcccgaagtctagattttcaacggaggaggaaaggagataaaatataggagagatgggggaacttgccacttggtcactcatggggcggtgagaactgttctgggccttggggcgtgggggtagaccactcggggcagggctgcctctggcttgctgtgttgggaaaggtgtgtgtaggtgagtgtgggtttcagggggagctcttttctccatatcaacacctatcaccaccagtttgggaaggaatggcagatcttccatcccttttctttttccaagcagccagtgccagagccttcctcctccaaagccaacagtagcgaccataatcatcaccgtggacatctaacactgtttaagcacctactatgtgcaatgcaccatgctaaatgctggtagataaaaagaggtacagggccgagcccatgcccagagaggttagtaagttcaccagtttgatcctgagacacttgtctatgtgtttggggagggagaacatggagaggaacatgcagtggctgtacaggcagcaaggtgcctgatgacccaagggtttaggagaggaagggttaaaaaaaactcgatga

SEQ ID NO: 7209 - DNA, 861 bp, Artificial sequence
  DNA replication origin
tcccggcttagaaaaggtgagaggccactgctgattgtcaagaagagaacaggcttaaaaagatgagctgaagtggggaggccgaggagcaagcaggcagggagggctgtggagagaggccccgaggccgaagtgggttggggtgcctgagaaaagcggaaggaggtcggattcactaggggctgaaggaaaaagatggggttagggccagagaaggtaggatcgtggtgaggtctagacacaggcaagcttccaaaccctcagtcccaattccgttggccgggaaggagtgcatgccagggtagcccgccctcccggctcctgctgctctcaccccgcccctctgcagaaagcctgggcaggatcgcaggggtgcgggcagaatccagcgctcctctctccccatccagactctcggcccactcccgcctggcgcggcgggcagtcggaactacccaaagactgggctcgaggtggggggcgggggcggggaggagggggccagaacggcgctgcaggtgatcctcctccttgtttaaagtttgcggtgggcaaaggagtcggctccgttgggccgggttttctcgagcctcgccttcttcctccgccggtccggcgaccacttccctcttggctcccgccccgcgcgggtccccgatcccctctcccgtctgcatccctctctgtgcccgagcgccccccgctccctccctcctcgctggatctcccgcaggacgtgagcggaaagtgaatgggcagccccaaccacaaagacaaattaccatgagaaacataaatcgggaaatcgccgctcgcgtccctgcttccagctgccgcacccctctccaccctcccagccgg

SEQ ID NO: 7210 - DNA, 1838 bp, Artificial sequence
  DNA replication origin
ggagctaaccagatgggctggcggccggtctgggaatggggcggccgcgcaggaacggcctccagctctcagcgctccggtgcagtccccacccgggcccgcgcccgctgcgctcgggctcccagcagccgctggatgcgctgccgacccgcccggctcggcggagctgggctctggcaccaacccccgcgctccaactagctcccgacccggcgctcggagagagcagggaggaggagaccgcgggagcagaaggagggagggggcggtgggggaggagttgcaagcaaagggagagaaggaggggagcgggagcgaaaaagaggagggggctggagcagacctgccgcggcgggcgctgcacccgccagcctcgaggcgcgcggaggagcgcgagggggcgccctgcatcccgcggctgctcggccgactcccgccccgggcctgccgagtgtggtgaccagcccggtgggccgaagccccttccccggccggcattccggcggcaagacctaggactccgagcacttgccgccgtttgccacatcccgccttgccgttctcggtcaccccatctcgaatgtgacatccccgagggccatcggcgcggcctgcccaccccaacactcagggcctgaggaagctcccccaaaccccactccggactcccacattccccagccccgtcagttcggaacgatcttcctgcctgtggatttgaaggggaagggacctcgtgtaaaacgggggagagccgttataacctgcagcggcagagagggaggctaggctgctgggctgggctggaaagccagaactggccggattagggttaaccttgcaaactgtacgataccgagcgaacctctccaagcctcagtttcctcagctgtaaactggggttagtaatacgcaccctacagaattgtgaagaacgagtaggggatacggggagtaaaataacatcaggaacagtgggagggcagccaagagatgagcgatccggggaggtggtggagcgttctcagctgaggacggaaggtttagcgcaatcacaaggagcgaggccgaattgtttacaagtttaagtgatctagtgtttctgatggctagaaggcgggagagaaagattcaaggggcaagcttcaaatcctagctgcccgggctgcaagagggatgggaagggagccctctgctgaacaaaaaatatatttgaaaatgtaaaaaaaggtgacctaagaacgagtgagaaagacaaaggatttgaaaaattaaaaccaggaaagtgtgattctaagagataaccaaagagaactatgaaataaaaatagataagttggaggaaggaaaatatcaaaagactttctagagtatgccaaaaattggataattagaacaaagtctgagtgaagcattttacataataaaattctgggtaaaggaaaacccagataaagcagaagaattgagacactaagagccccagagaagcacctcctgcctgccatcctcctacccctggaccatggcaagaagcagtttgacaggataatgggaaagaaagggtggttctgaatccaagaagggagtttatgagacactgtaaaaagagaaacagtgcaagatctcaaagatagactttctagggcaacagaaatgctgaaactcataatgtgcagaatggagagaaacttgcaaagggaaaacacgctctggacacaaaggcagagatgcagagaagaaaagaaaggaaacgggcatgtgtgggcataccagtctggtagcccagtctggggtaaaaatcaagttggaagaggcagcatgggatattgagtcca

SEQ ID NO: 7211 - DNA, 1168 bp, Artificial sequence
  DNA replication origin
gctctgctcttctcccatcatgtcatgtttgtttctttagtccaacatttatgagtggctgctgggcagtgccttgttttgcaccactgatacagtaagctctttgggggctgagacgcccacctcctgttccttttgtgtccccagggtctggaatagtcctgagcttctcaaggctggataagtgcttgttgggtagaggatggccatggggaggcagggcagggtgcaagggctcagccatccctgtaaccggatgtggtctctctcctgcctgtgaccagggtgcagcatgtgcaagaggatgatgccgcatttccagaaggctgcgactcagctgcgaggccacgccgtaagtgaggcgccattgcctggcagggctgggtcactcttggacttggcggaggaagggtgccaggggtggggtggggacaggttttgaaatggtgaggatgactgaccctgctgcctgggccgttgctgaatcgcagccttgcatggagctcagagacctgttctctgtgaaggttgagaactccaccaagttgctgggaccaggagagtttgacacctgccaaaggccagtgatgaaataggacaccagcaagatgcacatgtggcattgtcagggggccagggaccaaggtcggaacatcgtgggtccagaattttgagggctgggctctgaagtgagctgaggcagctgctatggagcccagtggcaaagaagagggtgtgatgaccttaggggtggaccagaagcataaagggggctcacagaggcaaaggcctgtcccggcttcccaggctctgtggttcctgtggggcgggaagaacggtgggaaccagaggaggaggaggtggggctggatggggagcgaaagacctgggaatgcaggcattctcccagaaggagtgtagggaaggataggcagaatggagacacatgtgtcctagggatgcccacctctacaggaggaggaagaggagccactaaggaaatgggccttcagagaagtaggagcagctgggatggggcggggaggtaggaggggagcctggagtgttgtgggggagaagagagctgggaggggggatggacctcacacagaagggccgagggtcagtcaccaaatgctccctggtacctctgtgttcccccaccctg

SEQ ID NO: 7212 - DNA, 1121 bp, Artificial sequence
  DNA replication origin
cactgcctctgtgtagcagaaaaccaaagacgcctcccagagtggggaaagaggaacaaagactgaggacaggctggacaattgcagttctagagactccgccaagctggcctgagaagggcagtcaccatgaccagaccattcagcgtaaaaggaacaatgaaacagcaggaggaagagctgtgcagaagctggggagacaggatgcaggggcagacatggtgggagaagggatgtgggaggtggagagatgtgaggggaggtaagatgttggggtgaggcagctagaaggggagcaggaacgtgtgggtatgctgcttttcctttagacctctatcaggcatttgactttactatttgacatttctgtagtgtttagatccttcatatataaaaagtatatagtatatgccatatttatatataaaaataggtattattattttcattattaaaaagtcaaaagatgtatcttttttgtccttggaaagtcttccccctgtaacccactgataaagatgtatgtccctggggcaaggtttagggacagaaaaacgcagtaacagaaatgaagaaactctaaggaccaagccctctgccagaggttgagtcactcagtgaccctgccctggatggattgtgtttagaattttgtcagggtagacagtgagcccctcaaggcctggcagggacatgtctccctcccttgtaccctgggccctagacactgcacagcacagagctgatatttgatgggtaggtggaagacaggtgggaaggcaggcgggaaggcaggcaggctggaaggcagaaaggaaggcaggcaggaaggaaggcaggaaggaaggaaggaaggaaggaaggcaggaaggcaggaaggaaggcaggaagaaaggcaggcaggaaggaaggcaggcaggaaggaaggcaggcaggaaggaaggcaggaaggaaggaaggaaggaaggcaggaaggcaggaaggaaggcaggaaggaaggcaggcaggaaggaaggcaggcaggaaggaaggcaggaaggaaggaaggcaggaaggaaggcaggcaggaaggaaggcaggcaggaaggcgggcaggaaggaaggagggcaggaaggaaggc

SEQ ID NO: 7213 - DNA, 824 bp, Artificial sequence
  DNA replication origin
attttcaaaacacttaaagagcgcaatctactggttaacaaggtatgtcacagacagctcctgcaggcagctgcaggccccttgtgtgtggcctatgcccataatagcattaggctggcgaaaataaccaccccccttcctcaaaacctggtttcactattaatttttcctttttaacctctttgttcattgaaagtctaaaggtaactgtcagcctagtgtaaattcctgttaccatcaatttaaaatatctaggcctcagattaatggctttctgttgcatctaattttctcattatccgaaagaaagagtggggccaatgagtaatgggagggagggctgtttcagaaagtgcatgaagatgcttccaagaggtgtcaggagggccagatgtggatgattttttttatttaatgtaggcttaaaaaaaaaaaaaaggcactgcctctgtgtagcagaaaaccaaagacgcctcccagagtggggaaagaggaacaaagactgaggacaggctggacaattgcagttctagagactccgccaagctggcctgagaagggcagtcaccatgaccagaccattcagcgtaaaaggaacaatgaaacagcaggaggaagagctgtgcagaagctggggagacaggatgcaggggcagacatggtgggagaagggatgtgggaggtggagagatgtgaggggaggtaagatgttggggtgaggcagctagaaggggagcaggaacgtgtgggtatgctgcttttcctttagacctctatcaggcatttgactttactatttgacatttctgtagtgtttagatcct

SEQ ID NO: 7214 - DNA, 1235 bp, Artificial sequence
  DNA replication origin
gtggccaggccgggaacagcccctttcacagccgactgcacctgccgcccgccccagtgcccttcaggctgaacgttcttggactctagggctggatgggagagagaagactctttgacccccgcaccttcaccttccctgcacctgcagcctcacccccattctgtgtgcctggcctccagccttctcccagctttactcctgctccatccccaggttggtccgggaggtgacaggggtgaacgtgaacatgcgtgtgggaattcacagcgggcgagtacactgcggtgtccttggtctcaggaagtggcagttcgacgtctggtctaacgatgtcacgctagccaaccacatggaggctggcggcaaggcagggtgagtgacagctgtgggtggcttggggccccgacctgggttcccactcaagcccacccagggtgaccatcctgcagaggcgaggcggggcagggtggggtgggcaggatgggcagcaagcacctgtgggggcgctggggtgagcacagtggaagtagaaattcctctacttgccaaatcacctgtgccaccgttggccagttgtgggagcattatgtcacccttccctgagccttgacccagaagatattgacccaaaccatggtggctggtgaggtgtgatagacagagttctggaggagggaggaatcacagatagtttctgggatggctagaccataaaggaggcaggactgggaggggtgaggaaggtggggtgggaagagcctgctgctaggcggagggaacacagcgaggcaaggcacaggtgtgggggacacagcatttccaaggaatgggagaagagccgatggccttttagggacggctaggagaaacagcgcctgtgttcagaaggcatgagtgccaggctcgtgaatttggactccgtcctgtcgcgtgcaggagccattgctggcttctgagcaggagtgagaggcttgcaaagtttgcaagactggaggccatgttgtcttgggcaagctaatgtagtggtctgtgccaggatgttcagtgtgagacagtgtggttgcagtgggcatgagagcccacttgatagtaatggagggtaccatgcaaggttgaggttaggatttgagcagagcttggggccctagggtttgaattgtggtgaacccactaattgcagtttggtttttcacgggggctgacattatgactttgagttttctgccctctcc

SEQ ID NO: 7215 - DNA, 761 bp, Artificial sequence
  DNA replication origin
cccatatgtgatgtggctggtgaaactagaaaacctgtggaggtgttgagcacaggtagtgtttcagagagatcggggctgtgcaggcgtcagggagggcagagggaggctgtcggtccagggtgtcgcgaccagaatccaagagccaggcgagaactgcatgtgggcagtggaggaaggcacagaacagaaaggacaagtgtgagagctgtttccagatgagcaggacttcgtcagtgctggacaggtcctgcggctgaggggaaaggaatgagtgtcagagggaaagatctgaaaagcaaaagccacttacgtgggcaggatgttggcactggtgcagcagaatggggctgtcccaggcaaaggcagggaaattgaaagaaaagtgattggggaatgacaatgtgggaaagcgagtgtggtttgggtgtgatgtcagggtggtggtggcaagacatccaggtgggcagctggaggctggcaagccatggacgggaggtagggatgtgggaaatggctgatatagccacctctatagtgggaaccttggccatggacttactcccagagtgcaggcgtgaatggggcgaggacagaggtgggacgtgccatgtttggggccaggtggagggagacgaagcagagatgacatagaagcagaagaatctcaggaccatgtgggagggtgactctagcatctggtgcagagtgaagggcaggagaatgaggagggctggaggcagccaaaatgaaaggctggg

SEQ ID NO: 7216 - DNA, 687 bp, Artificial sequence
  DNA replication origin
acatggtctggtgtattttaggaaaagcagttgcttgcttgcagtgggaaggatggaccagaggcagcaagcttggagacaagcaaagtgatctggagggtaccctggtcatccagtctggccctgaaggtggcctgggcggcaacaggctgaggtttgggtggagagggtgcttcagcaaggagaggagcagcagccagtctgggggtggcaggagcgggccaggcaagcatgaggcatagcaagggggtagggggacatgggctttgctttgcagtggaaaataaggaagagtgagttcagcgggtctggaagaacccatatgtgatgtggctggtgaaactagaaaacctgtggaggtgttgagcacaggtagtgtttcagagagatcggggctgtgcaggcgtcagggagggcagagggaggctgtcggtccagggtgtcgcgaccagaatccaagagccaggcgagaactgcatgtgggcagtggaggaaggcacagaacagaaaggacaagtgtgagagctgtttccagatgagcaggacttcgtcagtgctggacaggtcctgcggctgaggggaaaggaatgagtgtcagagggaaagatctgaaaagcaaaagccacttacgtgggcaggatgttggcactggtgcagcagaatggggctgtcccaggcaaaggcagg

SEQ ID NO: 7217 - DNA, 1141 bp, Artificial sequence
  DNA replication origin
ggggtaaactacagagtgcaaagtaggtgacagtaacaacaacaacaaaaaatacaaatctacaaggccgcagagaagctcatctcttacctaggaggacattcatcctgacccggcccagcccagtcatagacaaacatgagatattcaaatcaagggaaatagtaaccccccttaaaaaggcctattgcagatgcaaaaaagaatttcctttcaacacaacattaattaggcaaacatgtactaaacccaatggcaggccaggcactctgctaggactggcaacatcagcaataaataaggcctatcttgggttttgagacacatccagtctaggaggagacagataaaaccaggagagtacaacagctggtcacggtgtgtggtcacacaggagcaccagaaaggaaaggaaagagtccatccctgaatgctggaaggtgacccaggaaggcttcccagagaaggtgatatttgaggtgggttctggaatgcagatgagtagcaaagggggacaagacactggagggacagaaagcattctagagaagcttggcagaagagaacagctgttcaggggtgtagggaagatggggggaagccagtattttgggccagaatggcaaggaagtgatgtgctcagacctgaattttggaaatgtcgcattacagctgtatggaaggtggcccagagctaagtaaaaggctgcgcaatggtccagatgagagatgatgaaggtctaaccagggcaggttgggaggggccgcggaggttggaggaatggaggggacgtttcagagccaaacccatcagcactgtatgaccaactgaaagtgggaggcgaggagagggagttgtcaaggatgacttcagtttctaagcaggcaacagggagaatgacaggaaataagacagagaagagaggcagtggaggagccggtctccgtgaggacagtggggtggatgagtgaggggtacacatgatgggtttaaggtaccccagggagcaataactaacaggcagctggaaatgtgcaggtgcatctccggagaggctgggccagagggacagatatggggagggttaacaaaatcacagagatggacaaaatgagctggaagaaaagagcccaagatgga

SEQ ID NO: 7218 - DNA, 775 bp, Artificial sequence
  DNA replication origin
tatgtcttgagcatctctgtatgtatagcccagggatacagtgatgaggatggtgcaggcttcacccacagggagctcatcatttgtgctgggtggaggggtgggggggtgtctacaacaactgcgcaaataatacaaggtagaataaaatgagcacgggggaagtgcaaggtgagagtcggagtgggaagagcgactcggaggaggaggggagctgagcagcagctggggagagctggatgggggagagcccagggaaggtttcatgaaggaggtcacttttgagaggggccgcgcagcaagagcctcgctggcagggggagcagtggaagcaaaggattggaagctggaatgtgccacgtatgtccgggtacacagagtcttccccggtgacccaagcacagggtcctccctggagcaggcaggagttgaggctggaatgtgacacatcatggttgccctcacatgctggggtgaggagtatctacagaaccgaagtgtaaaaggggatccactgaggtctgcaggcaggagtgcacggtcggttggacagggagcatttacaggattgaggaggctgatgcaagtctggcaacgtgggtatggggcctgaggtgggagtaggaaggaaacggtgaagggagagacatttctgttggaaaagtgacaggatttggcaagcgaggaagaggaggcgtggaagatgagccagagtgatggaatagtgctgccattcaaagagaagtgggtgggcggacggcacttccctggcctg

SEQ ID NO: 7219 - DNA, 1629 bp, Artificial sequence
  DNA replication origin
ttggcaagcagttattaaatccctactaagtattctgcactgtgcttaggtaagggtgagagaatagaggaggaaaaacacatacaccttgggatttgtgcatccatggaggttacactggacagacagcaaaacaagtggacactggaaaatgaataagtgctccactctgtgcctctgactctattgttaatcatacagaagaccacgaggtcagtgtggctggaatggaagaagaaggttccttgcaggggtacagcttggggcagaggacgttagaagtggaagggacataaacattcctctcattctctagaaaaggtagcaaaggcccagagagcttgtgtgtcccctccgtcccagtcacagagcaccctgcaggttcagctagagcccagagccctgaaacccataacagtgctattctctatggaagaatactatgtccaggaagccaggggacacaggagagcaactcaagaaagatgcggtactcaagaggataaaagtctaagagaaggcactagaagaggggagacagaggaaggcaatgacaatggaaaacccttaagaggttctattcgagaaggcagacaccagtgggcagatgtgtgcactggggtccaaggtgaagagacttgcctgtagcaagggcccagtggactctcacagtggagcagcatgcaaacaagcaggttcagaagcaatcatggatgaggaccaggaaaccagaccacaggacactaaagggagatatggtatggatggcaggggggctcctctcaccctgaggtcaggatagccaacatgcccctctcacagaagcctttaagagagtcaccagctaaccaggcaaaagttgtatttcttcctgaacctgcagttctagactcacccaacaaatcccagcagggataaaatgtccctaccacaagcaatgaccaggggcacccacttgaaggggtcatgatgttcaacaacagctttctgctcaggccggaaggggaattgccaccacacacatctcggaggctccttcccactttagcgaagggcaggtttttggcttggggcgctctgctaactgaaacaaacttgtcagtccttctgcaagttcagggatatctccagctaccaaatccccagccttagacaggtggcaggctcatgctacctcctccttaccactgagcaaggggtgcagggtgtcccctcaccaaccctctatccagggctggattaacaaagcagcagtggcactcacgagggggtggctgctagagggtccagccactttcgttaggggccttttgtatataggaacagaagctcaggaagagatgggaaacactccttataattttctcctccaaccttcctcactgcattcccacagtgatggctacagttcagtacacgttatctaaggggcaaggaacactgcaaacgacacaagggcactctttttgtaaatgaagccgctggggctcagagtggggtaagaagctcccaaatagcctacatggccgagccctgtctctctggctcttttcaccattcgaaagggtgagggtgggatccctttctttggagtccagctgaggcctgcccgccccgcaatccagtccc

SEQ ID NO: 7220 - DNA, 714 bp, Artificial sequence
  DNA replication origin
ggcgaggccgattcccgcgcgaatggctacccccatgcccccgggggctctgcccgcggctccaccaagaaacccgggggggcggtgaccccgcagcagcagcagcgcctggccagccgctggcgcagcgacgacgacgacgatcctccgctgagcggtgacgaccccctggccgggggcttcggcttcagcttccgctccaagtccgcctggcaggagcgcggcggcgacgactgcggtcgcggcagccgccggcagcggcggggcgcggccagcgggggcagcacccgggcgccccctgcgggcggcggcggcggctcggcggcggcggctgcctcggcgggcgggacggaggtgcgccctcgctcggtggaggtgggtctggaggagcggcggggcaaggggcgcgcggccgacgagctggaggccggcgccgtcgagggcggcgaggggtccggggatggcggcagctcggcggactcgggctcgggcgcggggcccggcgcggtgctgtccctgggcgcctgctgcctggcgttgctgcagatattccgctccaagaagttcccgtcggacaaactggagcggctgtaccagcgctacttcttccgcctgaaccagagcagcctcaccatgctcatggccgtgctggtgctcgtgtgcctggtcatgttggccttccacgcggcgcggcccccgctccagctgccctac

SEQ ID NO: 7221 - DNA, 1392 bp, Artificial sequence
  DNA replication origin
gagagccctccgcatcccctcctcccgctgcctccccgccccccgcgccgcccgggcctcggctcacagccgcgcgaggccgcctccgcccccggcctggccatggccccagcctcggcgccccgcgggcatcctcaggcctggccgcgggcaccccagttccccttcctcacctaaaattctcgctgcgcccctccctccctgggactaggagccgcatccagcctgcggtcccgtcaccagacctgggtggagcgcggtcttcccccgcccccggccagggctccagcgcccccagtcctagctcccctcttttgtatccccctttaatccccctccccccatttaacccaacttcagccccggcgctgcgccccccttccctggcccggctcgattggccgcttccggagctgtcagactacagtccggcgctcttattgggcgattctctggcccggcggctgtgccaaaggagggcgcaccgggtggggggcgcctgggcagcgagtgcctcaaggagaaggagaacagagtccctggaggggtctcaggggccggagagccagacccggaaatggacaggggagatgcagaaacaggacttctgagacgcaggaagacagtgatggaaaagatggtgatgcagtgggtgaggccgatgcagccggggcggggcggacagggaggctttggtgggtagttaccaggagaaagccccacagtgaacactggaaacacctggcttttataaagcgctctttgcctgttcgtaaagtctcataaatctcacttggttcccgtcagtaatcctaggatgagacagaggacagagaccgtgtagctattcccagcttatagatgcagaaactgaggctctgggagcttattcaacttgctataggtcacacaggtctactaacttggcacccaaaggtccttcgtcagcgccagactgcctccctaacctaacaaggtgttagcaggaaggatgggcacctgagcaagctggcgtgcccacttggggggaagcaggggaaggggaaaatggctagatacacagcaccagccacaagaggcaggaatggagagaaggattcgactgctaggcaaaaaggacgtaggcctgtagaatgatgtgtctacccaattccctttgcccccaagctgtcctgctggagttctgacagtctaaaccctggagaggtgggagaccacactcctacccagcctgggggtaaacagcttttactttccccttcttcatcctccaactctctccccagagcttctgacagggagcctagaggtctaagtgagcttccttctttgtctctctctgctggtcatctctgcagactggaagataaaccttgccagagttacaaattg

SEQ ID NO: 7222 - DNA, 996 bp, Artificial sequence
  DNA replication origin
agtggcggcgactgcagcagcgaaggggaatgggggcggcggtggcagggccggggccggggacgccagcggcacgcggaagaagaagggcccggggcccctggccacggcgtacctggtcatctacaatgtggtgatgacagccgggtgaggctggggctcggggaggcggggagccagcgcggccggggagggagccctgcggccagcggcggggcggataggatcggcgcggcccgccgcaggcagtgcattcccggcggggggtgcccgggacccggtacctgggcgctgagggcggccgagcgctgaatcggccccggtggctgcccgcgagctccctcctgcgctgggggtcgagccaagttcccaggcactggggcgcggggacggctgccgggcgctggctcgcgagggccgcgggaggaaaggtggggctggccacaggtgcggggccgggggcagcggccggactacctgcggcgcggagcccgtcctgggcggccagattcggatgttgaacggcgccagcatggggagtggaggagctgtggctgcagagtgaccattcatttgggcggctgttttcaaaatctgggctgcgctttaatctgaaaggtattgggaaagcgttcaaagtttttggccagcgacatgagcagagctaggctttagatgagtttagacttttaggatgggttggggtggggaagaaactggggagtagaaggcagagttactggaaagggggagaatggaccctcgaaacggttttacccatcttctgtctctttcatttcagtgcatcccttatcccggcgggtttttagttcaagctctgccactaactagctgtgtgactttggataaatcatcttatttctctagcctccgttttttcatttgtaaaactaaagggttggtctgggtgatgaaggttccttcagctctgcaattctttatcttgtcattttggtgaggaggatcacagcatca

SEQ ID NO: 7223 - DNA, 899 bp, Artificial sequence
  DNA replication origin
agggaggtagcgagtgagcgagtgagcgagggagggaggaggtagggagacagggagggtgggagggaggaggaaaaataaagaggagagagcggagcagggctgaacaatagagacaggcagacgggcgagcaggagagccagctgccgctgctgggggacagcgggcgcccaggcagcccgcaccccggccccgggccccggccccagccagacagcaggcggccagcgccctggggaaggggtaccatgggggagctggcggcaggcacccccagcccgccgcgcgcctccgcctgagggaggctcagcgtcctctgccccagccccgccgcccaacgcccgccctcgaagctccgcggccgccagctctgcggccgcagcagctgcgccccgcgccctccgcccaccgggcgccgagcagccctcggccccaggcttcttcggctcccggctgcccgcggacgccctcccacagtcatgaacccccctgagggagcagcggaggaaggaggagcagcagactcggacgtggacgcctttttccggacaggtaagccgggcagggcgcggggggccagggctgaaggctactgcctcggacgcggcgtctcggacaagtttggggaaggagggctgttgctgccgcgtgcgtgttggggggcagtgccccctcggcgtcggggctggagttgccgagattctggttgttatggcagtgctggctgcgtctggggagggcgtgggggctgggaactccgcgcccctccgccttcaccccagttgcgggagtctgtgttggggaggtgggaggcggtcccctcggaccgccttctcccagagcgcggggatgggcggtgttggctcactttgcagcgcgccgctccggctaccggcgt

SEQ ID NO: 7224 - DNA, 1809 bp, Artificial sequence
  DNA replication origin
ggggccagggctgaaggctactgcctcggacgcggcgtctcggacaagtttggggaaggagggctgttgctgccgcgtgcgtgttggggggcagtgccccctcggcgtcggggctggagttgccgagattctggttgttatggcagtgctggctgcgtctggggagggcgtgggggctgggaactccgcgcccctccgccttcaccccagttgcgggagtctgtgttggggaggtgggaggcggtcccctcggaccgccttctcccagagcgcggggatgggcggtgttggctcactttgcagcgcgccgctccggctaccggcgtcccggcccctcccttggctccccctcccctgtgcctgtcagcggggctcccggcggccgccctgggtcggcacccctcctcgccgtcgggggcccggggccctgatgtgcacagaggggcggcggggacccggagccgcgccggctgcagactgacaggagtggggcggaagacatcggtctcgcctggtgcgtgtggggagctggtccctctgacttgagaggcagacccagctgggagggcggtgggcgcctcggacctcccccttgtcctcctcttcagttctgggaacggaggagctattcataagaattactcattcctggaagtgtgagttagcgtccctctcatacacacccactaagtctctgcttgctgtgaggtgtagagccctgagatgtctttctagctctttgcgcccctgccatcgtccaagtcccgggtccattgctcctcctgctccctggctacacagtccctccctagaaccggcactgaccacccttatcttccaccacctgtggccctgtttctctgatggccagggattccccgtctccctgtacctgtggcttccaccagcttctgtgtgtagctccccatctccccacatgtctgaaacagttttgtctggaatctttgtcccaaggagtccagtaagttaccggggccccatgcatctgctctcccttctggaaagttggattagaggacatgaactggtgggggtcaggggtcaggttagctctggagggtctctgcacatccatctgtttcctaaccctgttaccttgccctggaggtcatctctagggaagggggtggggtgctttgcgggggagacttgtggctttggaagtcaagacttgattggctcatatgttcattctctagttgatgtgcagaggaaaaaactggaggacaggagctggtgccagggtctggggaaatcagagggagccctgtcattctattctgcttcccaggtctaagccttctttccttttctttcttcctccttccttccctccttcctcttccgagacatggattctattttctttcttctctctctctctctcatacacacacagcccagcacccaaaagcatggattctaaagaggtggaatctagggaaaaggtggttctgggggctaagtgatattcagaaatactcattatgaggcagaggaggggagatatgggaattcataactgggactagaaacaaattgaccagtcaatcaaaaacccagctgaccccccttgcctcccaactggggcaaaagtctgcattttcttagctctgagggaaaaatcttgaagtgtgagccttcccaccttccctttctggactccacttttaccttttggtgcccactcctctttcccctttcctatcatccaaacactaggtcctgttcattttctgttccaggcacccgtagcagagctcagttcctggaggcttgcttatttct

SEQ ID NO: 7225 - DNA, 1073 bp, Artificial sequence
  DNA replication origin
tcagaaagataaatctggcagccctgtggagggtccattggagtaggggagggactgttggttggggatgggttagaagatcactgtgataggctaggagagtctgaacttgagaagcagcagcagaaatggagaggaggggatggatatgagttactttgggaggtggagtctatagggcctggcatcttggatgttgatgtgtcaagaaagagataggaacccaagattactccaaagtttagagtttgagtgactgagagaacagacatacccttaatgaaagtcaggaactgctaagaggaggagcagctgtggggaggcaggggaagaggggggatttggagaatttgctttgggacatgttgcatttcaggtgtcagtgaaatagctaagggacgtgtggattcagtaggtggataatgaagggagtctggagctttggaaggaggccagatctggaaatatagatttgggagctatctgaaagaagttgtggctggagctatcaaaatagatgatataataaatgaaaagcatacacagaattaagggcagagtgccaaagacagaattgtatatacaggggtatctacagttgggctgtaggagaacagatgcagaagggctggaggagaaccaggagagagcaatacttgggaaacacaggtgatcaacagggtttaatgctgcagagaagttgagggagatgggaactgagcaaataccattggttctggagactaggaatcattggtaatctttgaaataacagtttcaattgtgtatgggaggtggaattcaaattccaaggggaatgaggagtgagcgcatggggaggaagtggtgggagtgcatatagatggctctttggaaaggtttgactgtgaagggaagattaaaaatagcaaggtagttggagatggggagcagagttgaggggaggttttttttaggagggaagatatgtgaatacctagggatagggtagagggagaaggcaggcatgaggaagagacttaatatttagaaaagacagaagtaatagattgaggaaggtcctggatgagcct

SEQ ID NO: 7226 - DNA, 976 bp, Artificial sequence
  DNA replication origin
ccgggagggaggtgggggggtcagacccccacccggccagccgccccgtccgggaggtgaggggcgcctctgcccggccgcccctactgggaagtgaggagcccctcagcccggccagccaccccatccgggagggaggtgggggggtcagccccccgcccggccagccgccccgtccgggagggaggtgggggcggtcagccccccaacccggccagccgccccgtccgggaggtgaggggcgcctctgcctggccacccctactgggaagtgaggagcccctctgcccggccagccaccccatccgggagggaggtgggggggtcagccccccgcccggccagccgccccgtccgggagggaggtgggggggtcagacccccgcccagccagccaccccgtccgggaggtgaggggcgcctctgcccggcggcccttactgggaagtgaagagcccctctgcccggccaccaccccgtctgggaggtgtgcccaacagctcattgagaacgggccaggatgacaatggcggttttgtggaatagaaaggggggaaaggtggggaaaagattgagaaatcggatggttgccgtgtctgtgtagaaagaagtagacatgggagacttttcattttgttctgcactaagaaaaattcttctgccttgggatcctgttgatctgtgaccttacccccaaccctgtgctctctgaaacatgtgctgtgtccactcagggttaaatggattaagggtggtgcaagatgtgctttgttaaacagatgcttgaaagcagcatgctcgttaagagtcatcaccaatccctaatctcaagtaatcagggacacaaacactgcggaaggccgcagggtcctctgcctaggaaaaccagagacctttgttcacttgtttatctgctgaccttccctccactattgtcccatgaccctggcaaatccccctctgtgagaaacaccca

SEQ ID NO: 7227 - DNA, 1257 bp, Artificial sequence
  DNA replication origin
ctggccgggcggggggctgacccccccacctccctcccggacggggcggctggccgggcagaggggctcctcacttcccagtaggggcggccgggcagaggcgcccctcacctcccggacggggcggctggccgggcggagggctgacccccccacctccctcccggacggggcggctggccaggcggggggctgacccccccacctccctcccggacggggcagctggccaggcggggggctgaccccccccacctccctcccggacagcacggctggccgggcggggggctgaccccccacacctccctcccggacagcacggctggccaggcggggggctgacccccccacctccctcccggacggggcggctgccgggcggagacgctcctcacttcccagatggggtggctgccgggcggaggggctcctcatttctcagacggggcggccgggcagagacgctcctcacctcccagacggggtcgcggccgggcagaggcgctcctcacatcccagatggggcggcggggcagaggcgctccgcacatctcagacgatgggcggccgggcagagacgctcctcacttcctagatgtgatggtggctgggaagaggcactcctcacttcctagatgggatggcggccgggcggagacgctcctcactttccagactgggcagccaggcagaggggctcctcacatcccagacgatgggcggccaggcagagacactcctcacttcccagacggggtggcggccgggcagaggctgcaatctcggcactttgggaagccaaggcaggcggctgggaggtgtaggttgtagtgagccgagatcacgccactgcactccagcctgggcaccattgagcactgagtgaacgagactccgtctgcaatcccggcacctcgggaggccgaggctggcggatcactcgcggttaggggctggagaccggccggccaacacagcgaaaccccatctccaccaaaaccagtcaggcgtggtggcgcgtgcctgcaatcgcaggcactcggcaggctgaggcaggagaatcaggcagggaggttgcagtgagccgagatggcagcagtacagtccagcttcggctccgcatgagagggagaccgtggaaagagagggagaccgtggggagagggagagggagagggagaggacactcttttgtcctttgccttacaccaatctattttattgtatttctccaagcattcgtgtcttcaggct

SEQ ID NO: 7228 - DNA, 1207 bp, Artificial sequence
  DNA replication origin
agtcttggagcatctaagtctgcccctctcttacctctttggccccatctagttgtattttttaagccaacgcccattgtggtggcctttgaagggaggaagttgcacataaggagtacctacctgtttggtgccaagggctcaaactccacccgtttgccccgtgcccacagcgttggtgccacaggcagcgttacatgaggctccggccgctgctggccaggtctcctgcccacagctggaccttggaactccgccccttaggccctccctccccgcctggcccctccccgcttcccaaggtggcagtggctcccagtaagtcagagctgcggccgcggtgcggggagagcacagcggggagggcgggagccggctctcgggcggcggcgctgaagtttccttcccgccgcgctctcaccccgggctggcgccccgtgccatgcgggagcgctggggcggcggggcaacatgaagggcggcgacagggcttacacccgaggtccctctttggggtggctctttgctaagtgctgctgttgcttcccgtgtagaggtgagtggctgtcggcggccttggtgccttctgttagccagactggtcgcgctcagcgcgagggagggtggtagggagggaagggttggggaggcctctggggtaggcggatggggctggggatcaggagggcggcgaagtgagagagtttgctgcgatccgtttcacagtttcccagacagaacgcgcgcgctcgctggctggcggtgaggttctgacttggatgcggagctgctgtttgggaactcagtcacctagcagcgactttggatgtcagggcgccagcctgctagggagtgggatgcggacgcgggggtgggaaggggacgcagagccgcgtgtgtccctatagtggcggagaagtacctcacctctcatttacacatggatctcagctgcgggattaacgtgtgactcctggctacaggaatgtgtttgacacctgtctgtacaccaggaactatttttgccaagtgacaattttctcgtgggactggagcacatttttttctgcctgggttttcacaggccagcgtggatttgtagctccgggccggagcttggctcattaattaacaactctctctgtgcccagttaggactgtatttaattattctgctaatcttaacgtcgtggaagagacttgcagg

SEQ ID NO: 7229 - DNA, 1028 bp, Artificial sequence
  DNA replication origin
gaaaagaaatgagaagaaaagaaatgaaaagaaaagaaaagaaagaaaaggaaagaaaggaaggaaggaaggaaaggaagggaaggaagggaaggaagggaagggagggaagggaaggaagggaaggaagggaaggaggggaaaggaggaggaagggagggagggaaggaaggagggagtgaaggagggagggagggaaggaaggaaggaaggagggaaggagggaaggaaagaagaagggagggagggaaggaaggagggagggagggaaggaaggaggggggagggagggaatgaaggagggagggagggaaggaaggaaggagggaaggagggaaggaaagaagaagggagggagggaaggaaggagggagggagggaaggaaggagggggggagggagggaatgaaggagggagggagggaaggaaggaagggagggagggagggagggaggatggaaggaaaggtgaatggatgcttttgccaatagacagctgtctccggtggctacaactggctggtctcatgggcacaaatctcaggctttctgagccttgaccctgctggaactttcttggatattgcttgagttttgtgcataacttggaaaacagcagcagaatatttgtatttggaagcataaaaattgagcttctaaaattctctggtatgaaggataactcacagcgttgctatactcagggaatattaggagctcgactaacttggttggcatctctttaaggaaaaagctgtaatcttatctcagaaaattccttgctggctgtggtcttgggtgtgttgacattgtttctgaagtgtttggtatgggtcaaactactgttctcagaaggctgggtgataaacatcttcagaacactggtaatagaagcagggcctctctgctatctttctgctgataagtttgcagaagcttttcattcactagacccctgtgatgccatgtggctctactgaatccaagccttcaagacttattatcagcacatgtcgtgtcagcagaac

SEQ ID NO: 7230 - DNA, 954 bp, Artificial sequence
  DNA replication origin
ggtcagccccccgcccggccagccgccccgtctgggagggaggtggggggggtcagccccccgcccggccagccgccccatccgggaggtgaggggcgcctctgcccggccgcccctactgggaagtgaggagcccctctgcccggccagctgccccgtctgggagggaggtggggggggtcagccccccgcctggccagctgccccatccgggagggaggtgggggggtcagccccccgccgggccagccgccccatccgggaggtgaggggcgcctctgcctggccgcccctactgggaagtgaggagcccctctgcccggccagccgccccgtccggccagccgccctgtccgggaggtgggggggggtcagccccccgcctggccagccgccccgtcccggagggagggggggtcagccccccgcccggccaaccaccccatccgggaggtgaggggcgcctctacccggccgcccctactgggaagtgaggagcccctctgcccggccaccaccccgtctgggaggtgtatccaacagctcattgagaacgggccatgatgacaatggcaattttgtggaatagaaaggggggaaacgtggggaaaagattgagaaatcggatggttgccgtgtctgtgtagaaagaggtagacatgggagacttttcattttgttctgtactaagaaaaattcttctgccttgggatcctgttgatctgtgaccttacccccaaccctgtgctctctgaaacatgtgctgtgtccactcagggttaaatggattaagggcggtgcaagatgtgctttgttaaacagacgcttgaaggcagcatgctcgttaagagtcatcaccactccctaatctcaagtacccagggacacaaacactgcggaaggccgcagggtcctctgcctaggaaaaccagagacctttgttcacttgtttat

SEQ ID NO: 7231 - DNA, 1121 bp, Artificial sequence
  DNA replication origin
ggcggggggctgacccccccacctccctcccggatggggcagctggccaggcggggggctgaccccccccacctccctcccagacggggcagctggccgggcagaggggctcctcacttcccagtaggggcggccgggcagaggcgcccctcacctcccggatggggcggctggccgggcggggggctgaccccccccacctccctcccagacggggcggctggccgggcggggggctgacccccccacctccctcccggacggggcggctggccgggcagaggggctcctcacttcccagtaggggcggctgggcagaggcgcccctcacctcccggatggggcggctggccgggcggggggctgacccccccacctccctcccggatggggtggctgccgggcggagacgctcctcacttcccagacggggtggctgccgggcggaggggctcctcacttctcagacggggcggctgctgggcggaggggctcctcacttctcagacagggcggttgccaggcagagggtctcctcacttagacggggcggccgggcagagacgctcctcacttcctagatgggatggcggctgggaagaggcgctcctcacttcctagatggggtggcggctgggcagagacgctcctcactttccagactgggcagccaggcagaggggctcctcacatcccagacgatgggcggccaggcagagacgctcctcacttcccagacggggtggcggcggggcagaggctgcactctcggcactttgggaggccaaggcaggctgctgggaggtggatgttgtagcgagccgagatcacgccactgcactccagcctgggcaccattgagcactgagtgaaggagactccgtctgcaatcccagcacctcgggaggccgaggctggcggatcactcacggttaggagctggagaccagcccggccaacacagcgaaaccccgtctccacccaaaaaatacgaaaaccagtcaggcgtggcggtgcgcgcctgcaattgcaggcactaggcaggctgaggcaggagaatcaggcagggaggttgcaatgagccgagatggcagcagtacagtccagcttcggctcggcat

SEQ ID NO: 7232 - DNA, 1470 bp, Artificial sequence
  DNA replication origin
cgcgctccggccccagccccggccgccggcccccgcggagtgcagcgaccgcgccgccgctgagggaggcgccccaccatgccgcgggccccggcgccgctgtacgcctgcctcctggggctctgcgcgctcctgccccggctcgcaggtaagccgcgccgcccacggcgcccagagaaactttgtcgcacactcagccgcgggcgggcgtctcggaggggcggggagcgcaggcggtgcctgagggcggagggcgccttcggggcactccctggtgggccagtcgctgggggacagccccgcggggcgctccccgcgcgcagccccgccgggctgtcgtgagtctcctgttccctcccgggctgaggaggagcttcccttcctgtgtaaacaggctggccggcctgctgacctagcccgccagggcccgcgcccagggcacggggaggaccgccgccagccctgccttggggcccgggctctccgttggcgggcacaaagcggtccttgtggccggccgggagcgggcgggctgctggggggatgccgtcggtgccctgttcccggagaagcaagggagtctcgaaaccccagccaaagcccggggccacctccactccggagggctcgcctcctggaacagcgggtgcacagggcccacagcgaatcctggagttcgctgcgcctaggctagccgcctgcctttgaagatgcagcccccaccctccccgccccccgcctgcttcctcctcgcctaggccaccgcaaacccgagggggcacccgcgtcccaaaccacagccccacctgggacttccctattaaattccttctgcccgactttatcccgcgatttgcacacgctcggagcctcacactcccctaactgtggaggattctggagcagaggacaggggctgtggagattgccttagcccgacgctgcggtgggctggcagcgttgcaaggatccctcggttacctgctctaacttttcagagttgggagatgattggacgtggtagtttggaggccctcgaggaaggatgcacttgtttgggatgcggattttctcctttcttttaggaaataatagtgctctattaactttcaagccggagatacttgattgctcttgtgagccaagtggttgcctggctgcccgaagggaggactgttcccccacggtgtctcatttacatgaaggcagtggaggtttaggtttaagagcggaggaggggtctgagcaaacaataacttcgttcagaccctaattcaaacttaatactgtagcaaggtttttggtttttgttttaaatgggaaaataatcactccagagcttggagagtagatgagtggattccaaacacccatccggcagccagtgcccatcacggatattttcatgggtccctagggaaagcgaggagcaggaagatgtagcctgcatcacacaggaatgtattgttg

SEQ ID NO: 7233 - DNA, 1832 bp, Artificial sequence
  DNA replication origin
cgccaccatccgtcccgcagcactcacggccgagtcccgggaccgcggctgccctggctggccggccgggactcctagtgtgtcgccgctcgggacggccccagcgggctgctccgggtaggggaggggctggctccgctcggcggccgcgacttgggctccgagacgcgcccagcgccgagactcccccgcgcgccggcacactctgcccctggcctccgccccttcccttcctccctccggcccgccaggctccactttcctcctctcctttctcctccccttctctcccctgccaggccctcgcccggccgccacacggtcagcttacggtgaggcggggcggggcgagctccgggccgggccagctccgccctgtgcggggaccggcccgggacgcggaggccctacgggcccaggtggaagtcgcttgcgactcacttggggcgtggggggctcgaaaccactgagtagagcccgctcccgttgcttagccgcccgtcgccacgggaaaggggcggggcacgctgtattaggcgagccgagattacttgggccaaaggcggttgctagactgcgagagggagagcaggtacgggggtcgtgccggtaccgcctcatcctcccaaagcctcactgccggcggcctgagatgggacgtagacgcccgcgcgtggaaccgcaaagcgacttctggatgagcaagggagggcgtggtggggcgtggaggcacaagtaaaacctacatttctttttcttttcttttttttttttttttgagacagcgtcttgctctcactcaggctggagtgcactggcccagtcttggctcactgcagcctggacctcctgggctcaaaggttcctccaccttagcctcctgagtaactgggactacaggcgcgcgccaccacacccggacaatttttacatgttttgtagagatgggggtctcgctgtgttgctcaggttagtcttgaactcctgggctcaagcattcctcctgtgtctgcctcctaaagtgctgagattacaggtgcgagccaccgtgcccggcccacttttcactttttaacttttgcacctttcaaggatttgagactggccaatatgccgctatatttcgttgtccttactgataatctgtcagtttccatgatcaaactgatagactcaaaaacatatgctcaggctttcatcttatcatttacatataagctggatctgaactagccaataaagagtggggtggggtcttcctcagatggtgcaggaaaggatgccttgggcttggattcgctacaagtgcgtttagagtggagtggttgataggcaagagaagaggcgacattcaggtaggggaaaataacgatagaatacctaccaagtacagagagcacactgccagccaggcactgttctaagtcctttacccatattaactcatttcatcctccgacaaccctactgttatccagttgaggaaccgagggacagaggggttaactgctggaggaagtgacagctaggatgcctcgttcaaaagtgcagcatggcttggctaaaactgaagcagtaagggggaaagaacaaaggggtctcacctttgcaggccagggacctggtggaagaatggcttggagggcccagtggaaaactgtcctaactgcccagctcaaggagtttggatgttaacctttatttcttggcctcctcccaaactctaacaaggtggtgcctcaatgcctgaggaagtaaacttcttgaagtacaatatagtgtgcctgggggcaaagatgcagcagtccatagcaagctcctttatagtattt

SEQ ID NO: 7234 - DNA, 1129 bp, Artificial sequence
  DNA replication origin
ggctcgcgctccgggcggcgctccagctgcagctccagccccgctcccgcgaggggcgccaggctcagcgcgcggcgagccggggaaggcggcgggtcccgcgtcccgggggccgccggcggcagcagcagcagcggcagcaacagcagcaggagcggcggcggccaccgcgaggcgcgcggcgaggccatggtgacggcgcccgcccgcgctcacatgcccggcgcgcggggcgagggcagcgggcagcgggcagcgggcggcgggggccgcgcggggccggggaagtgagcggagtgaggctgcgagcgcgctccccgcctcaaaagttatcgggagccgcgggagggctgccgggggccgggctggctgggcggaggcggcccgcggcgccgctacatgctaattagcccgggcgggtcgctggctggcgggcggctcctcctcagttgacatcaccggccccgcgcggcgggcccggaggcggggagagggcaggaagggggctggggccgggcgcctggagagcggcccggcccgggacagcgggatgaggtcagcggagccacggtgctgcaacttttgtcacacacatgctccagagtcttctgaatcgggcaccacctacccaactccttaaacgcacaagaagtaggtgaaaagcaggtcctgggtaatgtgattagcaccagactagattatcccaagtgctttgataggagagagaaagggaacggtcccctggtacccagcccgcgctgtcaccgccgttattgatttgaagtgtccccactcccacccccacctccccttcttcaggccccagggctggtgatgagctcgtgtttgccaaacctaacacctcaccctccggccaacgcgagaatccgagtatcccccacgccctctcaagcttggatgccgttcccatccgaccactgcctttggctcacaccagagttctgcagagatgtcaccgcgaggacacccaaacaggctgcagggaaaagaaaactgtgaattcaggcaggctagggcaaactcatcatcaggaaaagaactgcagatcgcaaattaaaccaaatgatgcccagagaacacagaattttaaatggaaacctatggggaa

SEQ ID NO: 7235 - DNA, 1077 bp, Artificial sequence
  DNA replication origin
accctcctagctccgtccggagcccttcctccgcgctggctattctcggttgcgccagcctctcccattgtccattcgcaggaaagggctgtctggctggtcgtcggtcgctggtccaggggtgggggacccagaagagagcgccgccggaagcccccgccgcggcagcagcccgcagcccgcagcccgcagcccgcagcctgcagccccagcatcatttttagaaatctcgctttctaagttagtcaacagtgcaacccgacgcccacagggaggggtatgacttcccgactccctcttctaatttcagcagcccccagcggcgtagggggaggggatgtcgggggcaccgcaggtgccacccagagcccctagcagccgcctacccagggcaagggtcccatgcccggctgctgggcaccccaagcagccctgctggagcagttctcagtcccactagtgacccccgctgcctgcctttggctaaggggaggagggtaggctcccacgagcaccccttgggagcagatggtgggccctgaagagccacagcccactggccgcatcacaagaagcctgaattacccgaattccgggtggaaagatcaagcctttctgcagacagagcttcaaggactttccctctgcctgttcctgcctgggtcttgttgtcatttgttctctgtcttacccgcaccccaccccacccccctttttgtttttgttcttcctaaaagcatacagctcaaactggaccaaagtatttttattccgtggatagagaaacagatgttcaggtcaaacccagatccattcacacgcagcagctgcaggccccatgcatcccaggccttcgagagttgaaagatgtcagatgacaggaccccagaccacaagactcagtttcaccagcagaggaattgaaagcccaacagagaggcaaagagactcttctgaggtcaaaaaacaagtgttggaaatccctggggaggctagacgtggtggctcacgcctgtaatcccagtgctttgggaggccaaggtgggagggttgctcgaggctgggagtttgaggttg

SEQ ID NO: 7236 - DNA, 1907 bp, Artificial sequence
  DNA replication origin
tcatacccctccctgtgggcgtcgggttgcactgttgactaacttagaaagcgagatttctaaaaatgatgctggggctgcaggctgcgggctgcgggctgcgggctgcgggctgctgccgcggcgggggcttccggcggcgctctcttctgggtcccccacccctggaccagcgaccgacgaccagccagacagccctttcctgcgaatggacaatgggagaggctggcgcaaccgagaatagccagcgcggaggaagggctccggacggagctaggagggtggggctcggagggcgcaggaagagcggctctgcgaggaaagggaaaggagaggccgcttctgggaagggacccgcacgacgacgcccgaagggcgtcgggggaagtggtaggccccggagactgcgcgaggctcctcagcaaaggaagtgggcgcggcgcgcacgcaagacctcgcacccggcctcgcgcgccgcctctggacagcccagcgcctctcagcacctgtacctcgccagacgcggcctcacggagacggggatctgcagccaatccgaaactgcctgacccagggggtccgcggaaaggggaggaaggggagtgtccacgggccccatcctgccacttgtcacccacaagagttccttcccaagcagccccatcctcgcccggacactcactcagatactgcccagccccagatgggctaagaggcacagagatgggcaattaaacacagcaggcctggcctccctgggctggggatggggtttttcttctgggagctgcaaagggtgaagcagttacaggttatcagggaggagcccagtcaaaactgaactcaaggaggatagatttgggagaagtccctgccatgcttatcctccctcggcgtgaagcacagggcccccttccaggcacaaggaccctgaagatctctgggtggaggaaggcaagaacagtggcaaaatcaggaatcaggaaccagggttcgggccctggttatgcgaggactcactgtgggactgtaaacaagcccttttccctcggagctttgaaacgcaaattttgagtcagcgagaccggcatgggccagagacccagccttcctaatgagctccccggagatgccacgctcctgcctgcagatcgaactctcagtagcacagtacgagatgatttttcagaacccttctaattctgaagtcttcccagccagaagcccactctcaggcctctcaggacacactgtccaaatacacagttggtttccaatggcagaggtaaaatcccaaaccagcttccataacatgccctcctcccttccctgactctgtgattgttgatacaggatgtgctccagaaccgtgaaacaagctcactaccacagttccatatgttaataaaaccttactggccgataatgagagattacatggaagggcagagagatgaggaaaccttcatggtctaattcattggcctgttttaacaactgaggaaactgaagtgcagagctgaagccaactgttcaaaagacacgcagagtcaaaaggggaacagtaaccctaattgagagtacagtttggagtccagatagtatcaagtcccaatctgttgggctctcccattgaactgggtcataacaatcctggtacaactattggtgttcaataaaagtgttttgaaatagaactgaatcggctgtattgcgttggactgttttgaaattaaactgaatcgggctgtattgctttgtattgatcactgcctggagatttggaagaggaaataatgataggtttcgaagaggcccccaaagagtcctgggcgtgagcctggagtcttcctcggaccacagtctcctctctggcttcagccctattgactttggtcctgcaaaga

SEQ ID NO: 7237 - DNA, 1699 bp, Artificial sequence
  DNA replication origin
agcgcctcctcgccacctgggcccgagactcccggtgctggcgtggcaggggtgcccccgccgggacgggacagctgggacccgcgcagccgagccggggcagccacgtggcggcggggcggggaccgggcgggccgggcgctgggagctggctgtcccaggagcaggtgagggcggaagggctgtggggggtggagagggtggtctcgggacagttcctctccccggcccgcagttaggagccaggcctggggtcacctttgcccccacctccccgcccaggtggatcctctcctaccgccggtcacccgcgcgccggcacacgggcctggccccagtacttggggtgcgggtccgcgtctgcgtggggtgccaaggggcccgggtcccagcgtggcccaaacgtgagggtaggggctccgcggaggagccaggtgaatgtgggcggaggcctgcggggcggcctgcggaggccgcggggcggcgggaagggcgagcggaggcctggggtcccttgctctgtgcggcgcgggcagccggggacacccgggtgctctggctccctacctgtcacccggcttttggcaggactgcagcccaccaagtcccccagccttcccagcttcccactgggctaaccctcctctcccaaccccccactcagtgctccgggcgccttccctcctcgccagcgctggctgctgtccttagtcgccttcttcccaggaagatcagctctaaccctccccctcgctctcttcctcccccttcctccttctaccaaagggtcctgagccccgtctaccttgcagcactgtgctggggagaggcgccacacagatcaaggggacaaactccctcctcccctcaaggaaagccaggtccagcgcgaaggggagggtgcctgggggtgggttgaggagctgccctagtcctgtccagccttttctcactcaccctcttcaatctcctacccttctccggccctgctccagaagggccccaaaacagcctcctcatggcccctctcccctctgctcagggcgcagctacattcactcaccacctgcagccaggtctagtgcgtcatgatgccctcctcctggagagaggggttcacgaggcacttgagggtgggagaggagtgtgactctgtgtcctcaagggctgggcagcagggcagctggctctgaccctcacgtatttaaggagctcagggaaggagagagctgggagtgcctgaggttctagggcagcaaggtttgagcacaggtgggcactgaaggaccagcgggatctacctgggtaccaaaaaggtaacccggccaagtttccagatgaggtagacaaggtttcttcctcagccagggcctcgcctggtagtttgaacaattctagtagagagaaaggatggacaacaaggggagaggagaggagaagccagcctgaccaaggatgctgttaccttccagagcagtctccctgtccagatcaccaggatccctgcttgctggagaatgacccagatgtcccaggtgcaggagctcttccatgaggcagcccagcaggtaggctcaggatgtgccagggtctgtgatggaggcctgtgagcacggggatccccagacagtgggctggatgcaaacattacagcgcaccctttagatgtaattaactccaaagtctattttggtcatcc

SEQ ID NO: 7238 - DNA, 1489 bp, Artificial sequence
  DNA replication origin
atttggaatttttgtaattccaaagtgctggaattacaggtgtgagctactgtgcctggccttgaattaggtattatacgtaatctggagatgacttaaagtatgtgggaggatgtgtgtaggttaaatgcaaatactacatcactttatatcagggacttaagcatctacgcattttggtattggtcagggggcctggaactaatttcctgcagatgccaagcggtgactgcataatggattccagtaacgtgactgtgtcagcctgtccgcccattcatcctttgttcacagatggttaatctgtaacttttggggggtctttttttctggcagagatgggttattaaaaatttctttgctgggaatgaaattctgacacatgctacaacatggatgaaccttgaggacattatgctgagtgaagtaagccagacacaaaaggacaagtattgtatgattctacttacatgaaatacacaaaataggtaaatccatagagacgggaagtagatgaggggagttacctctgagggtagacgaaacggggagttagtacttagtgggtacagagtgtctattggggacgatgaaagttttggaaatagcgatgatggttggacaatattgtgtgtgattaataccactgaactgtacagttaaaatggtaaaaatggcaaatatgatgttctatatcttcacacgcgtctttgctggagcagaagcgagaggttaggttctgtcagtgttcccatggcttagccttcccttttgtttttagaagaacaacctctatttttagggattttcacacaaaggcttgtgggcgtgggaagttctcccagctgccctcctgtttctcagaagcccacatggaagcctctcaaattatttaaggtttaggaaatatgccagattgggaatggagataatttaatctctctgtatgttaatttagggttctttttttctgcaacatgaggccctggaaaccttacttcacccctaggaaaggcagttctgggtcttggtgaagggggtaagggtaattcacccctacacagcatgcccagagcgctttcctggcaaaagcagttccacgccctcagagtctggggtcacctgatcacgcagccaggcacacacggagacccccggtaccggggtctcggtcagcttgtccagattcttctccacatctgcccagggggctgcgggtttccctgcactccgggcttatcccgggctttctcagtcctgcgtgcagtgctcacagccactcctcagagccgcacagggtaggctcctgtccctagtcccctggtcccggggctgggcatttccgctggttgcactgtcgaggggggagaggcagtggctggtcacttcgagcctgtgggcttgcggcccctactccctgttttcccccagccctgcccctacccaggtgaatgttcttgtccaggtaggcgcgaaggcccgacccttg

SEQ ID NO: 7239 - DNA, 1981 bp, Artificial sequence
  DNA replication origin
gtgtctttccagccaggtctctgcgccagacgagggcgggcgccgcggagcgcttcccgtgtgcggggcttcccacaatgcaccgggccggcagtggcggcgaccgcggcggcgctctagctgcggcatgtctgcgtctctactgctctgggaggaggaagagaaggaggaagaggaggaggaggaggagggggaggaagaggagaaaggcgcaggggtgggagctgttgccgaagctgccacagcaaaagttctcccccctccccccttcccctcctctcaaggcccctagaaaggttggagctgccgccgcctgcagtcggtgaccgcgcgactcggcgcccgcccgcggtaaagcgctcggcctggcaggcccgggcccgggggagggcgggggagggggagggggcggcgcgcggggggagcgcgcggcggtaacggcctgaccccggggggagcgagccgtggcgaggctgggggtggccagggggccagccgaggccgagggaaacgctggggctggctgggggacgtgaggaagcagggcgcggagggtgggttggggggttgaggagggataatgacgggggtggcggaggcgagaaggcggcctccgaggctggaggcgggtgtcagaggtaggggaggaggtgggatgtttgcacggggaggccggagggtgctgggtgtgggtgtgaaaaggctagggagacaccagggctctgtccaccgtgcctggtgcagtgctttatgcaccgcaggcctcagtcactgttgctgccggagtgtgctctttgggagaagggaagggcaggggttggagaaaagggaatgcttgcaggaaacgtagtgggagtgcgaacagggcgaggggccggaggaaagatgccggagaggtggaggaatgcggggaggtggctgtggaggagtcttgaggattctggggggtgttcattgtgcagatacgttaggtatttcattatggaaagaactgaagcgtttctcagggaaggaaagaagggagataggagttcccgtgaatagaaaggatcgcgtttgaagcaagagggagtgctaaatagtagagaagatgcagggaatgcataatagaatagacagatgtagtataattaataaatattggcctaagtactgaagagttattccagatgggccgggatggcctagttccgaacctgtgtgggctgttcagtagatgacatctggtaagtgtgggtctgggccgtggttggggtcactgagaattagattttagtctgtagtttggtctgtgacattttagacgtgcaccaatgagtatgagaacctctgaagcagaccttgagaaagggtctggcctgtggggattccttaggctatggagcttcgattttagaaaatttgaagtattaacacttacccgaggttgggtaaatactatcctggcaaacgctggaatggaaattaattgacttggtggttttcttcactgcccagtttatctggtccaggagaattggtgccgtattattcagcctggattgcagtacacaagattataattaatggtcggggggaagacatgcttgctggctcttctttagatacttcatttgtagctcaaattagttggctggattggttccataaatctgtggctggtgggagatcttctgccattcacagttcctgaagtgaactgtgagggagttctccagtgagagaatactctcattcaggcatgatggcattgaagaaaacgtatcagccagcaaagtgtgggcctgcagaatggaggagctagaatatctgttttggttttaggttgcaaggaggtcaggactagttatcagaaggtctaggggaacctaggagactggacgactctagagccaggttggagggaggattagcatctctatgtcaggaaatgaaccaagctctctctggatttgctgagctcacaccagaccagatttcc

SEQ ID NO: 7240 - DNA, 941 bp, Artificial sequence
  DNA replication origin
cctgcttcctgggtctcctggcttaagcagctgaccaggtcctccgcgggcttgcgtgtcctcccacccccggttccgcctccagctgcagctccgggagccctctaggttgacaagaggggcgaggcgatggctagcggaggggcgggcgtcgctagctgagagactggttggccgcgggcgcggcggcggcgcaggcgcactgggttcgccgcgccgaactgcagccatggagcaggcacctccggaccccgagcggcagctccagccggcgcccttggagccgctgggctccccagacgctgggctgggggctgcggtcggcaaggaagcggagggggccggagaagagagctctggggtcgacacggtgaggagaaggggcggcagagccctcatggcctgtgtggtggcctagcgggccgggctgggctgggctgggctgggctgggccgggccgggccagtgggctcggccgaggaggcccagcagtgagggggagcgaggtggaaaggcggggtccgcaggtgcagtgagaggaggctcagtggaaaaacagggtgctgggtgtggggcgagcgccaggcgctgcgggtgactgagggaagtgtcgagactgcgaaggggagggaaagggacccgggggggcgcccccgcaggcgtgggggtctgggccccggatgggcgaggctggaggagggggttttcagtggtcgcgtagctgggagatctggaccgtgagaagaacgctgatgtttcagccagttgctaaggggttttgctggggagtagcttaaagggacacagtggggagtgggcaacagtgcttgagaaggaagggaatgggggactagagtgaggtgcaggtcagggccaataagggtggttggcctggtgctgccatcaggaaattgaagaaaatgtcagcttcaagaaaaggt

SEQ ID NO: 7241 - DNA, 1253 bp, Artificial sequence
  DNA replication origin
gggtaggtgcggagggagaggcgcaggccggaaccagggctgcgcatggcgctcccgggccagcgcgagttctgagtgggcgtgggctgggccagcccgcacttggagcggctggctggcaccgccggccccaggcagtgacgggcttagcacccgggccagcagctgcagagggtgcatggggtcccccagcagtgctggcctgctggctctgcgctggaattcttgccgggctcagctgcctccccgcggggcagggctcaggacctgcagcccgccatgcctgagcctccccaccaccgtgggctcctgcatggccccggcttccccactgccgtgggctcctgcatggcccaagcctccccactgccatgggctcctgcatggcccgagcctccccaatgggcgccaccccctgctctgcggcgctgggtcccatcgactgccaggctgaggagtgccggcacacagtgtgggactggtgggtagctctgcctaccgccgctgtgggggatccactaggtgaagccagctggcctcctgagtctagtggggacttggaaaacctttaagtctagctaacggattgtagagacaccaatcagcactctcttgtctagctcaaggtttgtgaatgcaccaatcagcactctgtatctagctaatctggtggtgacttagaaaacctttatgtctagctaaaggattgtaaatacaccaatcagcactctgtgtctagctcaaggtttgtaaatacaccaatcagtgctctgtgtctagctaatctagcagggacttggagaactttgtgtctagctcagggattgtaaacacaccaatcagcaccctgtcaaaatggaccaatcagctctctgtaaaacagaccaatcagctctctgaaaaatgggccaatcagcaggatgtgggtggggtcagataaggcaataaaagcaggctgcccgagccagcagcagcaaccaagtgggggtccctttctgcggtgtggtaagtttgttttttcgctctttgcaaggactcttgctgctgcttactgtttgggtccgcactgcctttatgagctgtaacagtaatcacaaaggtctgcagcttcactcctgagccagtgagaccagcaacccatcacaaggaagaaactccaaacatgtccaaatatcagaaggaacaaactcctgacacactgcttttaagaactgtaacactcaccgccagggtctgaggcttcattcttgaag

SEQ ID NO: 7242 - DNA, 1869 bp, Artificial sequence
  DNA replication origin
tcctgcctggccgcggcgcgtcctccccgtcctcgcagtcctcgggctgcgcgcttcccctctccagcaacagccgcagcctcttctcttcgggagggacgtcgtcctcctccctcctgggcccgccatccctgcctcggggcttgccagtggcttcggagctgccggaagggctggccatggctctgggggctctgcctgcacctggggaagaggaaggacccggcgcgagcggcctgtcggcggagctggggcgtctgaacgcgggctcggtgggtccgcgcggcgcggagctgggcatcagggcgggcgcggactcctccgcgggccgctcctggctctctggcgccctctgctggccgcccgcgctcaccgcggacacgccgggccctggcctgcgctgcgctcacctgcccaggcccaagcagtcgctgtcccctgcctgtggccaggcccgctctggccaggccctgcacctcctccccgccccagccaggttgcaccccgatggtctccctgcccaaggaggagagaagagaagggacgccccgagagggtggacatcggccacagccaccttgtctttgctcttaccctgcgtcttccatgatttggaggtggtgggaaaactgaggctgctcaaaactcgtggagaattccgcctgcaggatgacatgaatgcaccttcgcattgcctaccaacagatcttttttgagcatctctgtggaccaggcgtggtgatgggggaggggatattgtggtgaacatgacaggcgttgccttcacccagtggggctcagtgctgggtgagaaggcattgagaatggacattgtcaattgggccaaaggaggccaagaagaagtgctgggggcatgggaactaaaaaagacaggaggctcagcaggtcttggagctgggagagggccagcagcagcggctattccaaaggaaacaacagctgagagaggtctcagagagttgttctcagcccagtggagggtgttcaggcagaaggaacagcgtgtgcaaaagcccagaggctgggaaagaagcagaaagaggactgtggggctggagcatggtgggcaaggtgagagaggtgtggtggggggacagattgcctgggacccagctgtgcaggggcagaggagataggggatccttgcaggcccccagccagggctgaggcacagagacaatgcaggtgggcaaagggaggagacgtggagaaatattttggaggcatgccctgatgaatgagcccaggatgcacccttagtgtcagtgtggagctccttccttggttgtgtgatgagctgaagccgggggtattttctggacatcgaaatgctacacccagagtccaggacaggctaagtgaacaccagcatctcctggcccacctcaaaagcaggagagacaggggagactggggagggccggggtggaaggggaagccaggaaggcaggagaggccagggaagcagaggaggccagggaggcagtggaggcagtagaggctggggaggctgtgtcctttccatgattctgcccaggatcctaggtccctgtactccctgagcttccccaccccaagctctggaaacatgttgcacaatggtctccccactaagctcctgattgcagcccctaccctgctgtgctccctatttcaaccctaacagctctcacagtgggcagcacatagtaggtgctcaggaatcactggtgggggagcacatgggtctgctcagcaccttcctctctcctccagctctcccctgtcacgaaataattctgataagaacacatgggctttgagtccctcttctattactttccatatgctaatccatctatacctcac

SEQ ID NO: 7243 - DNA, 1359 bp, Artificial sequence
  DNA replication origin
gggcggccagcagagggcgccagagagccaggagcggcccgcggaggagtccgcgcccgccctgatgcccagctccgcgccgcgcggacccaccgagcccgcgttcagacgccccagctccgccgacaggccgctcgcgccgggtccttcctcttccccaggtgcaggcagagcccccagagccatggccagcccttccggcagctccgaagccactggcaagccccgaggcagggatggcgggcccaggagggaggaggacgacgtccctcccgaagagaagaggctgcggctgttgctggagaggggaagcgcgcagcccgaggactgcgaggacggggaggacgcgccgcggccaggcaggaagaagaccggcacccagacaggtggcgacggcagaggagtaagtgacgttggcgcgggggtccgggggtgccaggggcgcggggtaggggcggcgggaggctccgtggccggccctgggttaaagttggtaattgagcggcaactccggcgggcgcggagtgacagctcgtgacggcctccgagacgccagctgccccttctcggctgtgtggcttcgacttcctgattctcccacgacgtccctggccgggagacccgctggactctgcggctggccaaaaggggagggggagccccgcgtcctgggggcccctagcggaaggggcgggggttgcgctgggcatcctgtctggggcatctgtctgggactctgttggtgcctctcacctggcgaggggcctgtggtgtgggtaggggggaagtccctgccatgcttggccaagccctgctctgctgggctgcgggctggcggcgctcacccagctcctcacctgtccctcatcttcctgtttttcttccctttctggttgggcagcgagagttgagagaaggcagatggcttccatcccagaaatcgctctcctctttccatccctacagagagggacagggaggcaaagttccttccatcccccggggcgctgtccctgtgagctcccggtgtcctgcacacgtgggcccctgagtcactgggtctgtgtgtgtgggatggggctccgtggccagcctgtcctcctggggttcactttctgctttcctacgccaactcttcctgtgtggctttgctggccttccactgaggaggcacatgggtttggagggcagatgaggtcccactggagagctgtaaccctcagtgagggccgccaccttgacggtttttgatggataatggggttgacttctttgttccttccacatgtttttatgtttgaccatttgctcagctgaacttgtcttaataattggattcgtggtgaatgagccccacat

SEQ ID NO: 7244 - DNA, 1019 bp, Artificial sequence
  DNA replication origin
tttgggataaagaaaaaggagcattaaccttgactatgcctttagctccagccacctttttcagaggaaattgctgggcaggttggggagggctagtcatggaacgaaactgtaagctggacccggtgtgaggaggggaggtgataaaaggattatagggtggaggagcggaggctgaggaagaattggggcctagcttggcctggtgaggaggggagaggtcagattggtctgtagaaaaggaagattacaaagactcagtgacgcttggggttgggactgaggggacaggtgggagggaaagaaggaagatttgggatgagttgcactgggaacagactagggagggaccgatgtgtaaaagaatgcctgggcatcagtcacctcagaccgtttgcccattttacgacaagaattatctagatcttgtaggttggaaaaattgaaagtgccattttctggctatttggaactactgttgagtttgtattggggtcaagtggcattgtggaagaaaataaggcatttaggttttaggtcaggtgtgagttgaaaagattttaggtttttaacacaggctaggggagaagaagggggaatggagggcagaagcttgcccatagtgaaggaggcaagcctagagaaaagagagagtagagacacagagagaaggggtggggggttcttgccttcccgaaaagtgggaaaggggtcagtgtgcagaaataaagggttgtgatgcagagctaagaggtcagggcacagaaataaggggttggggtgcagagataagaggtcaggtcgtggaaataagggattgggtcacagagataagaggttggggcatggaaataagggatcgggccacagagataagaggttggggcacagaaataagggatcggggcactgagataagagggggttccttcccctcccccagaaaagtgggacttgctgctaagggtgaaggagaaggggttgaggggttcttgccccttcccccagaaaagtgggac

SEQ ID NO: 7245 - DNA, 2064 bp, Artificial sequence
  DNA replication origin
ttaaaaagtcgtgaaaatgatcgtgaactgtatcccacaacgagtgcgcctctgccccctaagacggtggagaggcccccagcttatgccgccagcccgcggggcaggaagggtgtgagcgactctggccaggccccagggatggggaccgggtcgcgcggacctgactggcgggagcccaggcactcacgtggcgggcgtgtcgggggcttctgcacggagacccatcccgtctgcccctggactcccgcgagccctgcgggcctctccgctcgccccgccgcccacctgccaggggaaggagcgcagcgcgcgcgccgccagaaagcggcgctgcaaactctgcagcaagagttaggtcccagcgttctcctcgggcgccatgacgtgggcggggccgcagtgttgccgggagaccgtgcggaagccgggcctggactgaagacggggcgggcccagggcagtgcgcgggggcagagagggggcggggcctgcgggtagggtcaggaggagagtcgtgggggcggctctagggcggggccaggatgagcgttatgaggcgggggcttggggtggggccaggatgagcgtcatgagggcgaggcctggggtagggccaggataagcgtcgttggggcaggtcctggggagagttcaggttggcgggtcctggggcggggccaggacagggcgatcctggaagcggggcttcggaagcgtccaggttggaggcgtcctggaggcggggccttgcgtgggggcaggataagagtcctggaggcgggcgttagggtgggggtaaacgatgattgggttcaggaggcgagagtcggagcagagcccaggagacaggtcttagggcggggctaaggccagacccagagaagggctcaggaggcggggccagggcggggcgttgactatgtcgtagcacgttgccaggcactgctcgaactctgggaggcggatcttaggacaggccgacgtggggaggggcccagggtccgggaggcggggccgagtctaggctgcgggctgcgctcaggaggcgggccctgggaggcggagcttagggagggtccggtgttggcagggaccaagggactgggaggcggatcggggctgggctcaggggccgagagggagctgggcttggggcggggccgagacggagcgaggggtccagggtgtgagaaacggggaggggtttgaggaggggattggagtgtggctcaagttcgggaggcgttacctgcggagggtttgaggcaggcccaggagcgagcccacggtctgccgacgcggggccagcggcgggccccaggatccggagcttcgggcggggccgagtccaggtttggggcccgggaggtggggccggttagggcgagggtccccgggatcgtagtgtcaggccttgggccaacgtaggcactcgcagttcctccgccttcaggaaggtctttttggcaggggccttacgggtgcgcgcttcggtcctggaggcgttatcctagcctcctctccatcagcgccacccgtctggggcccgataggagggagctttctgtctgtcccccagcctttggactgtcaccaaacaagccatccgttcaccaaatacttattaagcgcctaccatgtgtctggcaagggaggtgtaacagtgagaaaaactaggtgtggtccaggccctccaggggctcaggggctcgtggaagaagtggacattgaagtacttaccacacaaatgagcatgaaagtacaatagcaatatctgccacgaaggcgagcagacagagctagcagggcttccaggaggagttttgatcttgcagggacaggaaggaggagttagctcctggggggcgggattgggggtggtggtgatatagacgtggggacagagtggaaaacaacaaaaatataattattttagttcaaagttattgtgtcttgagttgaaaggcagggcagttagcgacacggttcagatttcagtactgcccctgaaatctgaattgtgttcaaagtctaaaacgtttaccttagcaaatccctcat

SEQ ID NO: 7246 - DNA, 932 bp, Artificial sequence
  DNA replication origin
gagtggccgtgggggctggtacccccggcactgggctagcagtgaccacaggggccggctgcgctgtcctgaggatgccctaccaggctggccacagtgacacgggctggcccacggccgcaggggccggcagcggtgccacagggtcagcagagaccgcaggcgcctgcagcggtgccttggggccaggaggaaccgcaggcgccggcagtagaggcaggggtccagaagggaccgtgaggccaggagggacctgggagtgcccaatgcggccggcagggctgagccaggcgtgactgttggggctggcagagctgatctgggcctggaaggagccgctggggccggcagggctgaccggggcccagaagtgaccgccagtgctggcagggctgtttcaggccccgaagtgaccgccagggccagctgcgctgacccaggagtggccgctgggagggctggcagggctgccaggagtagggctgggagggacccctggggctggccgggctggctgggctggagctgttcctggcgctgggcggggctcttctggtcccagtggctagctgggagcggccccccttctggggagcacacctgcttggaggactgcagcgggaccttcctcgccccatggcaagcgggctcgaggtcctgccgggggctgcctgcctccagggtccgcctggtctcactcggctccgcaaggaggcaggtttccaactcccggggttcttgataaggcgacgttcccatttctccttccgctcctgtggctccagggccatatctttctcagggcctccagggtgctgaagctgggtatggcgaagccgtccatgacctcctcctcctgcgagttgaacttccggccgtcgtggcgctaggtgggtgggtgggggggcgcgcggcacgcgttctccttgcct

SEQ ID NO: 7247 - DNA, 1536 bp, Artificial sequence
  DNA replication origin
attcacttcaatgagtttttatttaaatatttaatgacatagtaagtggtgtaagtacctccttagggaatcttggtaaagtacagggatgtaatcaaatggtttgcaaattgtacttatttatttataactctaatttttttgttataaaaaatggtgccatggcactttttattttctttaatcagaaaaataacccctgcacttctgggatggaggccccaggtgagcaccggaggaaggggcctggatgagcagggagtgagggggcctggggcccagggcccagagcaaatgctgcaccagagcctggtcaggacccaggagggcctgagggagtggggtcctcatgagcaagtgctggggtctggaggtcagcagctgcctggcctggaagccaggaacacccacttcctgacacctgcggtcgcccagctgggcgagatcaggcctgcgcggccaggacctctggtcacaatgcaggggttcaggtggccaaagctgctctctggagggcctctggctgcagcccacccagttcccctgaggtctggagactcagagcacccccataaaacaccccctcccttttgggccagtggcatgcctcggactccagaagacttgagtggggctccctccagaccagggcctgagggggtggcaaaccctgaccacagatggggggcgtagaaggagcgggaatgggcccagggacagctttgtagtgtgaggtctgcccgactgcatctaggtcaacagccagacaggatgctgcaggggactgtggggaagccaggagaaggtgctgcccatcctgcaggctccccctcatctggagaccctgcgggcaacccttcagtgtgtgcccacgggggtggcggaggcagagtcctgagagtaatgtgggagcctccgggccccctgcagctcctgacccaccagatgggcctgtgttccccctgtagcttgggggccctggaggtggacaccagtaccacctgactgccagagagaggggctggactgaaacccacaccttcaccattcaccactgggcgattctgcctgagggcaagaattgcatcttggccaaaggggtggggcctgtgaagagcaaggcctgcagcaaccacccccacagatccttcatgcccagcacaccactcactctcacacccactcttgcacacaagcatacactcacagggtgcatacaccatgctcacgcactctacaaaggtggcacagctgggacaatcatgcacggagactcagagatgcaaggacagtactggcaatttagagacacagacgctgaggggcacctagcaagctcccggccctcaggggctgtgttcccttcccagggcatgcacaccacaggcagcacacgcaggtgggggcactgtgacaccagtgggagagggcatggtggggtggcaggaagatgccgggttcatctctcctcctggcgtggcgggcctctgcctgatcactgcactgcaggggctcccgcctcaggctgagcctcaa

SEQ ID NO: 7248 - DNA, 1267 bp, Artificial sequence
  DNA replication origin
gataaatgtgtactgagcacctaggatatgttggacactgtcccagacactgagatatagcaaagaacaaaatttcaaaaaaacaccacataggacttacctgactgggaacagacaataagcataataaagatgggaattatcagctatatgaaatggagaaaaataaagtaggggagaggagagggagagttgagggaggttgcattttaaacagagtggtgagggaagcttcatgatagagtgataactgagcggaaacctactgaaggaaagtgagtcaagtacacccaggggaagggcacaccagggggaggagcatctggtgggaagggcacacctggatgaaaagtacaactgggggaatggtgtacctggggagtgagtgtacctcaggaaagggtgcaactggggagagggagcacctgggggaagggtacacatggcaagttggtacacctgggagaaggttcacctggggagtaggtgcacttggggagacggtacatctgtggagagggcacagctgggggaagagtacacctggggagggggtgcacctggggagtgggtgcctctaggaagagggtgcacctgggggaagggtgcacctaaggagtgggtatacttggggaaatggtgcacttgggggaagggtacacctggggagagggtgcacctggtggaagggtatacctgaggagtgggtgcacctggggagagggtgtacctagggagtgggtacacttggagaaagggtgttcctgggatgtgggtgcacctgggggaagggagtacctgtggaaaaggtgcacctagaaaaggtacacctagggaaagggtgtacctaggggaaaggtacacctggggagtgggtatacctggggaaagggtatacctgggagaaaggtacacctgggaggtggctgcacctaggagatggacacacctgcgggaagggttcatcttggggagggattgtctcatctccctatcctttccctccccttgtcattcaaacctctaaaatacaagcttttctcaacttggggcttggggacaagggtcacagagtcagtaaccattagaagcagtatgtaatcatttgtgtgtactgcatacagtggcatttttctctagtgagacaatttgtgactttagaatgagctttttcccaaagattgagaatcctgggatgtttattcaatttcactcatgaatgcaatggtttattaaagaatacatttccagaggaagtgatggtcag

SEQ ID NO: 7249 - DNA, 1540 bp, Artificial sequence
  DNA replication origin
catgcttgggtgggacacagagctcacccactggctgagatattcatttctcacacaggtgaagtcaaaggccttacacacaggacccccacacccacaggcctcacacttggccctggaggctgcaggctggcagcccagtgtgtggggtccccctgctaagcccctccagcctgcccctatccacacccgtcctccgcctctgcatctgacccggctcccacatcacaccgctgggggctcctacctcctgtgggcctcactgcctaagagtctttgaacctcttagtcactctgagccttccatggtttggtccttggaaaccaaaggctcacacaaggtcccatctaaggggcctgcccaggaggcagatctggtcagtcaagtcctctctcagcaggagtcccctgcaggcagagactcacggctgctgagccaggaagtcagggccacaagacttatagccctggcaagtctccaggtagttgacactggatacactgccatggtggggctggagggtcagcgggcggtaggtcaggatgtcaaaaacaggggagattgaccctatagatacacctgtatgagcacaaaatggcaagcacacagcccaagttcctatccacagggtgtccgttgaaaagatcatgggtacaccttggagcacttgaggcggatgtcagaaagaatgaaaaagctctgtgcaggcctatggaaagggctctgggactgaggaaggaaggagagggggaagggaggaagggagggagtgaagaaggaaggaaggacggaaggaaggaaggaaggaaaggagggaaggaaaggagggagaagggaaggaagaaagaaggaaggagagaagaaggagggaggaaggaagaagaaaggaagggaggaagggagggaggaagggaaggaggaagggaagatggaaggagggaaggaaggaggaagggtggaagggaaggaggaagggaagatggaaggagggaaggaagaaggaagtaaagaaggaaggaggaagggaggaaagaaggagggagggaggaggagagagggaaggaaggaacgaaggaagggaggaaggaaggaaggaaagagggaaggaagggaggaaggaatgaggaagggaggaaagaaagagggagagaaggaagaaggaaggaaggagggaaggaggagaggagggagggaaagcaagaaggcgggaggaagggaaggaaggagggaggcggggaggggtacacaacaagggcagcctaggctccggttgctgtgacaaagaagcggagtggccctgctgcattcttttgctggcatttggcataagcctgtgatagataaagagcagaaggtgcctttagggggcaccgaagaacagggtcgatagggctgggggaaagcaagtatttcaaagctaacttttccatcatttttgtgtttgaaccatgtaaatgtattgcctgtccccctaaaatggattaattgagaagagagcgagaccacgccgagcctcgggccatcacagcctgaatggga

SEQ ID NO: 7250 - DNA, 1169 bp, Artificial sequence
  DNA replication origin
cccaccctccccgcgccttctcgggcctccgcgtccgccctgcgccctcggaaggcgccgcccggcggccgcggcccttcgccgcagccagagtgctttgtccgagctcaaaaaagccgtctccatggaagcggcccttccgctcggagcccggcggcctggagggagacccggcggggatgcgaggattccgccccagccccagaggacgcggcggagagcctggaggaggcgctttgagagtcgaggtctcccgcccgcgcgcctccctggcgcagacctcttttaactttttggcgtggagtgcgcgtcctgacgtgccccctgagctacagcttactgagctttactggcttcgccggacagccgtccccaggtggagagacagcgcgtcgcgcgctgcccgggccccgcagggcctggcgcctggggcccttgcgccgctttggggcgaggggatcacaccgcgggctcccggagcttagcgtcttccacgcggcgctgtgtgtcatccacgcagtgtgctctcgctgccgtgttcaggtcactgcgagggtgagccccgctttatctaccccttctgctgttgatgggcactcgtctggggctagaagggataaggttgctgtgagcgttctcgtgtgtttttggtgcacgcgcacacacatttctctggggtgcagacctgtctagtagtggaactgccgtttcccagcactttggagcaaagccctgttgcagtctgaagcggaaaaggcagacgggccttccatgttcgtgattccagccaggcacagaagggaaggacagggacagcagccgcgcggaggcgaggagggacactgggcgctgctgtcccctctcaggggcagccactcctcttgtggacgcaggtgtggtcaccagaagggaaggacagcagaggactcttcagggaccttcctggatccccctgcaatgggagtggcctacttgcttgacttgagggtgagacttggtcagcccttgactgtagggggcaggaccatgggcttcagtggggcagcacccatgacccacgcctctgcttccattccctgcttactgcccgggcctctgggcaggggagtctagtctcccttcccaggcttccaatgcctcgccccctgctgtggtaaggattcgcgctg

SEQ ID NO: 7251 - DNA, 1958 bp, Artificial sequence
  DNA replication origin
aattgcattaaaatgacatgcgcacctttgtgggctaaaactcatcctcactgcatataggtctttggtttgtggaaacaaatctaagtttgaaatgtgaacatcttctagcttattttattttattttgccttatattttgagcacaggcctggatttgggggcattcagcttgggggtccagagggctcatcctagagaagctatggagagccgatcttcatgggccttttctgctggggccttgcctgggagcccctggctctgagacagggtggcccaagctgggcttggcgggagtgaggggggcacgagaggaagtggcggtggccacatgctagtggctggaaagaaagctctgacagcttgggccttgctcttggcaggagggtctcagaccccccagccccaccttgcccgccagagaacagttactcaagaggcagcagaaagccctggggtgtgctgagttttgtgttggccgggccactgagatgatgcaactccactctgcattgtgcaatgagatgaaagggccaccagggagggcgcacacacaggggctttgcatcagccacacattgaactgggtcacaatcagttatacacacagacagtctaagattcagaggaaaaggaagacataaaactcacaccctgagagcccaggagagaccagtgaaaaggaggaggagggggagaaggaagaggagggagggaggagggggagaagggagaggagaggagggggagaagaaagaaggggaagtagggggaggaagaggggaagggggaagagatggggagaaagaagagggaaggaaggagaggagaaggaagatgaagagaggaaagaagggtggggaggaggggggagaagaagggggaaacgggagaaggagtgggagaagaacagggaggaagggaagaagaaggaaggggggatagaggaaggggaggcaggaagaaagagaggggtaggggaggaggagatgtggagaggaaagagggggagggagagggggagaagaaggggaggaagaggagagaggaaggggaagattacaggagggaggaggttaggcaggaggaggggaaggaggaggaggggaagaagatggggggaggaggagagggaagagggaagggaggagggagaggaggacaaggagggtttgggttaaggttaggcttggattagggttaggaggagggagaggaggacaaggagggtttgggttaaggttagtcttggattagggttaggaggagggaaaggaggacagggaggaggggagaaggaagagggggagggggaagaggtgaagagaaagaagcgaggagggatggggaggaggaagaaaaagatgtggagagggaaggggctagagggaggatggggaagaggaggaagaagaacagagggggaagaggaagatgtagagagggaagagggggagggagggggaagagaagggaggaaggggaagaatagaggagggaggagggaggtaggagaggaagaggaaggagatgtggagagggaagggggagggagaggaagaggtggagaggggaagaatggaggagggaggaagaggggaaaaggaggaggggaggagggaggagggaggagggagatgtggcactcatgctaggtgctctgccacaacggatggaaacctggcacctcctgccccacagtaggtctccgtcctggatctccactgtcaccctgaggctgacgctagtgtgtaaaaataggtatggctcacgcaacaaggtcctgaaattctccgctgagctacataaacagcgatccgatccaagggtggaggaaaacccaacagcgttgactttgcgaggcccatcgctctctgtgtggcaagttattaaggcgtttctagtggttttgggttgtctgtgccccgtcttagaacctgagccatgggggcacg

SEQ ID NO: 7252 - DNA, 1833 bp, Artificial sequence
  DNA replication origin
tctcacagttctgggggaaggaagtccaggatgaaactgcggccagggatgtctgcttctgagatagcgtctgttccaagtccccctcctggctcctgctatttgctgccaatctttggagttccttatcttgtaggctgtcaccctgatctccaccttcatgaccacttggggttcccccatgtgtgtgtctgtgtccaaatgtcccctttttataaggacaccagtcatattgcattagagagacccaccctactccagtgcaacctcatcttaaataattacatctgcaacaactctagctccgaacaagttcacattctgaagtactgggagttagggctgtaactcccagtacagttagagttagaacatatctcttcttggtgggggcacttttcaacagtaacgcactgtgtcttggaagctaagtggtaggatgggcccagcctgtgctgcatggtccaccccactgtgccccagatgggggaggggcgggacctagggccacatcttgtcaatatggagcagggaagttcccagacattgggatcctgggctccctacacaagagtgaagagggaagtcaggggggacaggaggagagcgggaggggagggatagaaggccggcaggctccgagggccagcacacactctcacagctcacagcaacactgctgtctccggctgcatcttaacagaaaactgaggctcagagagacacattttgagtgagaggctgggccaggacaggaactcaggcctgcatgactccaaatcacttcaagaaggaggtgggctttctacctatcctttgaaattcctctcctgcacctccctggactgtgccacttctgaataaaaagccatcattttatgaggcaaagaaaatgctacggttctgggaaggaaaatattcttatgtggaaaagaggggtcaaggcttgggaccctctgacaactaggtcatggctgattccgacataagagaaggaggtttttaagattctagaacaggggttggcaagccgcactctagagtcaaatcccactgctgtctgtctctgtgcaagctgggaactgtatttgcatttttaaagggttgtaagagacaagaattcaaacaaataattgcggcagagaccacgtgtggcctgtaaagcctaaaacatttactatccggcccttcacaagaaaaagccagagcaatatggaaagcggggctgggagtgcacgggcggagtggggaagggagtccacgggccggactggggctgggagtgcacgggtgggagtggggctgggagtgcatgggccagaatggggaagggagtgcaagggctggagtggggaagagagtccatagtccagagtggggaagggagtgcacaggccggagtggagaagggagtccaccggctggagcagcgctgggcatccatgggccagtggggaagggagtgcatgggcctgagtggggaagggagtctatgggccggagtggggaagggagtccacaggccggagtgggactgggagtgcatgagctgcagtggggagggagtacatgggccggagtggggaagagggtacacgggctggagtagggaaggaagtccagagtggggagtggggaagggagtgcacaggccagagtggggctgggagtgcatgggccagagtagggaagggagtgcacaggctggagtggggctgggagtccacaggccggagtggggaagggaatgcacgggccggagtggtgaggggagtccatgggccggagtggggaagggagtgcacaggcagagtggggctgggggcagcccag

SEQ ID NO: 7253 - DNA, 1197 bp, Artificial sequence
  DNA replication origin
gccttggtgttactcatggaacccccctctcacggagggcacagaggggctgttttctcccacggccctcggaggtgacaaaatcaacaattgtttgagagcctcaaatctccttccccctgtccccccggaccaggtggcccctggggagaccctgccgccctacaggtgtgaggacgcccggactctgcgactttggggcctgcgggcggctcagggaccggagactcttattttgaaggacagcccccgccgccacccccgtgatttgcacgctgacccaatggcaagcccttggccggcgctgggcttgttatcaattacatgttgttcctgcagccgctgtgtccccgggaggataaacagcaggcctggccgggccaggggagggggcggagtccggcggccagccggggactgtgcccggaacagcgtgtcccctccccctgcacgcagcctgcgcctctggccgccccacgtgctgctgtgtttcaggggccgagccagctccagccctagagtgtcctctctttaatgccggtgccctgggacatcccagagccctttctgggttgtcagtgcctgggtgcttcccccttgggacgttcagcccagcattaagaccctgttggctgacctgggccacccattcctactctccgacctcccccgctctcccccgcaccttccattcactcattcagcaaattttgcccggtcctgttttagactctgggatatggccttggagtgaacagtcaggacagctgatattctgatgggaaggtagacagggaggaaagttcacaaacacatcaccaagatagtttcccacagtagaaactgcagggaagagtataatataggatgatgtaacagagtgggcctggaggcccccacaggggtgacttctgagccgagatctaactaagcagctcccacctgcagtgctgggggaagagccagggcagtggccccgggctgaggctgaagtgaagtgagcacacctggactagaagagaggcagttggtggtgaggtctgcagagagtcccaagggcccaggtgctgggctgctgcgaggagatagggccacctgtccttgggaagccattggagggtgtttccttccagcccccctactgtactttttagatcactttatctgtcaatatctgtttatatgtttaaaaggtaa

SEQ ID NO: 7254 - DNA, 1232 bp, Artificial sequence
  DNA replication origin
atcgagccagcgcaggacccgcggctcggcccccggccgccgccggaccgagagtctagccgccgcccccagcccagcccgcccggccgcaggaccgccggggcctggccgccggtccggcgtgcgccaagttcaggtgggagaggcgcggcggggccggccggccgcgtggacgcggccccgggtgatcagagggctggccggcctcggggcgcgtggccgtgctcccgcgcagctctcggaggcaccgcgcgagtgctggaggaatgtcggaggagcgggatgggcccccgcggaggtgggcaggggtcggactggcccgggggaggtgaccccccccgccccggtcgcccaccagcactttgctgaggcccgcgccgccgcctcggtgcctggccgggcgattccgtggcgcgccttgcgggccggccctcccatatggtgggcaccggcgcggcctggtgagaggagggggagagcggacgcgctggccagcccggggttggggggcggaggggctggagacggaggggttactgtcggtcaccgcagcagtgtcgggggcaaggggggggcgtgggacgagggcatggtgcccagcgggcagcggtccaggactctagaaggggtctgagccggctctcttcatttcccacgcacgtttcccctcacccgccggcacccacggcggctccacgcgcgagtccttcgcggacagcctcccgcacagccacagcggctgccgcgcaccacgccccgcacacgcagtcacacgacaggaactcacaccccttcacgcacacccgcaccgttcacgcgtctcactccacgctgagtccccgtccgctcagaccgaacattaccaaagccatggcctgaccgagggatggcggcggcggggcagagaggccgtccccatcccatatggtggtccggttcactcttccctccccgccttggtgttactcatggaacccccctctcacggagggcacagaggggctgttttctcccacggccctcggaggtgacaaaatcaacaattgtttgagagcctcaaatctccttccccctgtccccccggaccaggtggcccctggggagaccctgccgccctacaggtgtgaggacgcccggactctgcgactttggggcctgcgggcggctcagggaccggagactcttattttgaaggacagcccccgccgccacccccgtgatttgcacgctga

SEQ ID NO: 7255 - DNA, 1476 bp, Artificial sequence
  DNA replication origin
cctggcccgcagccacctccttgcttcccacctctcgccgctgtctcgcggcgtccacgagggccggcttctaaagctcggttcccaaggtgagaacgtgagactggcctgaagacttaagaaaagctctgagatcgccccaaagtgcagtctgcgtgattgagcgggaagcgctggggagcctgtctggcccggtctggcccacgtccccaccttcatccccagcgcggtacaagcagctctgtcccccgctgagtgtcagataaatcacttgcctagaaggacgtatttttggataaatacggtattgggctttcagcaggacaatcagttaccctccggaaattgcgcgcgctctgcgctgccaccctgccctccaggactaaggaggtttgctgaccggccccccccccccccacctgaaaccaatgacaccttgtctctggggcacctttctgaagaccaaacaatgcttcgcagtctacaaaagcgttcgtagactgctttagtccgcagcaatcctggctcgcatttgggttcccgcttagagacaggaagagtaaggctcagagtggcttgcccaagaaaaacacgtgggctgacggtgctaggcaccctgctgtgccctttaatccacactccagctggatcctcagccaagcactttacagatgaagaaaccgactcagagagggcaccagccctccccagccccacagctgggaaggagcaggtagagaggtagagccaggtcatcttgcagacacccccaggccacctgtgcagagctgtcctactgagcttccttcctctcccctcctggcactgggaggtggggagcattttctcctgcttcttcttgaagacattgctagaacaggaatttttaaccataccctttccaggctctctggaatgctataggtctaggcttgcttgaccagggatctggggacactgtgcaccaggtcagtgccagggattcagctgctgctgccactaggagccaaaccaatgcgttgccagagggctttaaggacatttgtgttgaggatggtgagaggctttctagttcacagaagttggaatgaccactctggcattacagcagccctggctagcctgggcagaacagtggaatttgtccattttcataagagaagagatagaggcctgtattcctcattttgtctcagtgcaggtctggattgggcatagccacagcacttctccatctgccctgcccgccctcggtcttcactcctcacatactctcagtctagtgcctcccatctccttggtgaaagctgcagcaaaaggtcagaaaaagcttggaagcaaagacacatcgttagcaccttcagcacacagggaggaggccccactggctagaaactggagaacagccaagatggtcctgttaaaacctgagtcagatcaggtcccttctgggttcagaagcttccagcagctccc

SEQ ID NO: 7256 - DNA, 1024 bp, Artificial sequence
  DNA replication origin
agtttagatatgtaaattatatctcaataaatattttcaaaaggagaagaagaaaggggtccacattgccaagtgctcttgagtggccaagtgagagggactgaagagtgttcattggatttgccaacaaatcggttgaccttggtgtgagcagtttcaggatctcctgggggactgagatggatgggtgacgaggaagaggagaaagtgccctggacagcacttttgagggtcctggcagtggctctatcttgctcccttatgggtgtgcagacccacagtgggcctggagaaatgaccctggtcttccctgcagctctggtggaggctaggtcattaaagccagacccccagtgccacagttcagaaggcaggatgctggggcatgcagcatggcaggtgagaaaactgcatggcactggcctggttcccaggtgtgctcctgggcgtggtctccacaggtgggggtggggtgcaggtcccaggtggttaggggactgtggtcagccagccaggaagaggggttgagactagaccaggttgtgggcgtagaggaaatgaaagagacatacagagagagagagagacagagagagagtgtgtgtagaggcagaaggcaagctggagggaccatggtgctgaggaggctagggtgggatccagatacaggaggaagggtaggagatgtgagcatcaggggtgctccccgggagggcgtgatttagccccaggagcccggggaaggtagtctttacactagtttcaggtatcatttaggttgtattttgcttcaagaaacagaaagcttcaccagaaatgacttacaaagaaacttctcatgagtagcccctcagaacacctctcctcatatcttagccaaaaaactgcatgcctaaactaatcgctgccagggatagaagctggggactctgtgggaggccccatcccggtgccatagggctggtgcctggacggcatccgttgtgttagggaaagggatggggggatctgaatggattctggc

SEQ ID NO: 7257 - DNA, 1242 bp, Artificial sequence
  DNA replication origin
acagggatggtaggacagatggggtggatggtagatgggtgtgtttcaagcaagtggcatgcgagcgggcagccttggaaggcgccttgcaagtccgctcccggccacgcgcgcccctcgggccctggtttcgcacccctgccgccgcccccacgcgccctcacggaccccgcgcgccccctctccccggaccgcgagcgcacccaccgaccccgactgccccggctcgctccgaagcctccgcgctgcagttctcagctccaggagcagggctcttgggtttacgtctccaaggcaaccattcttcaggctggctgtgacgccacaaaggccgcggaggctgggcgcttgagggctgggcctgcgggccgcgggacagggagggcgcggggccgggctgctgggtccgagctctgggcacgatgtcctccctgacgccgccaggacagcgcctggcccaggcctgggcctggtgaacgcgggtttcttcctctgaggttcaacactccgcacttgggttggctcctttcatcctgattggtttattcgccacgtgccaagcactgaagagggcgtgcaggatggatacttttggagcaaaaatagccctgcttctttcctggggagggatcgcactttctagaggggcggttttcaaagtatggtctcaggactagcagcatcgaaaatgctgggaactcgttagaaaagcaagttttcaatcctcgccccagaatcagaaactcggggtggagcccagcaatgtgtgtcctgacaagtccacgcgcgaccccagtgctggctagggttgcaaagccactgctctacggagcgagcgagatccatcatagtgggacaagcgagaggatgaggccatacagaccagggcaagttttgagcgcgcagatccaccagctgcttgaagccaggggcaccaggatgtctggtcccccagctcagggatcctgtctccccacaaaaagcagcagcagaagacccctctttgagttctgaacatgttcctagattttcccagtatctatggggattgagagattgataaaggctgcttggagctgaaagcacagtcagtgactcatcttttcagggacatttaggggcttctggggggactctggagcagtctgcagcccagcaatgtagtcccagtgaggatcccagctgtgccaggctctgcctaaggccggtgtagtgggtgggaagaccacatccacaacagga

SEQ ID NO: 7258 - DNA, 1884 bp, Artificial sequence
  DNA replication origin
actgtatgcctttgacagggtgggagaggcttttcacaatgaggggcttttaacacacttttgaattttgaaccatggaatactatgcctggtcaaaaccaaattaaattccaataaaaaagctgaagggccccaggtaggcctgggcagcctccctcagcgtcgccctgtgtgagatcttggcaaatgcatgcaattccactagggcaggcatgtttcatccagggcctagcgccagctgaccacctccttggagcccagcctggcatttgtggtcagaggggtgctgagagaagctcaccttcacggtgacaccttcctcatggtctgttgtgggttgaactgtgtcatcccaattcgtatgttgaagtcccaacccctactgtctcagaatgtgatcttgtttggaaataaggtctttgcagctgtaattcactaagctgaggccattctggagcggggtaggcctccaatccaatgtgatggggtccctgtaaaatggggaaatttggacacagacacacacaggcagaattccacatgggcaggaaggctgagatgggagtgatgcttctacaagccaaagagcaccaaggattgcctgcaaagctctggaaaccaggagagaggcccggaatgggttctcgctcagagcccttggagggacctagccttttggacaacttgatctcagacatccagcccccagagcttgagaaaacaaatgtctgtgactccagccccccagtttgtggtggtgctttgttacagcagctgcaggcaatccatatgccttgtttcaagggaagtaggcagatctatgactcctgcctagtgtttggtttagagctaccttaacctgtgagggagctggacaggctccgaagctgcccctgacctctgagagtgcccaccctggcccggtacttactgtcattggtcatgttcttggagactatagtggacggtatctcagacatcttggctgaggcccaagaggttgatgcaaggcttctcctcttctaaaggagatcctcacctgaggagtgacacagtgcttgagcctggtggtccccaagcccagagcttccttccccctgggtggctgacagccaccgacatttgctgagggctcaccttgtggggacacctgccggctccctgcctctcccacccgagggtccactctcacctcctggacttggctctagctgcctactttttctgtgcttagaacacatcaatcttggcctcaagcctttgcattttcggcctcctcggccaaaaaatattctcccatacccagctgggggtgctgggcttccttctcttcaattccgagctcaaatgtcacctctttagagagacctctcaccatcccatccaaagtggtttcttcctccccacccccatgtggcctttattttcttctctgcaattcccactatctgattatcactttaaaaatccattcgttgtctatttccccctaaaatgtgagctccatgagaacaggggggtcttttctgctcatccaagctcctgacatacccttggcacttcttaacttcatccattgaatgaattttcatttttgcaggggaggaagcagagattcagcgaggtgtccaaagtcacagtcaggaggggctgcctctggaaagggcccccactctaagcttgtgccattcctgccgcattcctgctgcagccccctattgggtgagcctggggttcgcagggtcgcctcctaacacccgcgctctgcaaggccccgagccacacagcgaggtgcacagggatggtaggacagatggggtggatggtagatgggtgtgtttcaagcaagtggcatgcgagcgggcagccttggaaggcgccttg

SEQ ID NO: 7259 - DNA, 1412 bp, Artificial sequence
  DNA replication origin
ccacactccccttggggctctgctcccatggtgcctcctccgtgggctccctgattgccccagctactggaatatctctcacttctctttattttatgtgcttgttgccggtccagaatgtggactccaggaaggtaggcatggcacctccttcagggcggcatccccagccacacctgaccctgagaaagcgcccacagctgtggccaggcagatgccactctgaggaggcctggccactgtctggcaccatcactaacccagtcctgggggtggtgagggatgggacaaacatggctcctgctggtttaaaacacaggttttattattgctgtgtggtgaggccaacagagcaggagatgactgtcactggagagatggctgcttactcacagatccctaggacagaagggggtgcaccacgcagggctgtgcgggggaagctgcagggtcagccagaaagcccgagggaaagggggacgtgggcaggagcctccactgtggaatcacaggaaggaacggtgaggtgagtgagcaggtgtaggactgatttgttagaatagtttcggggttctggggcacagggctgcccctggttgtctggtcctggctctggggggatagggcagggatcagtggtcctgagagtgacagactgacagaggctgtggctggggtgtgggctctggattgggtggtttgcatttgaaaggtgtgctctgggcaagtcattttctatctccagggattagctaatccgagggggaggggagggaagggaaggtcctctaggctcaggaaggccccagaggtcaaagcatctaaatgagaagacttggttaatatgcctgccttccaggagtttactgcctgggggtcggtggtggggggtgcagtccagacttgctgtggggagtccaggtgggggcaatcacagagaaccagcaaataggatgatggtgagggtgcaggtggcaggggcggatgggtccagtgctcctcaggagacagagtctgtgggatctggtgactaggtgtggaatgagggagaagagggtgtcggggatgccttgtctcctcagtgacacctgtgcatcacagtgctgtttgctgagatggccaaggccaggggtggagcaggtttcgcaggagggggaaggccaggagctcagttggcgatgtgtaggtgtcagtgtcctgtgggaaactcccagccgagactctgaagaggctgctgtggatggaggcccagaggtcaggagagtaggcggaaacgtgagggcatcagcaaatccgctggggctggaactgaagccatgggcactggtgaggcgtctaggaggaaaggagagagaatggcccgggacacagcccaaaagactccgatggatagaggatgtttggaactcatg

SEQ ID NO: 7260 - DNA, 1234 bp, Artificial sequence
  DNA replication origin
ccctgttgggtgggtgaagatggcgtttggtgaccctgttgggtgtggtggagagagtgtgttgggtgagactcttagtggaaggtgggggaggcctcgagctaggctgggcttgagtgtagaggaaaaccgaacgcctcattggagaagatacagtagggtggccaaggcgtgggtcagagagtctctgggtctcagccagtctaggaatcacagcccacaggcccagccctggtctctgatgtggaggcctgggcagggctgaagcctgtgcatctccacccatgccctacagatgccagtgtagctgttgctgccttgggaaccacagctgtgaggaatctcagagacgctgagccctgagtcagggcgaggtgatggagtctgtggggcagcccaggtgcgaccctgggaaggctgccatgcctggcacgtggggcagggctgggtgcccaaggcagcaagagtgggctgtccccactcagggctcacagctctcagggctgggaaagcaagaggacaggctggggtgaagatggggcaagagtggggtcggtgctggcccagggatcctaggcacccggaggagcacgtgtgtgcgtgccgtgggcggctgtgtgtgggtctgacctgcaggggtccagccatagggacggcacaaggcctgagcagcagggggtgcctgtgggatgggagagggcctgtgagggctgagctgggccttggaggacccggagagtgtcaggagaggatggcatttcacgcaggcagcagtggaagtggcggcgaggtggctgaggctgttgccacagcagcccaagaagtctatctgaccaagacccaagaagagtggtgacagacgggaagatgggtgggatgctgtgagtcctgagagccaggtaaggtttccagctgattttatagtaagtggtgagctattgactattctggaatgagaaggacctgaggaaagtgctcctctgagaagggcaatgtggccactccaggaagcagtgggagcagggaagctcccggaggtgctggcgtctgtcctggatactcacggagagagccttattccgctcctgatctctgagcaagaagaaatccacatccccagataagtggaaagggttcgctgaagggtcaggaccatgttctggaaagggagacacctctctggaaaggggagccagctcttccaggcggtggtctctgtctctggggccccact

SEQ ID NO: 7261 - DNA, 922 bp, Artificial sequence
  DNA replication origin
tctccaccccactccagctcctgtgcggcctgggggtggcttcgagccagccctcccttgggagaaaactttcggaggagcaggaaggcaggactcacctccccacaccccgaccccgccccgtgtccctcttgctgtcctgttctcacagtggggacatcccctgccagctccacaccccctcccacttttctgcaccggccccgggagtctcttcacgtagactttctggggtcacttccgtttcctgctgggacctaccaggtacacaaacggcatctaagaacccaggcaaatgggtccagcctgaggcccctggaatgcacgtccccatcactgcagtcaggaaaatgtcacctactgtatcctcagggtacaaggtggcctttagaagacattgggcagctgactgagggcagggccagactgagggggaccctgtcgggagggggaggttgtgagtggtggatgctgggtgggggagggtataagtgggagagcctgccgggtaggggaggttgtgagtgggagaccctgctgggtgggggagggtttgagtgggggaccctgttgggtgggggagggtatggtttggtgatcctgttgggtgggtgaggttggggttcggtgaccctgttgggtgggtgaagatggcgtttggtgaccctgttgggtgtggtggagagagtgtgttgggtgagactcttagtggaaggtgggggaggcctcgagctaggctgggcttgagtgtagaggaaaaccgaacgcctcattggagaagatacagtagggtggccaaggcgtgggtcagagagtctctgggtctcagccagtctaggaatcacagcccacaggcccagccctggtctctgatgtggaggcctgggcagggctgaagcctgtgcatctccacccatgccct

SEQ ID NO: 7262 - DNA, 1521 bp, Artificial sequence
  DNA replication origin
agcaggatgagatctgtttgaggccaccctgcccttcttctgcagggctggggcaaaagggctccgcaggccgtctcagccaccccatttctagggcggcctgcttgtggcgcactagcagcctttctatgctgaaggtggtgggggtcttttcagtgtttttctattttctttcctacgaaacagagcccctccagggcaggcccaggcccctcccagcctgtccgggccacagatacctgcagctgtggccagtttccaggaggtctttgagcacacctgcttcagcagccctgagcacacctgcatcttcagtctcagtttgaggggctggaatggggagggaagatgatttggaaggatttggggagagaagagatatacaagccggggctgtctgggtttggcccaggtgtgtgcccctcttcaccactccactttgtagattccctgtggcaggggatgcggttgcaggccccacggaagtgcggagggtggaggtgacgctggctctgagttgggaaacaggcacgtttgtgggttcagagtcctgggagagtctcgccaaggaaacaggaccaggcctggggctcagagaggcaagaggaggggcagcctgggcagaggtgggctgggaagggggcagggaagaggctgcgggcagctgggggtggccctgtgctggttggaagctagcggtgagcgtcagatgggggctgaagcttgtcttagagaggggcaggagcactggtcctttgtttccagcttctgaagaggtaagaactccccaggagcaggggcagggggagggggaggaccatccaaggaaacactgcctcagctggcagggcagaggtacagagtcaggaccagaggcttggcaatagggagacggtagggaagctggtgccaccggcagaacaggagcaagtagggggtatacttttaagagatgcctgattaaacctgggtttgagttctttttctgtcccttaccagctagcgtagtcttggttacttaagcactccgggcctcagttttgtcatctatgaaatgggaacagtagtgcagaccttgacacacaggagcttctcaaacagaaggaatgagaggtgcagagcagcagcaccaggagctccgcttcggggtgtgaatggccatgggcggacatgcaggtgcaggacaggcgaagtgtgggacagatgaagtttctagcctggactgtgaggggcctggcagcctcccctctcaggagcccctctacctgccctggtccttccagctggcccgtaggcaagctggggcatgcagggaaggccctctgtggggcccgaggatttgctggagagcactctgggtacacaaggttggtgggggtacagggcgtgccagggcacctgcaaggagttgaggagcgtgccttaggagggaaatcagtatttgggctgactgaggggaggagctggagagcagaaggttccaggcccagcaaaagctgctgggatcaaggtgacagaatg

SEQ ID NO: 7263 - DNA, 1255 bp, Artificial sequence
  DNA replication origin
ggcccggggcgcggcccggggaggcctccgggccaagcccgccgcccgccgaggacgacagcgacggcgactctttcttggtgctgctggaagtgccgcacggcggcgctgccgccgaggctgccggatcacaggaggccgagcctggctcccgtgtcaacctggcgagccgccccgagcagggccccagcggcccggccgccccccccggccctggcgtagccccggcgggcgccgtcaccatcagcagccaggacctgctggtgcgtctcgaccgcggcgtcctcgcgctgtctgcgccgcccggccccgcaaccgcgggcgccgccgctccccgccgcgcgccccaggcctccggccccagcacgcccggctaccgctgccccgagccgcagtgcgcgctggccttcgccaagaagcaccagctcaaggtgcacctgctcacgcacggcggcggtcagggccggcggcccttcaagtgcccactggagggctgtggttgggccttcacaacgtcctacaagctcaagcggcacctgcagtcgcacgacaagctgcggcccttcggctgtccagtgggcggctgtggcaagaagttcactacggtctataacctcaaggcgcacatgaagggccacgagcaggagagcctgttcaagtgcgaggtgtgcgccgagcgcttccccacgcacgccaagctcagctcccaccagcgcagccacttcgagcccgagcgcccttacaagtgtgactttcccggtaaccgcgctctcgggggcgggcgggctgcgcggtgttgcaggcaggtctggggtgccacgtccgccccacagaggggcctgccagaccttagcaagccggggacgcaggctcttcgggatttgtattctagctccttccatgtcattcgatttgagatcttggccctgccctgccgcagggattccgatggcaggtagcgcagatcaccacagctgcgcttcccaaaggtggcggcaacagatatccttaacctgcttgtgcttgatgaaagcggcacgcatcttcacagagtggcacggagctatgtgtcaggtctttattttcctcagtctcgtcatttgtttacggggtgcacactccgtgctagaggagcagagatgaatgtggccagattcaggaccttaacacgctgggaggatagccacaggtgtgcgcacatcctggctttttttgccttttgcactttgatttccgttgaacctcacagttttgt

SEQ ID NO: 7264 - DNA, 1265 bp, Artificial sequence
  DNA replication origin
cattattgaaatgactattctttcctctactgaatggtctaggaacaatatgttttcggcataaactgatatatataatagatgtatcctattctttttaatattataatttgtgttacttaaaaaaatactcttaataataaagcattcatgtatttaacaaatatgcaccaagagtcttcctgggcacacacagtgaataggacacagttcctgggctccaggagcctacattccagagagggagagacagtgaaggagcagggaaggaactcaacaaaacaacgggtgatgagagctctaagagcaaacagatcagacagaggtgggaatacgggactgggtaagcatgtgctttggatcagaaggggcgcagagtcctcccagaggaatcagagatcagctgcgccaagtctctgaggctggaaccagcttggcttgctggatgaactgggaaaaagaggtggggtgcgggggaggggtggggggggcagcgggagagtggcgggaagtgagggcaaacaggtaggggagggtagactagcaaggccataggcgccttcgggagcaaggtggaggtgagcataatttgatgtgcaatttttagatcataaaacggtgccccgtggatgggagcgagtggagcggagggagaccgatgaccagctagtagttatttttcaggtacccaggaataaagtgcgggtttggatctgagtggtggtgaagttgaagtggaggagtccagattgaatgcggaggtgtacggtgaggtgggggagggtgaggaccggaaacagtaagtaattaagctgttgcagagtgaggttgtgccaagtttagtaggaaatacagttggaaatacaggcaggggtcctgcgtatcagggaggccccgtgtgccgagcaaggacctgggccaaagcaaacgaggtctgtgcgccagcggcggcaggcgagcttgcacttaagtgagctgggggtaggcgtccggcctgttggacaggttcgaatcctggatctgccggctgccgagtgactcgagctcgccgtccctgtttcctcacccctgggtgaccgcgcacgcttaatcagctcggacaggtacagcccctgggacgcagtcaatgcctacgagaggttgcctgttaagtgtctgaaatattaatacgattcgaagtcaagacaagcctcgtcttccacgccagcgggaacgagaaggaatcgctcagcgttgggagcctcaccccgtcccctgtcggtccc

SEQ ID NO: 7265 - DNA, 2117 bp, Artificial sequence
  DNA replication origin
gtgggaggaggccttgggtgggtgtgaagtgtcccacaccaagcgccgcgtccaccccaacactcagaacgtttgcacacaggtcagctcttattttcatttgcaaatgtccctcccgcaaatctctggagaacgtgcggctgcatggctgaaccctgtagctggcaggcagttgccagggaaagatgggctgaggccagtatcccctcatctaacagcaaagcagtccagggatggtgcacgcttgccagtggtgccctgtctgggaacctcccttttgtcatttgtcagcttgagatgaaaatggtgacaccagggggttgtggagaagagtaatgaaataaagtaggtgacacggttatatagactttcctcctactttttactggaaactactcaagattttcagaaacagtagagaagtggaaactgcaaacaagcataaagattaaaagaggaatcctacctccccaggtaaagatggctgccctttgcaccggagcccactggacttttctggagccacccacagaggcctaacaggacacagtggggacagtaggggtcactcagggcagagctggcgctggggaagggagaaaggggaagcaggttggtgggtgtgggggtggaggggagttggggggctaggaggatgctgggggtccttgtgggagtggggcactgggggcaggtggagcgggtgctggagggaaagggaaatgggggaggggccagcaaggtagagtaggtagtgggcactggggggaggggggagggtaggtggtgggcactggggggtgggagggtaggtggtgagttctggggtggggggatggtaggtggtgggtgctgggtgatgagggggagggtaggtggtgggtgctggggtgatgagggtgagggtaggtggtgggcgctgggggtgggaggaggctagttggtgggtgctgggggacgagggggaaggtaggtggtgggtgctggggtgacaaggggatgggtaggtggtgggcactggggggtgggggacattaggtggtgggtgctggggtgatgagggggtgggtaggtggtgggcgctggggggcaggggacagtaggtggtgggtgctgggagttgggaggataggtggtgggtgctggggtgaggagggggtgggtaggtggtgggcgctggggggcaggggacagtaggtggtgggtgctgggagttgggaggataggtggtgggtgctggggtgaggagggggtgggtaggtggtaggcgctgggggacaggaggagggtagatgacaggcacttggagacagtgagggtaggtggtggacattggggggcggagagggtaggtgtcaggtgctgggggacaagggagggtaggtggtgggtgttgggggtgggggagggtaagtgttgggtgctgggggtggggggagggtaggtggtgggcactgggggttggggagagggtaggtggtgggtgctgggcagatgagggggagggtaggtggtgggtgctgggggttgggggagggtaagtggtgggtgctgggggttggggagagggtaggtggtgggtgctgggcagatgagggggagggtaggtggtgggtgctgggggttgggggagggtaagtggtgggtgctgggggttagggggagggtaggtggtgggtgctgggggttgggggatggtaggtggtgggtgctgggcagatgggaggagggtaggtggtgggtgctggggagtggaagggggtaggtggtgggtgctgggcagatgggaggagggtaggtggtgggtactggggagtggaaggggtaggtggtaggtgctgggagacagggagagggtaggtggtgggcactgggggcaggggagggtaggtgttgggtgctggggaggctggtaagtggtgggtcctggacgggggcgggtaggtggtgggtactcaggggcagattgcaagcaggtggtcctgcccctttgctccccttggcccatctcccagttgtccaggtgttgttaatgtttcctccctttgatcacctccctgctgggcgccaatgcctcaaacttcaccccggagctcagggagggccctgcggcctgc

SEQ ID NO: 7266 - DNA, 1471 bp, Artificial sequence
  DNA replication origin
cccgccacccctagccccagccaggaaggagacaacaggtgtcccccgcgctgtcgaggggtcaggccgcggtggaaagcgcgaggagccaggtttggttgggggtgcgcggctcggccggcgggcactcacccgggcgcagggagcggggcgcggcgcataggagcaggagcgcggcgcccagacaggcggccgccagcacgcgccgccggcagcagcgcctccccatgctgtgccgggcgcgcggcggaggacagtccgctggatacggctgggggcggagttgcactggcccaggacccggccccggcagcgcagcgcctaccaagacgcgcggcgcggcgcagggcaggggagcacggcagctggaccccagccccaccagcccctgcgagtcgctggggactgaggaggcgggacacggtggggccgcaagcccgctcctcttttcgtgcccccaccctcacccaatggaatggggccgaagtccagggcgctagggcggagactgattggggaagcccctcgcctctgggccccgcccctagggtttgcccaggggtgccattatccacccaaggccaagaggcattgtcgcggtggcgtgccccaccccgggcggtgtccccttgcctttttgctgccttagatgccaggggcccaagggctgatctgggatgaaccaaggagcctagtagagcgttgccctgtccatggctctccgggacccccgccctcagtaagaggcctaagagtgtccctccctccccgacccaaggctaccctgcagccttgctttcctccagggtctccaggtcctgcctgaatctagctcatgcaggtggcactagcctttgcacagagaggtagggtctcagcttacatcccccggggaatggagcttgtgcctcatcgtgtcacccacaacttctctgggcaccacgtgagctctgaggacttgccagggactgtgtgtgtgtgtgtgtgtgtgtgtgtgtgtgtgtgtgttggggggtggagggggcgaggtgagagtaaagtccagcctttgaaagacacacacatccagctagccctgtgggcaggagcccacgtctaaccgcagggtcttgctgcccagaagtcaggctagcagggaacgggagggtgcagctggcactgggtgcgcggatgagtgcgttggaaacaacatttagcagtgtgagtgcatgggatagggtactacattacactgtaggttttttttggagttttttgtataaatgtaagggacacaagtgcaggtttgttacatggagatatgcagtggtgaggtctgggctttccgtgtaaccatcacctaaataatgtccattgtacccattaagtaattcctcatccctcccacctcgctcactctcctacccttccaagtctccagtgtctattattccacactcgaagctccagttgttaaactgttcttgaaaaa

SEQ ID NO: 7267 - DNA, 1496 bp, Artificial sequence
  DNA replication origin
cggggcccagaggcgaggggcttccccaatcagtctccgccctagcgccctggacttcggccccattccattgggtgagggtgggggcacgaaaagaggagcgggcttgcggccccaccgtgtcccgcctcctcagtccccagcgactcgcaggggctggtggggctggggtccagctgccgtgctcccctgccctgcgccgcgccgcgcgtcttggtaggcgctgcgctgccggggccgggtcctgggccagtgcaactccgcccccagccgtatccagcggactgtcctccgccgcgcgcccggcacagcatggggaggcgctgctgccggcggcgcgtgctggcggccgcctgtctgggcgccgcgctcctgctcctatgcgccgcgccccgctccctgcgcccgggtgagtgcccgccggccgagccgcgcacccccaaccaaacctggctcctcgcgctttccaccgcggcctgacccctcgacagcgcgggggacacctgttgtctccttcctggctggggctaggggtggcgggcaggggcgctggtgaggcacagaaaggctctagacgcccccgcgagcaaaggctcttgctcctcctccggagttacctccccactcccagagcggtgactgttttgagtcccacagccggtgcctggagaccggggtcagttgtggggggtagaggacaattggccaatccgggaaggccatctcccttaccttcacccccttcccctgcgcaccccacggcccctggacatgagcgctgctgggcgcatgcgcataggaggggaagcttgggccactcggtccggtcccttggttgtcctactgtgcagtgggtgccactccctgctccaccctgaaatccacactgggtagggcttgggactcctgtgcacccactcgtggtctggctggggaaactgaggcagttagtcatgactccgcagagctgagtgccctgggctccaccggtgctgagtctttgctctgagtctctcctcagctcatgtgaagcctcccatcaacccatttcacacaatctgaagcgggccagagagtggggagacaggtgtggtggcaacgtgctggctatacaatctacttgggactggaggggcccagccagcgcccgggtctcctgacctcagggctgtttgcctttccttgtatgtggtatgcgtgctgggtgggacgactcagtccgcctccccacccccagtgtgggctctgagaatcctgggccccacccttggaacctggcagacacagtcccagggagtaagtaactaggtccagggtgggcggggatgttgggcagtgggggtgggagtggcccaagacttgaggatatcagggcctggggaggcctctgcccactccccctgaccctcacactgccccttgccccttgtgtgtccagacacagcaggtcagacctggatgcctccccaagcccatgggatagggctggggtgtct

SEQ ID NO: 7268 - DNA, 2399 bp, Artificial sequence
  DNA replication origin
gaatggaaagaaaaaggatttggggtttcagctgggatttaaatcctggccccatacttcctgacttgagcaagtaacttcctctctcttgatcttttcttttctgcaaaataggattgccaattcctgttctgcagagccacccacctgccagcttgcctcttctcacggtactttctggaggtcctctgaactcgggacactccagcagtacctgaagatggacagcagcatggggagcatctaccaatttggctccagcagccacttcccctccctttgcccacccaccagaggaggatgcctgccaggccttcagcccatgtgattccgataggctcccctacgcctccaccacctgctgggataggcatgtggcctaggcctgtccaatcacagcctcccagcccttcctgccacctgactggctcagagacgggcacttgagacccagaccgggccaatggatgcctccttgggactttggctggaatcagtggcaaaggaaccctctctagctttgggttggagttgctgaactggtgcagctgagagtgaggctatggcagagaaaagctaaaccacagctggaggtgtgatctgaaccccaagatctatgcctgtccgaggcagaggcacctggccttttcagtcacaggcacagacccactccctcccagctgaagggagtctgaattgggttgggtttgtcctcgccgaggctaccactgtgtgccattgggtggcccacagtcttagcttccttgcctgcctaggggtgagcaggggctgggatgggatgcagaggcccacctggctccaagaggaacacctgtgactccaaacactgggacagatgctcagccctgcagccgcgggagtggaataggggaagggggctggtgccaacactgctcccgccggtgtctcagaggcagaagacatagagctgagatcttgggttttcatattaaaaatgtaagctcctcgaggcaggggtatttctaagttttgttccccactgtctcccagtacctgcacgagcagacaaccaacaggtccgtggtccgtggtgtgccagccacgggaagcatggtcaccatgcccaggcaaaaacacagagggagccaagggggccgcaggagacccaggggtctgccattgggagctgccgctgggcactggggatgagggtggggtgatgagggcagcagtgctctgggcagctgccccaccttcctggaatctcctcctccctgggaccctaagcagtaggccagtgcaggtggtggagccctggggctgaggctgtggctgtggaggggctgccgcagacctccccctactagaatgtctctgagctccctggggtagcaagagccccaggcctgagccagtagcccttcagtggccccttgcccaacttacggcagcacctctggctctggagaaggaggggacagtgctgggcctcttgctctggagaaggaggggacagtgctgggcctgccctcctgggagaaggggctgaaatccctcctgagttctggagccctcatccccaggccagaagccctcacagggcacagaccacatcccttccaactcaggcatggctgcagagacactgcaggccctcgtgaggccatttccagaggccaagggcaggggatgcccctccagcaggactagcctggcaggaaaaggcctttcccagctgagtgccctccctgtgtgccacctgcaggcccacaagcatagtctcagccaaagcttcagctcagggcttgggagagagaaaagccagtgtgagaggctggataggttggtctgattaactcttgctcgcccaaggtcactcacaaagctgtgatggctggagacaggccatgggagaggtacaagagcgcttgacagaaacagagagagatgctgagatgctgggtgaggtcatggccaagagcaggacaggccaggtggagagcccagcctgcgcagaggctgggaagggaggttcggagccgtcctcctaacacctgctgtctcttcccaggctctgcaggagagggagggaggtcagaaggaacaaagcccagaaggtgactagtaccttggtttgtttctcatccctcaaacctgggtagagtaggtgacaggagagaggtgtcccacggagacatggggacgcagacactccatgcagtcactcaaagatgtatgctcctttgcagacactccccgggacccaggcactcaggtgtcctctaacatcccacgctgagccctgaggggccagtagccaccaagttctgccctgtcttagtactgggtaaacatctgtctactgaatgactcggtggacagaggctgtggcagccacagacactgagtccacaccc

SEQ ID NO: 7269 - DNA, 1598 bp, Artificial sequence
  DNA replication origin
gaaggaatagatggcagctggacgggccttgcactggcctccagaaccctaaagcccattgtccagaaccctgctgcgtgtaactgaagcccactgtccagggtcctgctgccccctgcctgcctcaggccccctctgcgcccaggccacatcctgtaaggcccaggaacaagggccagactccagtggccagggcatgcagaggaggctgaggaggttcagggccacctgtgtctccaggccactgaccagcccagcatttgaccttgcgtctccagacagagtcagagatctgaactgccggacatgtcccaggaacgacaccgtcatcagaaaaggagctgacaggagagggcagcaatgttggctggtcatgctggtgcagggagacccaggctgggtgtggcctgagtctagcagcaaccatggggagctccgctggtgccacaccaggcagggcagggccaggcaacccatgagaggaggccaggccttctcgccgtgttgcagatgagacgtgtccctttcctgggaactgtggctggggactgaggaagaactggtgctcagcagcctgtgttctgtgggcagggggtggaggggcagttgcagtgactgagaagccgacccaggcctgtctccgccccagggccctgctactcggaggctcccagccttccggaaacgccagcccttgcataaggcctctcatttcctggccagaccacagcctgctggaaagtgggtaccataacagcccccaggggccagtgggtagaagggaaaagggagcaggtaccagagagaggctcagaatagctgtggccagtgattacagggctgggccgcctccatccagccccaccctgcctgccaccctgccccgaggagcctgggccctgcagacgggcaggctgccatggagggacagatgggcacaggaggtcagaaggggggtatcttgaggatccttgggtccaatcctgacttggccagctgggggctggccccaaacagggccacactggggcatccaccccctccacccccatcatcccaaactcccttgtctgtgtcctctgtacccccgtccctccactgggccctaggtcccaggctccctgccaccccctgccaaggggacagaggagcagacagaacagggagagccaggcagtgtagcccaggagggcccatcccagagcagcacagggaaagccacgcggtgactgcttagaaaaaggaaacaaaaccagcaggaggttagggagacaggggagagaagggggacaggatgatgggaggggaggagggatgggaggagtgccaaaaacaatgacagagacagggagacagtgatggacgacagggcccgaggctgggagaaagagaaggaagagacagaaggagacaaagcatggtggggactgcaggccccagcacagtgccgggtgcttagtgcacactgacatgcttacccctctcatgtagaaactatctttatcccacttgacagagggggaaactgaggcaaagaaacttgcccgaggcctcacagcttccttgctgtgccagaaacagaatttgaccccaggcca

SEQ ID NO: 7270 - DNA, 1250 bp, Artificial sequence
  DNA replication origin
gtgcactgctgagtgggcaaatgtatgcggccatccatgcaatggaatatgactcagccatgaaaggaatgcggtgctgacacatgctgccacatgggctgacctggagggcgttatgccaagcgaatagtacagtcacaaaaggacgagtgccaaacagtcccacttagtgaggtccctagagcagtcacatccagagagaccaaaactagaacctgagtgaactgtggaggactgctgatagacactgggctgctgatggacactgggctgctgatggactgacactgggctgcttttgagggtgatcacaatgtttggaaattagacagcggtgatagttacaaaaccttataaaaatgctgcaaaccaattgtagggtttgaaagagttgtatggtatgtgagttctcagttaagaaaaaaggcttcaggtgtttccatttcagaggaggccaaagcggcctttggaggaacaccagagccagggcctgcttgggagggtctgacgccagtggggtgggaatgcgtgtgtgtcctgtgcgtgtgtggtgcacgcgtgtggtgtgtgcctgtggtgcatgatgtctctgtgtggtgtgtggtgtgcgtgtgtgtggcatgcgtgtgtggcatttgtgtgtgtgtgtcatgcgtgtgtggcatttgtgtgtgtgtggcatgtgtggcaggtgtggcatgtgtggcgggtgtgtggtgtgtgtggtgtatgtatggtgtatgtgtggtgtgtgtttgtgtgtgtgtgtggtgtggggtgtgtgtgtgtgatgtgtgtggtgtgtgtgtggtatgtgtgtttgtggtgtgtggtgtggtgtctgtggtgtgtggtgtgtgtgtgctgtgtgtgtggtgtggagtgtgtggtgtggggtgtgtgtgtggtgtggggggtgtgtgtggcatatgtgtgtggtgtgtgtgtggtgtctgtggtgtatgtgctgtgtgtatagtgtggggtgtgtgtggtgtgtggggtgtgtgtgtgctgtgtgtgtggtgtggagtgtgtggggtgtgtgtggtgtggggtacatatgtgtgtgtgtgtgcagtgtgtgtgcggtgtgtgtggtgtgtgcatggtgtggggtgtgtggggtgtgtgtggtgtggggtacatatgtgtgtgtgtgtgcagtgtgtgtggtgtgtttgtggttgtgtgtgtgtccatgtacgctcctgcacacatgtgcacactatgctcctgatgcctttcaa

SEQ ID NO: 7271 - DNA, 1206 bp, Artificial sequence
  DNA replication origin
tgcgtgcaccgtagcgcctctggaaggcggcgctgtaggggcgcgcgagcttgttgcggtaagccgatgccaggcgctcgaagggctcccgcacgaacaggaaggccaagtaggcgcgcaggcgccggttgatctcggcggggctgaagtcggccagtgagggcaggcggccaggcgcgtgcgcctcttgcgcggagatggcgcgcgggtcgccgcgggcttggccgctcagcgccagcagcacgcgcttccagttggtgcaggccaccttgggcacgtagcagtagagcaggccatgcgcgtcgtccaccagcacgtgccgcaggtcctccggctgtagcaggcgctgccggcgtgagtggcggctacaggcgctgttcagcaggtcgcgccgctgccggtgcaccttcgccagggtcgagcgcgggtcctgtgggcgacaggagacgggacagggggacgcgtcagggcagcgcgggctccctgactctggcgctgccccggcgggatgcgcccgggaattgggagcaggagctgcgccgggcacccaaattcgaaccccagggctgtcactgatcactgtgtggtttagggcccgggcatctgtcctgggccgagatttgggagaaacggattctgactttgctgaggctgggagaaggacgcgctgggtatgtatgccgtggggcactcagaggaggagtgataaggaattgtggcatcagagtgcgctccgtgtgagtacgggcacacatggactcttcaatgtttactaaaagcaggaggctgcataagaagcagcgctgtttaattccacacccaattgaaaactgcagccgcttgtgggctgtcgggctgctttggctcaataataaatgggctgattctgtacttaccaatcagcactctcctttgcaccttcactccttttattcccccagcaaattcttatctcagcgctgggacaggaagcctgccccttctgagcctgtccctcctatgagaaggaacaacgactggctttaacctagcacctgctgcgggccagcagcctcaccgctctccgaattaggtccggagcccctcgcagcctcagccatgtagagacccaggccagcgcttccatgcttccagctcccctttcttcagatcactcctgccccacccggggttcttatctccaagattaacacccctgcctatgat

SEQ ID NO: 7272 - DNA, 1527 bp, Artificial sequence
  DNA replication origin
accgcgtacccagaacgagatgcgcgcacctgaggggccacgggctgggaggccgggcgcaaattcaagaaacgtaaaaactaagccgaccggagccaggacgtggccagggcgtccctcgtgtcccaggggcctcgcacctgtacagttcttcactcctccttccctgaagcccatgtcgcgaagctccaaggctgccagcctcgggctcgcgtctcggctcagcctcttcctggcctgagcccccggagtctcccaagccccacgcccctcacgcgtggaaagagccccggccctgcgctccgccccgcacctcccccccgcgcccgcggcctccacgcccgccccggcccaggcggcgccgctcacccggacaccctgcagcacccggacccgctcctcctcgtccactccgaaggacaccctgcggccctcgctgctctccgtgctccccatggcgagatgccgcagggccggcagccaccagacccgagacccggctccagagcaaccgggccaacaacgctttccaggactcgcgcggccgcggcacacgccaacaaagccacgtcctattggccgacgccagaggcttcaccaatcgggtggcgctgagtcgcggtgccttgtggggattgcagtccttccgtctggaggggtgggggcgtggcggtctgtgcctgctagagtgcgttaggctgaggccgaagatgtgtaccggcggaggccctggagtggagggctgggtgcaggacagggtcacgttctcgctttgggagctcccccttgagggagagccaagggtgatgttctgaggccaggagacgccgagacggccaaggcgctcatctggaggcgaatttctgagggttcactgctccattcattcagcaaacacgtgtagagcagcacgggctgagcgccagacgagcagggacctggccctggcattacagcgcccctcaagacagcgagtgtcctgcccttgagaggtttacagtgcaaggggaaaacaagtgaaaagccaaacacgcacgcaaggaaactgactgtaatacacggaaaactgcatggcgatgccactagtaaaatgaacagaaggaggcctcttttaatttcagtggccagagcaacctctgaggaagaagctttgaactgagccggcgggagagtaggatttatgtagaaaaaggtaggggaagaggtttcctgggagtctcaggcaggaaaagagaaagaggggtcatcccatggctggaaagtgagaagagggcagaggagtggtgaggacccaaatcatgtcgggtcttgtgaggcagggtctgagtgtgggttttattctaaacgccccgggaggacagggaatggtcctaagccgttaggaggcattgcccaaggagtgtacataccatgtgtggagtgcagtgtgccaggcattgtgtgtaggcttcttacacaggaccctatgtgtaagggagcacacagacggttgccagtcatagacactgctaccttcaaataagcccc

SEQ ID NO: 7273 - DNA, 1203 bp, Artificial sequence
  DNA replication origin
tgcacccagccctccactccagggcctccgccggtacacatcttcggcctcagcctaacgcactctagcaggcacagaccgccacgcccccacccctccagacggaaggactgcaatccccacaaggcaccgcgactcagcgccacccgattggtgaagcctctggcgtcggccaataggacgtggctttgttggcgtgtgccgcggccgcgcgagtcctggaaagcgttgttggcccggttgctctggagccgggtctcgggtctggtggctgccggccctgcggcatctcgccatggggagcacggagagcagcgagggccgcagggtgtccttcggagtggacgaggaggagcgggtccgggtgctgcagggtgtccgggtgagcggcgccgcctgggccggggcgggcgtggaggccgcgggcgcgggggggaggtgcggggcggagcgcagggccggggctctttccacgcgtgaggggcgtggggcttgggagactccgggggctcaggccaggaagaggctgagccgagacgcgagcccgaggctggcagccttggagcttcgcgacatgggcttcagggaaggaggagtgaagaactgtacaggtgcgaggcccctgggacacgagggacgccctggccacgtcctggctccggtcggcttagtttttacgtttcttgaatttgcgcccggcctcccagcccgtggcccctcaggtgcgcgcatctcgttctgggtacgcggtgtctcccacctgggctttgcctggggactcagctcttccccgccggcctgttctccacagcacatctgcggggcgcaggaagaaccatagctcagatctgatccccttccttgcctgaaaccctccagtgggttcctagcgcgcttggatgatgccttccctggttccaaagctggccgctgcccgtcgacctctggggactgcatccctctgggactgcatctcgtgccatttccctcgcgtggcacccgcacctcgtccccagcctcaggaccgccgtgttttcctggagggtgccgctggctcagctcagggtctgtgcgccggctgttctctctccttcagctctccttaaatcccgctgtttcttgtaattcttgttgtaattcagatatcaccagagaatccttccctgaccacccaatctgaagtaacctcccaccccgcgtcca

SEQ ID NO: 7274 - DNA, 931 bp, Artificial sequence
  DNA replication origin
aggtggtgatggaggaggaggaggaggtggtgatgatggtggaggaggcggttgtgatggtggaggaggaggtggtgatggtggaggagggggaggtggtgatggtggaggagggggaggtggtgatggtggtagaggggaaggtggtgatggtggaggaggaggaggtggtgatggtggaggagggggagttggtgatggtggaggagggggaggtggtgatggtggaggagggggaggtggtgatggtggagggggaggtggtgatggtggaggagggggaagtggtgatggtggtgaagagggaggtggtgctggtagtgaagggggaggtggtgatggtcatggagggggaggtggtgatggtggaggagggggaggtggtgatggtggaggagggggaggtggtgatggtggaggaaggggaggtggtgatggtggaggagggggaggtggtgatggtcgtggagggggaggtggtgatggtagtggagggggaggtggtgatggtagtgaagggggaggtggtgatggtcgtggagggggaggtggtgatggtcatggaggggaaggtggtgatggtagaggagggggaggtggtgatggtagtagaggaggaggtgatggtggaggaggaggtggtaatggtggaggtagtgatggaggatgaggaggatgaggtggtggtgctggtggtggtgctggtggtggtggtgttggtagtggtggcggtggcagtggcaggggcaggggtgggaatggaaatcttttatgaagtgcttactgagagctcctcctggataaacactgtgagccatctcatttcttctcataatgatccgaagtagaaactttatatagatgaagaaagtgaagttcagtaaggagtaaatcacttggttgaggttataacggttagtacacacgttgg

SEQ ID NO: 7275 - DNA, 671 bp, Artificial sequence
  DNA replication origin
ctcccctcggggagtccctggcctggcaggggagatggcctgagaacccctaattacattgcagcagcagcagcagcagcagcaggctgccgcggaaacagggaggagaaggaaagggagcaggcctttctagggatggcacagagggagagcaggccagcttcctgcagcgagtgctgcctgcgcccggggcggaagctgaccagacgagggcagggcgggccggagacccagcagaggggatcccaggtgtgagggcagcaggcagtggaggagagcaaaggtggtcaaggcaggcaggcggcgcggctgcagaggcggcaggactgcagtgcagcaggctgagttggcactgtctctgagtgatgttgctccggctgtcaggtggtgccagggagacaggactcgatgccagggaacatcaccagtgtggagggccccgcacagctcaagcccagggcgggttagtggggctgattggcaggactgaaaccgactgagcgacagaagaggccaggtgactttgaagtctctgacttgggtgttgggggttctaaaataaggaatgcagggattgaggagggcagatgacaaagtgggtttgggacatgctctgcctggttggtgtccaaacactggacttccagtccttgtcctttagccacgtcctc

SEQ ID NO: 7276 - DNA, 1525 bp, Artificial sequence
  DNA replication origin
agcatgaatggggcgccgagcgccgcgcggctgcggaccggcctcgctctcgccgcccgcggagccccgcgccgcgcgcatgcgccgcccagagcccgggggcggggcgggggcggggccggcggcggcctccagagggcgctctgccccgcgccgcgcgcctgcaggggcccaccgcgcgtcttcaaagggcgatacggctgcccgcctcaactctctgggcgccggggccgcgcgggcagttccgggagccccccgctctcgagcgggctagcccgcgaccccaggaacagggcctggctcagtgtgcccaggctaggagcatggcctcctttcacggggggggaaactgaggctgaaggaggcaatcgcagttcccagaccttgcggggccgggtgttcccagctctcggcctcgcgcgttccgctctgtcagatgggcgggcacctgcgcggggagcccgggcgccccctgcaggccccaggctggtggcgcattcccggctggggacgcagcccagggaggaaagtcccgcggcagaggcgtggcgagacgcgaactccggctgtagcgtggggcagcggatctacacggtgtgaggtgtggggctgcagaatccagggtgacgggccagagctgtccaggcaatacccccagcctgcatggcaaggctgaggggcagacacccagcactcagttactgtactcacaaccgccactcccaggcaggaggcatccgggagggcctcccggtggacgcaaccaggccaaggaaggggaagccggcaacaggagcatcgataacagagcagatgggccaggaaaaccccgtcgtgggagggctgagtcccggctggggacttggcccccatctgtagcctgaggggtgcggtttttgctgtgtgaatcacgtcacccctacagaagaggaactctctacagttcacatggttaacagggaaagggaatggactcataccgggcccaggtgtccctccgcgtctcaccccgctcctccctccccaggagcagccacaaccctcatttttgtgttcatctttaagtgcttttctttgggtgtgacctcttatatttgcaccccagaatgggacgctgttttgggtggcttgttctgggcattacagaaacggggtcactcagcctgtgctgtttgctctgtctgctctgtgtggtgagggcacagggcagctgctcgcaggcatcgtcttcgcagcctgttttgttgggctcctgctcgcccattctcctgccgatggacatgggattgtcgcctatctggagccatgatgagcaaagctgtgatgagcatcctgtgtgtgcctctcggtgggcacctttagatccagggacggtctgcagggtcacggggtaggatttgtctagcttcaggagatacagcaaaaccgtcttcccaagtgacagccccagtttacactcccagcagcttagcaggagtgtggaagggtctggctgtcccacatcctcaccaatatttggcactct

SEQ ID NO: 7277 - DNA, 2032 bp, Artificial sequence
  DNA replication origin
gcggcctcccccgccccccggccgggcccgccgagccccgcggcagctccggggtggcggggggcgggcgctgcccctccacggaggctggggagaaagtttgcggcggccccgcggggaggcccctgcggtgtccaggcccgtcccggccgctggacctcggctcagacctctggccgcgggcgaggacggggtggccaggcccggatagggatcggagcctcccagcagggccgcgggggccggaggaggtcgtgcaggctaagcccccggccggccctggggcgcggggtggaagttggagcggcttcccgaccacagctgccaccgctcccactggcccggagtgcggggaggtgggctctgggtgccgcccaggaggccgccccgctcgggcctccttggcctccccctctcggggcctctccagggtcagccgcttctcccggaggcttccgattgcttcctggatagtcccgggcctgatgtgcggcgaagctggaggcagcgggccgatcccgggctgccaggggaagggggagtggggactccagggaggcccctcggtcggcgtgaggtcccaggtgcagccctggaaaggaggggaggggctccgaggggcggccccgggcggcgatctgccccaggctcctgtgtggggttctggggccacgccccttgaaagaaaggggtgtgtgtgccggggaggggacgtggtcgagcctctgtcccctcagcgcggctcctgtggctcaggctgctccgtgctgccccatctcctttcacacgtagccggtttgggggtcggtgcagggatggggcgcagtttctgctccccgggcccttgaggagcttgcctcaggtcccctcgatttcctgcggcttggggtgtgcggcagaggccaggtgctgcaccaggggcaccaagatgctgcccggcccttgaggagcacccagccccctgccagaggcaggcatgtgaaccagtgattcgctgcagggccaggcttccattcctggggggtgccagtggggcccaggaagggcgttttgggcagaggacagcatgggcggaggcctgggtttgtggcctcagtgtgtgctctgggggtgggggacacatgaggtgcctgtggacaaagcagacagccctttgctggactcctggccccccaaggtcgttgcctgcctgttttgagcccccaggaaagcccccgtgcacagagcagcttagagcagctggccgggaggagcgggtgccccaggggaaggcctgcaaaggtaggcactttttctcaggagcaggactccaaggccttcagagccggatcccctaggactggtcgggagcagaaccactgggaccacctcccatgacccccgttgtgggggaggcggagtgccaggagcagctgtcttcccccccggctgctgttgtgagccactgggcaggatggcagccccacaccccaacctgcctgagccatagcaggatctggcgcaggaggacttggggggattggactcttccttgtggggagggctttgggggcctttgtttctcagggtgagaaggagctttggtgtcactcaggccaggaaagggaaggggacactgttggcttggcgttccaccaggcggcgatcccctcctgtccaggagaggagcccctgggctggggctcctgcacgcagaccgcggggtctctctccgcctctctctccctggctagccccatcggcatcccaaggccagtctagcctcccctgccctggctctggctctgcctcagcctagaacagctctggccatgccggagagccacagccgttcctactgccctctgcacagccagtgtttcccaccccaggcctttgctcctcctgttctgccccccacccccaccacgaatgcccaccctcctgcaccagctcccaggctacctggtcctctcttgaggcctttccccggccacagtggccagctctgctcctcggtagagtgcagcatctgcccatgctcccctcctag

SEQ ID NO: 7278 - DNA, 1540 bp, Artificial sequence
  DNA replication origin
agggcggggagtggagacaggggcacagaggcctgggggaggggcaggcagccccacactgcatgtgggcaccaggcacagaggctgatgggactgtgcccagctccctggtagacttggagaaggcatccatcttcaggcctcagcttccccatctgtaaaatggggccagaccatacaaggggtgtctgggatggtctgtgcaaactggctggctgaggcttgaactcaagactcaggactcagccttgctgtagccggctccagccaggagtgggtgagaggccccagcacatcaggcacatccagggcagcaggccctactgacaaccaagggggtggcactgctgactatgccttgtgggcaggtgtgccctttcctctttcatccatgagaaaagagctttcatgccccttttgcaaatggggaaactgaggctaggaaaagggagtgtccccatcagagtcatctgcctacagagtaacagggtctagatttagcccagtgcttggctgccagttgctaggcagggtgtggtgagacttttccagaggcagtggaggccaggacaggatatggggactcccgccaggatctgggcagcgctgacctcgtgtgcaggtcagaagagtggccttagcctctgcatagggacctggctgtaggtggttgtgggtggagggagccgagtaccctggcaatccaggaaggaggggtgggcattttgtggagtttggggtggagtcaatggaccttggtagtgagtgtgaccaggaagtgagggcccgatgtggagcaaggcaggagggggccacacaggtctgggtgggtatggggtgctgaggctgggaaggggtcactgtggaggggtggagtgcagggagcacctgccagccttccctgtggaggaattcctctttccttggagttgggtgtgaggctgggagcaggactggtggcttggatagagtgctgagagtcagggctggtgggccagggagcctgggaaggggccgtgtggcggggcacccgtcggctggggtggggatgtgggtgggacacattgcctggcttctggactgcaggtctcaaggtttatccagcatggggcttggggtcccaccgagagcagcccaggctgccacctatccacagtgagaactgctgcctgtgtggcctgggcctccatgtcctccgtggtgcctctgctgtgggctgtcagggcgtgttcgggggagaggcagggctgtggaggtgggagtgagcactaaagcccatctatgtcaagcttctgtaggggacggtggtggagtatgtccccaccagcctcaggcagggagctggtgcccaccctgggagtacagagctgtggggagggtcctgctccccagtgcatagggaggctctgggtgaaggctgctctccaggttggtgtcagatgttggtgtcagctggggtcccattccacacctcaggcccttgtcacctgccttcctgttcctggcctccgccagtgatggcagggcacaggtgccaacg

SEQ ID NO: 7279 - DNA, 805 bp, Artificial sequence
  DNA replication origin
ggctcaggggagctgcatcggcaccagcctctggtgccggttatgcaccccaggacccaccactgcccactgggcctctggggtgtccaagtatccccacccttcagtctctccgggagcttcctccacaccaggccagcctggtgcccaccccagcccaggcagctcccctccacccacaccctccaggaagctctgcactgcctctgtccagcccactgttctggggaaggaaaggagaaccctgaagaccagacagccatccctgtagcacctagccctccccctgccaccgtggggccagcccagggctgtgtgctggagctcctcaagcaccagccaaagacaggcaggggcactacccttgccctgcccttggcccagtagaggggctggggagaggcagggccaaggcctctggcccggcagagtgctgaggcagcagacactggatctcctggctggggagcagggcccagaggggagggggccgcgcaggcctgccctcaccacccacacacagcagcctccccaggaggtcaagtgcccttggagagccagcccccgcctcagcatccctgggcccctgcacaggctcctgcgtggtctcaaagtgtccttgcttagtgggcctggggccagtcatgggcagaggcacagaggggagtggggcccttcaaggtcactgggcctagtgtagggcaacattccccctgccccctgtacgccagatctagcctcccacagcatacagcagcactgggcctgccacctgggacggccgcaagcctttgttcctgcccca

SEQ ID NO: 7280 - DNA, 1133 bp, Artificial sequence
  DNA replication origin
gcagtgcagagcttcctggagggtgtgggtggaggggagctgcctgggctggggtgggcaccaggctggcctggtgtggaggaagctcccggagagactgaagggtggggatacttggacaccccagaggcccagtgggcagtggtgggtcctggggtgcataaccggcaccagaggctggtgccgatgcagctcccctgagcccatgtgtgcccgcgagtggggctgggccgggggctggccagggcttgcagctctcagcccggtgcccagtgttaggaagggggcctcccatctctgccatggtagttgccctgggagtggtggggagtcctgcccctccctggctctgtgatctctgggaggggatcccctgcagcctcagcttccctctgtgaaataagccagatgttcaggctctgggctgggggcggggggtgctggtggtcttggggcccgtgggggcccagctgctgattgtaggccccccagggtgggggtgccctggggtcctgctggttctgctcatagtggctatgaggctgaagctgatggggaaagtcctgtgacccctgagttgggtcctctgctgtgacttccctcttggcccccatgtggggtaccgccctgtggctctggtgcgaggcccctcccgtcctctcagcctgcactccctctcctcacactggaaggcacacagggctctcgagcgcatggggtgggtgttggagtgggttttgccagacagaggaccgtgcttgtgtggaagcccagtgcagcagcttagagacattttgtggggcgccccagagcctgttacccagccagtgaccaggttcctctagccctaccctgttcctgctgcccagcactcaccctcttgtgccccaggggcaccgtttgggtcagagctttgctgagggagcagcaggacacagctgttcctctgggtgccagttggcctgtctcccctgcctcctcaccccagtcccacagagggaaactgaggtacagaacagggaactgcagagttgggcttgggcccatctatgggaagaggctgcttctgggttgagattctaccaactcttccccttcttcctgcccccattccttctcccaattttcccctt

SEQ ID NO: 7281 - DNA, 1031 bp, Artificial sequence
  DNA replication origin
cctccacgtgtgggcacctccttagctgctgccccggtctttgcctgtccccaccttgtcctgtccttctcccagccctggggcccggaggcagctccacaggtgcatccccgcctcacagaaagagggagggccaggcccctggctgccatcatggggcaggcagagttgggcaactccccttgccaggtcagggccaagccgggcagccccctgcctcccggcggctggggcgcgtgccggtcctggcacatagcctgggtggcccagacatcctcccggcacccccgcctgccctcagcccggagaatgggccctttgttggctctgggcgggatggacagctgacctggccgggccctcagctgcccgccggcagcagttggccagggctgtggcggtgatgggagtgggtacagccagcagggccagcctggggcctgcattgagccctgcctgctgtgtcctgggggcaaaggggtgaacctgctccctggcctatctgtggggagggtcagatgagccctgtggtggtgggaggtgctcagtccaggagtgagggccatgcctggcgtggcctgggcactgagaggcctcgggactgcacttcggtctcggctccgagcccagggtcgactcgcccgtgtgcatgtaggacaggtaccccagggttagatggtccaggcagaagcaggtgggggcatcccgtgttccgccagccaggggtgggtgggggcctggtgcagccaaggggcatatccagggaggctgctggctctgctgaagccccttgggtcaaggggagggtcctctcaagcagggggcggcatgcatgggcagcgccagctcctggtttgtgctgggaggtgggagggtgggctgttggggccagttgtggaaggttctggtggtctttggggaaagatttgcagagcaaggaggtgacagctgggggaagattccagggcatgcctgtggcccgttcccatgcccgggacacgtcaagcctctcatttgctctgccagctgcc

SEQ ID NO: 7282 - DNA, 1810 bp, Artificial sequence
  DNA replication origin
gacgagccccagcgctttgctgcggacctgctgcagtgtgtgcagctgactgtgcagccccgcaatgtgtctgtcaccatgtcccaggtcccagtaagtgtggcaccccaggtggtaaggggtgggggacagccatggggaccctgctcaccatgcctcctgctgcctgcccagcttgtgctgcaggcctggaacgtgcctgacctctcagctggcgtcaactgctccttcgaggacttcacggaatctgagagcgtcctggaggatggccggatccactgccgctcaccctccgcccgggaggtggcgcccatcacgcggggccagggtgagtggccccaacacaatggtgcccgctgcctggccaggtccagggctgcaatccagttgccgcctgtttagcgcctcccttgttcagttccaagggcatgttggtgacactctgacagctgatatgggtgggggtctcaccacctgctggtctgggagtggagaaaaccctccaggcatgtagccagagtgagagccttcctgccagggaggtggacagcggatacatccttcttaggatttatcttatgggctcaccatacatttacagtaggaatagccatagacacatgagcatacttcacctccgctaccataattattgccatccctactggcattaaggtctttaggtgtcccatggtgacccagagggtggaagagcagggcagggtaggtgggatgaagggaccacatggcggagacctggggtcttgcggggggctgcaggctgaaggtgggagtgggtgaggggtgggctatgtggggcgcaggttgggtgggggacagtctcatggggacttggggtgcaggacccctctggctgccacagcccgttggacagtcgctctgcaggcccttccacaggagcaggcagcctgggggcctggggagagtctcgcggttctcaacccctcacactgagcaggaggcaagcagggcagatcccaggccctggtcacctgggggctgagggggctggatgcgtgtttgatgcgactgatggtggcagctaggagggtctccgggcaagttgttcccctgtctggacttgccctgtgtgggagtcctgggcaagcagtcctggtgactcagccatgctgctcgtgcaggagaccagcgggtggtgaaactctacctaaagtccaaggagacagggaagaagtttgcgtctgtggacttcgtcttctacaactgcagcgtccaccagtcgtgagtgtctctaggcccctccgcccgcctgggcctgggctacttgccccactcccgtccctgtggtcccactgtgcttgctgtctgcagacctgtcctcatgtggccaggcagcagatggtgattccatgattggggctcctgaggctgggcggtcagggagggaggagaggccactgtgagagcagcttgcaggtagaggagccagccagggcaaggccatgagtgcagagggtgcctgaggctggggcaggcgtaccaggaagcagcagtcagagtgggcggcagtgcctgccccacagggatcttgtagggccccaggtggctgtgtatggctgcaagggcacattgtgcaatgttgccaccgtgatatggacagtggcccatgggcactggcatggaggggaggcgctcagggaggagctgcgggctggtttgggggcctgagcaggggcccagacacggcccctgggtacctgctgcttctggttgtggcaggctactgttggacgatgcagcatccaggtcccctctggttggtgctggc

SEQ ID NO: 7283 - DNA, 1406 bp, Artificial sequence
  DNA replication origin
aggagctgcgggctggtttgggggcctgagcaggggcccagacacggcccctgggtacctgctgcttctggttgtggcaggctactgttggacgatgcagcatccaggtcccctctggttggtgctggcccctgtgcacgccccctgcttgggcagggagtgtgtctaggaggcagctgctatgcctgctgcccattttggctgtgagcacccccagcctcagaggaaggatgggaggatctgggggcctcctgtgagtcccactgtgagcccagaggagagccctcactccttccctgaaccagaggacccaggctgaggcagtagggtttggcctcagagacaggaggtgcgtggcttttcaggtatgcttttgtttgttgactgactcacagatggactctgtcacagctctttgtggagcaactgccgtgagccaagcaggctttttatttccaggatgcagcatctcccgtcccaggtggggtgggggatctctggggcagaggcctggagggggccgagggctacaggagaagcagggtggtgggggagctggcgggtcaggagatcctggagaggagatggaggtggtgtcttcctggaggctgttgagatggcaaggtgccagccctgtgcaaggctgagttgtgggcagagcgcctacagtggccagcctggcagaccctggggtgtgtcagagggaaacagacaagctcctgccccagcgatcctgctttctgcagggaggtgatgtgcatggccctgtccagttctgtggcagcacgtgctgcttcagtttaaatctaagtttgccaaaaggagtcaagacttaaaatgaagttccttagttgcactaacacatttctgatgcgagtacccatgcctggctggcagtcaggtggtgatcaaggctctggaggaaaaagcggcaaagaggatagggagcctggggtcaggagtgtgggcaggcaagaaggtggggaggcaagacacctccagctgtcggggaggtgtgaggaggcagagaggcagccacattcaggtttgggggaagaactttccaggccaggagcagtcagtgccaagaccctgaggtggcactatgaataccagcaggggcggcacagtgtccttctgatcatgggtgactccacgtggttgcgggtccccaggcttcagcacccaccctctccctgcagctgcctgtcctgtgtcaacggctcctttccctgccactggtgcaaataccgccacgtgtgcacacacaacgtggctgactgcgccttcctggagggccgtgtcaacgtgtctgaggtaaggccgggcaagggtgagggtcaggttttcagaggtggagcagaactgggttgagacatcccatctgggtgtcgcctgaggcctgg

SEQ ID NO: 7284 - DNA, 2014 bp, Artificial sequence
  DNA replication origin
ctggggtcccttgaggaaggagccttgtgcgctggcaaaatgcaccctgttaatcttcccccagcgtttcccagagggacctccagccttttaccagggagactatgcactggggagaaggttgtaatcggagcctttggggacaaccggacctggctctgaagaaggacctccagccttttaccggggagactatgcactggggaagaggctgtaatcagagcctttggggacaactggacctggctctgagctgtcattgatcccaggagacccacgccactgcaggcctcctgtcagagtcagagtcaggccaggtcgagtcaggtgatcactggagtttcagcctaatcctgactcagtgggccgcatgggtgccgagcttcctgggttctcactcagctgggtgttggggaggagatggggtgggggtatggggagcacctgagaggaccgggtgtggcccaggcagccagtcagcttcctgcacctggcagagggcaggggtggcgaggggacaggccagcttcagggtgatggggcaggcaggtaggggccagccacattggccttgatgcgtgctgggcccacacgctcacactggtgttggggtgggtggtgctttttcctggctgggacctgggttctgggggtgggccatgactgagacctcacgccaggtgagccagcttcatgtctcgtgctaccggccaagaggtttcctgaacttacgggcaccaacaaagcccgtccctcaccatagtcaccttctggcttgctgcaggctgagctgcctgggctcctctgggcatttttcagttggttggatggtgggggcagctcagctggtctcagactgaccattctcgggcgctcacgggcagcctagcttggactgaaaggagtctcagtgccctgagccacccgttttcatggctggggccctaaggtgacaaggcccacggtggcccgtgtcacggtgagactccagcctgagcctcagcatgcagagtcactgggcgcgcctcagactgccagggaggtacagcataggtatggccactgtgcgtgcctgtgccttccggctgcagctgttctgggaacacagagttgcaagtgcagcccctaagttggggccagtggccctagctgcaaggtgccaccacctgcctctccccagtggacacaggagcatccctgcagacccagagattagtggtcatcttgcccagctgggccttgttaactctgcttccctggagctcctgaggggccaggccagagtccaggccccctcttgggtcctggaaaatctctgcagagctgggcctgggccttcctgcctgccttgggggctgttgcagggcttggggattacagcctgttttcagcatccctatttaaagcccagcttctcagtgttcccgaggggccatctcctgaggccagcagcagccatgctgcaaggaagccaggccattgcatcagttattgttgccgaaatgctggccccagaggccaggcctgtttttctgctgggctctggctatttttatacactccctgggcccccagcgcagagcctgcagccccagagccccaatctcttctgcctctggggccttttcagctgctggccagatggggctcctttggtctctggaatggtgggggtcctagaacatggggcagggcattcaggggccagaggtaatagagcctgtctgggtcatagtatgcagtcactgtcccagccagcggtcctcagtttgccagtgcataaaatgggcacattggtgcttggctgggagcaccacaggcccagtgcacatctggagcgtagtggggtgcaccttgctcactggtctccgcccccgggctcagccaaactcttcttatccccaggactgcccacagatcctgccctccacgcagatctacgtgccagtgggagtggtaaaacccatcaccctggccgcacggaacctgccacagccacagtcaggccagcgtg

SEQ ID NO: 7285 - DNA, 1430 bp, Artificial sequence
  DNA replication origin
gcttggctgggagcaccacaggcccagtgcacatctggagcgtagtggggtgcaccttgctcactggtctccgcccccgggctcagccaaactcttcttatccccaggactgcccacagatcctgccctccacgcagatctacgtgccagtgggagtggtaaaacccatcaccctggccgcacggaacctgccacagccacagtcaggccagcgtggatatgagtgcctcttccacatcccgggcagcccggcccgtgtcaccgccctgcgcttcaacagctccagcctgcagtgccagaattcctcggtgaggtggccagggcaggggctgggggccgtgagccggaatgggccggttatcctcacggccctgggtcctggcgtgtgcttgttcataaagggcagtgcacgtgctcacgtgtatctctgatgagtcagaagccactcctggcttccccaggccattgccaggcccttcagatgtgcctgggtcatgtaggcaagtgggctgcagggggcccatgctgtcctggtagctgctgagagcacccagttgtgtggtgggagcagcctgaatgtgggagtggacagcagccagcctcatgggactcgcacattgcagcatccgtgggtcccaggcatgggctgatcatcaggtctgagtgtgtgcaggaatagccaggtggctgccagccttcatcactgtggctcccggagggcagaggtcagggtgccagagcgcatggctccgtccatccctggccaaatgcagaaaacactcccattggcccgcacttgcacactagcagacggttgttgcctgtggtccgagcatgcgtagaccttcagatctgacacaatagtgtttgaaaagctctactgtcaggtgcagtgcgttcagtgacgggatctctatagaaccagccatttcctgagtggtgggggagtggggcccagttgcccagcagttggaggcctgggctgaagtcctgcactcccagtaggcctctgtctccccttctgctcaggacgggtgtgatccagggagcagtgggcttcctgtaactcactgcaggggcaggtggctgggctgttgtgtggggcactgggctgtcgacaaggccttggctggaccccatcccctggaagccctggggagggccttgatggggtcagaggtctggagccccttggctgacccctggtctgtcccagcagtgtggggtagggtctggagggtcacaacaggcttcctggggcaggttgggttgcaggtcagccatgaggatcactcctggccaccacagctatctggagttctctctgccatccagtctttccagacatttctgttctatcaccaactcttcgcctgccctgcactttccacctgcgtctccctccccaccctcccttctcaccaggccca

SEQ ID NO: 7286 - DNA, 1119 bp, Artificial sequence
  DNA replication origin
cttgatggggtcagaggtctggagccccttggctgacccctggtctgtcccagcagtgtggggtagggtctggagggtcacaacaggcttcctggggcaggttgggttgcaggtcagccatgaggatcactcctggccaccacagctatctggagttctctctgccatccagtctttccagacatttctgttctatcaccaactcttcgcctgccctgcactttccacctgcgtctccctccccaccctcccttctcaccaggcccacattaatcttcccttcagctgtgtttaaagggaagcgggagtatcggggaatttgacaggatccaattaaattcctgcagataaaataatgatgaattgccgggccgccccttggagatgctgggctccctgcaccgtcccagcacgggaacagagttgaggtcatctgtggcagaaagtggggcacagctggagtcctagccaggctcccggggaggggcagttcccctgggcccagcccagccttgttgaggaggggacggggagcagagctgcacctgacagtgattttgcctgtctctgccccagtccggggacacggatctcccacctcaaggcagggcagtcctggcccattcagcaaagatgctgaggtacacagagcatgctgatgcgtattctagggccagctgggagtcttggtttcccagcctggctgactgtagggagtggtcagaggctgcctgtggttggaggtggtctccaagggggtgccacagaggtgactgtgggaagcacagaggttcccttggaagggcacctcatatggttgctagcctggagagagggggctctggagccaggaaggaagtcctgtgtaggatgagggtggagagggagcggttgtggctgcagaaacttccccctaagctggcgccctggtggctttgtgggcgtgaggcttgggaggcctggaggccgcttagctgggaagcctgacggtgccatcacctaacagtactcctacgaggggaacgatgtcagcgacctgccagtgaacctgtcagtcgtgtggaacggcaactttgtcattgacaacccacagaacatccagggtgagtgggcgccccg

SEQ ID NO: 7287 - DNA, 1574 bp, Artificial sequence
  DNA replication origin
tacccgttatcagactaatcattggtgtctgcagctgagggggcctggtggctgtggggctcctggcagtggtggaagaactgagggtccggacccaggtgtgggctatgcctggctgcctgcccagtggggtgtccccgtgacccccacccaggccagctcatctagtctcctcacagccccctgggatgcggggatagggcgaggtattcccactgggacaggtgccgagagggaaggtgtctgcctggcccagggtagtaggagtgggtgctgggctcccagcactcggagccccggctgagtgaggctggccctgagacaggcagggaaggtcgcgccagggcttagtctcgccagccctccccagggacagagggagggcagcatgagcctacctcccagcctggcgtgcgtgggacgggcctgctgcctactgcctctggggaggcagaggcctggtgggtgtggagccctggccagggtcaccaggagtgggtgtgggcgacagggaggctgtgatgaaagcagacctggagaggcggcaggccgggtcccaaatgccaggctgggcaacagtgggggcctgaaggggctgggagccagggcgagggtaggacagacatgcacagccctgggagggaaagtagcggtgatagtatgcagccacccaaggcagtacctgtgacagatggcgctgttcccaccgtccctcaatgcatctgcattccacctgcctgggttccacccgtgtgctcctcactgtcccactcgggcacctccaggaggaactcccgtgagatccggtgcctgacaccccccgggcagagccctggcagcgctcccatcatcatcaacatcaaccgcgcccagctcaccaaccctgaggtgaagtacaactacaccgaggaccccaccatcctgaggatcgaccccgagtggagcatcaacaggtggggcccagcaacacccattccctatccccagctattgagagcagcgctgagccaggagctcttccactgggcacttggcggtggccctcctgcatgccgggtactatcctgccgggaagcaccccttgccaagagcttttacctgtttcctgtctttggggaaggcaggctttgcctggctgagctgtggcccacgtttccagctcactgggccccagcatcatttggtgacccccccacccctgtcctgttccagcggtgggaccctcctgacggtcacaggcaccaacctggccactgtccgtgaaccccgaatccgggccaagtatggaggcattgagagggagaacgtgagtccctgccctcagctgcccacctcggtccaggccttcacctgggatggggctcctgctaggaatacccgtgtccctgcccctgcccctacccctgccccttcccagcttatgccaaccttggctgtgcctggagacccctggggaggcacctgtcctgcctggcgggtagaaggtctggctctgggttgctggctgcacacacctctccttcaggccacatgtccctggtccacgtcgggtgggtggcccaggaccagccctg

SEQ ID NO: 7288 - DNA, 891 bp, Artificial sequence
  DNA replication origin
ttgtataagttcctcaaggtaagcagaggcgggaggaagcaggtgtcagaggcaggtgaacagcgggaggggaaaacggagagaggtggggattagtgggaggtgctggagaatgacagctggtggggtcttggtcgagttctggcttgggccaaggcccctgggcatgcagccgctctcagctcctggctcccggctccctcctccctccttctgaggctgtcaggccctcacacagcccaccaaggtaggtgtgggagttcggatacaggctctcagtgcccacagctggcctgggctcaggagggtgggggcaccctgggcaggggcctctgaggggccagcctgggggtgcctgaaggctccagtccaccacctgtcatggggacaggtgaccgcactgggcttcccctgtgctgtccattcaagcccctcccaccccccagcagaaggatgctgccgtcctcagaacaggaacagggtgtaggccagagactgcaggccagggcccaggctggatggggatctgggtgggctttatctgggcagtaagcagttgaattgctgtctgcactttcgatgttgggacttttacagactcaggtatctggcttctcttggaaatctgaaggcctggttagcccactcctgagaggtgggaggagcccggtgtgtgcatggtgaagtgcatgctcctcgcctggcttcagtggtccctgtcgctgctctgtgggtgagggtgactgacagtgtagcccagtgatcgagggtgggagctggcactgactgcctgggttcgattctcctggtttccttatggaatccagggatggcacctctgtctctgggccgtggggctttcaggcctcctgcagccagatgctgctgagc

SEQ ID NO: 7289 - DNA, 1375 bp, Artificial sequence
  DNA replication origin
gatgctgccgtcctcagaacaggaacagggtgtaggccagagactgcaggccagggcccaggctggatggggatctgggtgggctttatctgggcagtaagcagttgaattgctgtctgcactttcgatgttgggacttttacagactcaggtatctggcttctcttggaaatctgaaggcctggttagcccactcctgagaggtgggaggagcccggtgtgtgcatggtgaagtgcatgctcctcgcctggcttcagtggtccctgtcgctgctctgtgggtgagggtgactgacagtgtagcccagtgatcgagggtgggagctggcactgactgcctgggttcgattctcctggtttccttatggaatccagggatggcacctctgtctctgggccgtggggctttcaggcctcctgcagccagatgctgctgagctcaggtgatcagcgcacagatgcctgcacagagcggagtcctggccagacatcctcgctgccgggagagacactggacgggaaatacagcagacaggcaatggggcagggccgagcagggagggtgggattcgagcagaggtctgaagaccaggcggggggagggaagagagtcccaggcagaagaggccactggggagaaggccccaggtgggataggcaggggctgggcttgtctgtcctgggtcgtctctggaggtgggacatttatgtgtatatagcagtccctggcacctagtaagtgcccagtagatgataacatccttaggcagaactggaagcaggtaacacaaagtcgtgcgtgtcctgtagaaagtacagttctatgaagactgcatagtatgtgtgcatgctgggtaagctgggctctgtgagcctaaagcagcaggcgtcctgggtgaggtggagagggcaccgctaacctgagtccctgtctgatcccgattctccacacccacagagacagggctcagggcagcaaatgcctataagcaccgacgttgggtgtggattctctttcatgccaggatatagggggccagcttcagccagcgcagagtgtggccccacagggtattataagcagagagggtggcagtggggcactgtggaggggttgtctttaggccggatcagacattccatggagagccggggacatttgggacaggcgctgagggatgtgtgggcagtggagggagggagagggaggccagtcttggccaagggagccataggaaggggacacagggaggagggaggcaggggtgaccatttgggtgggagtggtgcaggtacaaggggtgcgggctgtgtgttgggggcttcacagcccatgcccatgaccccagcccaccctcgttgttagtggggtacc

SEQ ID NO: 7290 - DNA, 1303 bp, Artificial sequence
  DNA replication origin
ttttcctcctccttcgtggctaacttaatgaaaccaagtttgcaaatgaaacataatttcatagacagacatgttgttggaaggtctgggatggtcttaacagctgtctctctaattaccgcagatgctaacgaggtgcctggagcctctggttacaggagcagagctgctgtttgtttgccagggccgggtaggaggcagggctgccaaacctgcccctccattgaggtgtacacacacctgaaggcccttgggcaggcaggacctacagtggaccccatgcccaggctctgggcgggcctcgcctgtgtggccaactcacccagcccagacgtgaacgtttcccagggacagctctccattcactcaattcatccagcaagtgtctgtgatgccccatgcacaggctcagccagtgctagcagtagggtatagtgagcaggccaggcagctcccactccagaggggttgccaggggtgcacaggatccttcagagaacgacagatggcggggagactcagcgaggcagtggtcgggggtacgtgtgctgggcgctccccaggagcctttctgaagagggcacattgggttgggtccacaagggcccatgaagatgccaggggaaatttctggttgtagaggcagcagttgcaaaggccctgaggtgggacaggaggcggttctcatgctacagcgcggggagccggagggtgaggggtcaggtgcccgctgagggcccggggctgtgctgctggccctgtgctgtgtgcttgggtgctggtgaacctccctgggtgggcaagcctcctcaggtgggtatgtcagtatccatgacacaccatagttgtgtcccagagtaatatgggggcccagctgggtggtccctaggaggccagtggatcacagtcacacttggagttgcgtagtatggggtccgcttgtgccatgggcggtgggccatggggagctttgtcctgagcacctccagctggggagcaggcccctgggaggctggagctaggcggggatcctgctgagaccaggggagacttctgggtgaaataggcctcggccctccctgatgcaggtcccgcgtgccacgccatgttcctcgatacactactgcgcctcctggctcatgtgtaatttagggttttcatgtgatatttgtgggatggtgggtatgttttgtttcctgattttcttgcagtctctgctgggctttgggactaaggctgtacttgcctcccaaagagttgggaagtgctgctcatttctccttgccaggaacaccatggctgg

SEQ ID NO: 7291 - DNA, 1921 bp, Artificial sequence
  DNA replication origin
ggaggggcaggttgggggtaggcccgggggtcctggctgcagcctcatgccgccacccccgcaggagtgcgctggggagccgctgttcatgctgtactgcgccatcaagcagcagatggagaagggccccattgacgccatcacgggtgaggcacgctactccctgagtgaggacaagctcatccggcagcagattgactacaagacactggtgagcgtggctgccctctgtcctgggtgccctggtgccccccaccccccagttgtggggctgacgctgcccccttgctccaccccgcccgcagaccctgaactgtgtgaaccctgagaatgagaatgcacctgaggtgccggtgaaggggctggactgtgacacggtcacccaggccaaggagaagctgctggacgctgcctacaagggcgtgccctactcccagcggcccaaggccgcggacatggacctgggtgagcgggcggggccacggctgcccggggtgtgtgctggagcagaggggcagggccatggcctagtactgagcttggcggggaaggccaggccagtcctccacaccaggctggtctggagggcagtggaatggcgagtgggctgtccagtcccaggttgggtatagagggtggctgccctgctctgggcagagactctgggaggtggtgggttccagtgcactctgggaggcagtgggctcttggagccctgagggggatactcaggctcatgagaggggcaggtggagccattgagggccagaggggatgggacgggtttggggtggggcccggagtcctgctgcagatgtgactggagaggctgggtccccacagaagcctcggtgccaggctgaggagttggggccctaaggcttgcggaaggcagggcagacccccttaggctggggctgctgtggcagattgggagggctgtggcacattgcaggggactatggcaggttaagtgtgctgcagcaggggcggaggtatgtccctgccctgtgctggtgctgagagctgcaggcaggccccgtcccactacactgctgtgatggaggagggaaagagggccccagcggccccaccctccagctccctcctcccccagagtggcgccagggccgcatggcgcgcatcatcctgcaggacgaggacgtcaccaccaagattgacaacgattggaagaggctgaacacactggctcactaccaggtggctcccggccctccgaccctagcacaggcctccctccccttggggcttccacagcgcagccaccaatgtttgcagcatgtgggctggacagcagctggatctgtcagggagaggaggggaggtggtcacttatgtgtgtggaccgtcccaggactcgagctgggcttgtgggattgcctagcatccctgggctgtcctgatatagagttccagactgagtgaggtggctgcctccaggcacagcactagggtgtcaccggggtccccagccggggagtgggagcctggtggtgcaggggcaccctggtgggtcacagggtccctggccctctgcccacaggtgacagacgggtcctcggtggcactggtgcccaagcagacgtccgcctacaacatctccaactcctccaccttcaccaagtccctcagcagatacggtgaggggccaggcagcgggcgagagggcagcgcatgggtccctggcctgggcaggacgtcccccgggctcccacgctgcagcagccggacgggaggacccaggggcaggtgtcaagcctgtcactcgcactcttggccttaccctccagctctggaggctgcgcctcctcgcgactgtgtgtccgtacacaattatgccacctctgtggtgtcatcggctgccccaaaatcccacatgggtgggggtgccatccccagc

SEQ ID NO: 7292 - DNA, 2210 bp, Artificial sequence
  DNA replication origin
tcaaacgcactcgtttgcacaagggcaagatgtgaccaggccctcaggggcccactccacacagccaccaccctcctaggcctgcatgctggcttgcactcatggctcctgcactgagacctgcagctcagctccggcccaggggacccattcctgcagagaccagccctctgtgccccaaacaccacctcagggactgccattagctgggctgcctggcagcactggccacacgtggctgcttaacttaaatgaagtgaagagcccagacactcagccacaccagtgccatttcaaaggctcaggagccaccaccctggacagcacgggtctagaatgttccactgtgacagaacattctccaagaacatgctgacctggagacactgcgtccctggaggccccacctcccgctgtgcccaatcagcatggcccaggagaggggcttcgtgacacttcatttaaatcctagactccgcgagcagtgggcggagctgggacaggttggggtggctgcatcccaggtttgggaagcaacacatgggatggacaagaccaagtcgggggtggctgctggcccgggagccagcagaagtggcagggacagtccaggagagaggggagctaagacagtggagagtgtgcacagaactggggggagaccccagcaggatgcacggtgaggaggggcacttcctggtgaagcagggtccagccatacaggcaagggcatccacctgaccccaggtgtgggggagcagtcctaccccagaagccctcggccatgcaggtagaggggcctggtgcacagagaggggctcccctgtagcaggcaatggtggggttgtctgctggggtgggggccacacacacagcagggacccgctccaggggctagggtgtggctacagtgtgccaaccggagcagggggccacagaccagagcttgggggtcctgagtaaggagtgaggccaagggctggcctgcctgtgtggcagagaggaagccaacattgctgagttgggcagtccatgaccagggaagaagcaggtcactgtcccaggggtgggccaggccggaggaaagcaagggactggctggccagggaggcagatactctggagggaggccactcagaggctgggtgcctcttcataacaaaacccagcctcatagagccccagctcacattggtgtagctgtgcacggtgcaggctgggcaggccctgctccgtactccagctgctccgtgagaccgtggcaagtggctcggcctctgcgcctcagtaagcaggctctggcctggccccacactgcaatggggaggctgtaaattcctcgcactaaagactaccaggagtacctgcagtccctgttgccctcatcactgcaaccagccggcttggggctggtccactgtgccctgtttctcacgctgcagcccacactcatgtccgcacagctgtgcacacccagagccactcacacctgcacacagttcctgcagcagtgggaggggctcagcggctggagcagagggcgagccgtgggtcaaggggcacaggcagatagggaaggccagttagcacaggactggcccgccatgcccctgctgggttgtgtccccacgccagggagccccaagtgggggctccggatcagaacagggcgagggccctgggaacacatctggcctggccctgggggatgcccctcctccccctgccctgcattaccagttgctcttccaggtgtggcgcacgtcagcatcgtggatctggtgcttgtcggcctgctcatccaggaagtcgaacatgtacttgatggccagcggcagggctgagccccggtgtgccgtgctgaagatggtctcaaacaggtcgtccacaaacttctgcagtgtgccctgcggggggcaggcagggacactgagccccagggcgctgcctggctgcctacacctcctgggtgactaggcaagtggccatgggagcatgggggtgaggcccttgctctgggcttggcactttctctgagctcagttggcccagcgtcccctgcccccatctgccagccaggcccaccttggtggccagtagccgtgtcaagtagatctccgagaccatcttgctgccgcggtcaccctcacgctggtccaggtggtcgtggttcttcaccaggtgccacagcttggtgccgctctccaggt

SEQ ID NO: 7293 - DNA, 1600 bp, Artificial sequence
  DNA replication origin
tcatggactcctgctccacctctgagcacaagctgggcaaggactcaccctccaacaagctgctctacgccaaggacatccccaactacaagagctgggtggagaggtaggtggagggtgcaggggtcgggggcaggggcccgggggcagcctggactctgctcatgtgcccacctggccactcacctgcaggtactatgcagacatcgccaagatgccagccatcagcgaccaggacatgagtgcgtatctggctgagcagtcccgcctgcacctgagccagttcaacagcatgagcgccttgcacgagatctactcctacatcaccaagtacaaggatgaggtgaacaccgtgggagcccacaggctgggctaggagggcttgccggcccctgccagagtcacctgctctgccccgccctgccactcctccctgaatctctgggctgccactgaccaccttcactcctctgcaccctctggccacctggttccttggggccaggagggagcctgccaggccgagcagagaaggccgtggtggagtcactgtgtgcagccatgtggggtcaggggtggggaagatgggatggcagcttcttcctgaggcagagggtgtgtgggtggtgagcaacttccctgaggggctcatttcagggttttctagtctgggccagcatctccagggctgggcataggctcttggcagagctttcctttcagtatcttttctgctgacttggagtgaggccacgtacatggacctggggacggggtccaggaggtatccaggaaggagaactggctcctgggccgcacaggatgggagcacggggccagagggcaggacagtctcggcctgtgccaaggctctgagggctaagaaggccacgggagtgaaccagagccaccctggggaggccagggcaggtgcagcagaggcaaggaaccttccccagggtgccacaggaggcagacaggaggcagagggctgtcctcaggcaggtgccccaggggagcagaggagcagccagagactgcatgtattagggtggggagtggggacaaaagcctggggtcctggggctcaccagggaaaggggagctgaggctctctggggagctctgctttaaaggggcacagaaaccccagggtgtgaggactgggtggggacatgtcagcagcatggccaggcagccaagggatcagagcctgctgttttagggggtgagagtaggatgatgacaggggcagggctcattctccatattggggtcctggagggtccaggctcacaaccaaggtcctttggccaggggtagatggggttgaacctctggcacctactctggaggcatctgccctgggcctgctgagtgcatggaggctggtggcccggcatgctgacagttctcctggccctgcagatcctggcagccctggagaaggatgagcaggcgcggcggcagcggctgcggagcaagctggagcaggtggtggacacgatggccctgagcagctgagccccagctgtgatcatccagcatgatgcagcgtgaggacagctgagcagggaccgggacagccctcaccgcatgc

SEQ ID NO: 7294 - DNA, 1000 bp, Artificial sequence
  DNA replication origin
ctcctgacctcgtgatccgcccgcctcggcctcccaaagtgctgggattacaggcgtgagccaccgcgcccggccagattaagctattttcaaagtttggaatgttgttcctgcttcccagtaggacagaagcttgggagcaaaattaggtaagttacatacaattaagaagctccattaacaaaatgcctgagcagagctgtgtacattctcagccctagagagtcctggctcaggtgcaggtggagggtgggggacactgctcctcctgccctgccagcagcgagcaagtcacacccccagcagacacatggggcccgattggccaatcagaagatcccttcctccagtcagggctcagcatgccactccatagggacattttcttcccctgaaaaagagattcctcctttacataggggggagttggtaaaccaagaactgctggaggccactccatgagccgaggagagaagataattcagaggaattcagaaccgagagatggggagagagggagggagcgaagggaagagagaaggagaaaaagaggcagaggaggagagagcgatggggagggagaaagggaaggagaaaggaaagggagggaaggacagaaagggagagagggagggagggaaggagagaaagggagagagggagggagggaaggagagaaagggaggagggagggaaggagggagagagaggaagagggagggaaggggaaaggggagagagagagagagggagagggaaggaaagagaatgagagagaaaggaggagagggagagggagggaggaaaggacagaggcagagagagagggtgggtagagaggaagagaggggaagggaaagagagagagaaagtttaaacttctggatccgtggtgtctaaagactagaactgtcggggcattcagttacgtttgccaagtcccatttctccctttgcctaagccagtctgtcacttgggacttacagagggcagctctct

SEQ ID NO: 7295 - DNA, 878 bp, Artificial sequence
  DNA replication origin
actgcagagtggagaccagtggtcagagggccatagccggctgctgtgagaacgagaggtgactgctcccctcctaggccttcctctcctgcctggtatggccagtgggggtgggtggagggctggggcttgctggtctaccttcactgatgtggtcccagcccctaggcccagccctagcatagaaagcatctagggagcttccctctccactccccacccaactcctcctcctgaaagatgcatggagtgtgaaaatttcatcaaagcagcttgcttcctgggctcacaggcggggctggcgctgggagccctggggcctcaggccgccctgctgctcagtcagccctggacgcccctctgggctgctgtagaactgggacgagcagcgggttgatggctagagtccctttggcgtgtgtgctaggaggggctggggagggacagaggaggcgtcaggccagctttgtggggtggggcggtgctgacacccgcaggaggggctgcagctgggcaggcatcagagtggggttcggagtgttcccaacgtcccagtgaccatgactgcttgcttgaccagcatgcattcactcattgactctgcagcttttcattattgttatttttgtaaaacagatgctgcatttgcaaggttttaaaatgagatgggcatttcgggctattcctgttcttttgctgccagaaacaatgtggtgtgggtaatcttgctcagagtctcttgaaatgtgggtaggtacacctgcagggcaaaattccgcaggtgggattgctgggtcagtggataatgttgatgggaattgccacactgcctttcatagaggccatgccacgaacccttccagcagcaaggcaagcag

SEQ ID NO: 7296 - DNA, 1268 bp, Artificial sequence
  DNA replication origin
aggaaggcaagcctgtgccggccgccttcccctgagaagatctggctgccctgagccccgggtgatgtccatccctggttcaccggttcagtgaatgtgtgctgagcctccatcgtgttgtggagctgaatgccactcaggatacacgggtaaacaacacgggtggagagtccgccttcatgagactttccttctaatgggaaagatgggcggtgagcagaggacacatgcatgagaagctcgatgctggcgaaagtagcccagagcaaggaggggaccaagccagcaggcagcggtgggggtggagtaggaaggcccccttgaaaggaggtgaggggctccaggcagaaggagcaccacgcagacaggagcaaggggctgcctgccccattcagtgggggacgggagggggctgaaaagaaggcccaaaaggcacagaggccccccctgtgaggctggacaggccactctgaggccctggctttgaccctgagtgagacaggagctggaatgcagggaggccaacaaaggctagctcattagcccaggtgaaagctgtgcaggcctgggccagcgccagtgagaggagtgagtgtttgggtcctgggtgtatttcagagagagggccaagagatgttgctgatgggctggtgagggtgaggggaggtcaggccagccaggagcaatgtctgaaatgggaagagccggtggagggaaggtcagagttctagggttttatctggacatggttgaaggtggaatcatgacccccagcgatatccctgtcccagtccccagaatatatcacctttgtggcaaatgggactttgcaggtatgattaagttatggatcttgagattgggaaattatactggattattcagatggcccaatgtgattacaaagtgggtccttataagagggaggccagagggtcagagtcagaaagggacctttgaggatgctacgctgctggctttgaagaaggaggcaggggccacgagccaaggatggaggcggcctctagaagctcgtcctccatccagaaaaaccacctgccaacaccctgacgccactacttctggcttccagaactatgaaaggacacatttgttttgcttcagcagtgaagtttgtggtcatttgtcacagcagggagaagaaaatcatgcaggcgtgtgcagtgggagctgttaggagacatctgtgtgcgcaagtcatgaggactggtggcaggttgagatttggaggtctgcctctagaaggc

SEQ ID NO: 7297 - DNA, 884 bp, Artificial sequence
  DNA replication origin
tggagcccctcacctcctttcaagggggccttcctactccacccccaccgctgcctgctggcttggtcccctccttgctctgggctactttcgccagcatcgagcttctcatgcatgtgtcctctgctcaccgcccatctttcccattagaaggaaagtctcatgaaggcggactctccacccgtgttgtttacccgtgtatcctgagtggcattcagctccacaacacgatggaggctcagcacacattcactgaaccggtgaaccagggatggacatcacccggggctcagggcagccagatcttctcaggggaaggcggccggcacaggcttgccttcctgggaggtggagtgaggacagggcttcctgtggggaggagctcagtgagtgggatggtggccctcagagctgggcttctgctggggtggggtctggacccggggatgaggtgagactggaagcaggagctgggagaaggaggctgccctaggcagctgaggaggagggagaacatgctacagggctgggatattgggggctggggaggggcctcttcatgagagctgtgctgcccatggtgtgtgtgtgaacgggtgcatgtgggtgcctgtgtggacatgcctgttggggggagcgtctgctcatggtgcccacaggcgtgcttctggcagtgtgtgtctggaggtgtgatttgtgtgcatgtgtgtgtccttgtatatttatggagcatctgtgtgtgtgcatgtgtgtctgtgtccatgtgcatatgtgcattcatacatgagtgtgtctgagtgtgccttggtgtctgggagtgagcgcgtcaccatgcatctttctatctggatgtctgtgcacatgtataaatgtgtgtgtgtctg

SEQ ID NO: 7298 - DNA, 957 bp, Artificial sequence
  DNA replication origin
gagggtgagggagaggtgagtgggaaggagggcagcaggtgcacagagtggggctggggagaaaagtgggctctggcgtggggagccagcggtgtgcactcattgcggttgcctttcctcctccagctgtgttggaggagggaaatgatgccatgtggaggccaagggggtggctgcaggggccccgtgagagaagatggtggctggtgctgaggctggggttggacagtgttggggtggggtggggcagtgaggtggggagggggagtgagacagcagggatgggtggtgcctgggcctttggtactcacacagggcccagctgctcgttagctgtctggagcatcccgggcctgcctggatgggcaggaggtggcccttgctcggggaaaggcctcagcaggataccagtggaccagtcctggaacagccgccggtgagtgtgagtactcagtttccacaccagaacaacaggaggagcaacccccaaggggagggcgggtgctgggatgagtggtaatggggccggggcccggtgtcatcaggctgggcactgcggagaactcagtggggttggggtgggtggcaggtgggcaccacgggtgccaaggagactctaacagaccccctctagtcaggaagggtggcagagccagtgtggacaggggagtgagaggcactggcgggggcgactcagggccaagtgggcagctgctggagctgagtttggggagagatgatgggacagctgtggcagagtcacctcagcctctgagaggacagggagctggggtgggggctgcagtcctggcctccccacctctcccaccccgcaccttccccttgcgctctcagcccagaacatgggccccaggccctcatggcccgtctcgggctttgcctcataactctttgtggccagggtggctgctcctgccttgggaagcctgctgtttg

SEQ ID NO: 7299 - DNA, 1415 bp, Artificial sequence
  DNA replication origin
tctaaaagctggaggacctcaaactgaaggtgccgaggcagctggagggggatgcccatatggagataatggccaaagggcggccgcaggtcaaccctagggggctgggcaggtgtgtggcaggagcccccaccagtgatcagtgacacaggagacccccatgacaagggaagtgcccaggcagagagcgagtccacagacaggtccaccatgggggccaggcaggtgggtgatgtggggtctccttgtcactgacaaagaaaatgaaggtttaagccaggtgtggtagtgcacctatagtcccatcattcaggaggctgaggtgggaggatcatctgagtccaggaatgttgaggctgcagtgagcggagatcacaccactgcactccagcctgggtgacagagtgagacactgtcttgaaagagaaaggaaggggaggggaggtggaggagggggagagggagggggagggtttaaaaaagaatggaaggttggctttaatcactgagtttggtaaagtagaaaaacctgatgtacctggcatttcactggatatgcagatcaacacgttctgatgcattgttggggcacacaaaagggatcccagagaccaccctggcagaagtgtccccctgcgcaccctgacacattgacccagggtccatagaccaaatggcaggctggggcagtggtgaggggacagccagggcagcataactgagctgaggacaggctgcagggagaagggccatagcagggaaggcctgtgctcctctgtccagggcaggttgaccctctcaccctgtgccaagcaggatccccaccctgactcccctaacaaaatctgctggtcaccctcaaaggcctgatgttcctggcatgtccctccttggtgctgtgcccagaaggcagccttgcatggtctaggacagcgagggccaccggggctgctgtgggctccaagcagtgatggcctccacccatgctgactcctcccctagagatgaaggggcccagatttaccacccaggggcaggcaagggttggggaggcatgcgcagtagaggagggaggggctttgaccaggtgtgactcagggagacaggggatcaggttccctgtcaaaggtccacctctccagggctgccttaggcgagaagctggtgggatcgatccagccatctgtttaatcccagaaacaaaggtactcactgcactgtgttgcccgctggccaggagaggggcagggtgtgtaattgacctacttgtcagaagtcagggaacaatgaccccagcaggagggtttgaagggagtgggagtcagttgggtggagggggttggggacctcaaaggcagggggcagcccagctaccaaggcccccggggagggagcagacccctcccaggagccca

SEQ ID NO: 7300 - DNA, 1230 bp, Artificial sequence
  DNA replication origin
acagtgatttatagttcttttcttctgtataaattttgaagtgagtttgtctaattccttcaaaggaatccaactagattgattaggataaaaatgtatagattaagttagaacaaactgacatccaccttgttagcttgctctattcatgagtatgttatattcattcttttatgatcttcatggtgtttgttttcctttaaagcatttatttctagacatgcatatgttttcctttttaattaaaaaaatgttcaattgcaaccctgtaagttctcagtttattctgtcgggtcttatgagataattatcatacatgaaataattcattcaataaatgcgcatagagcatccgaggtgtgccaggcattgtcacaggtgctggagatagcgtagtccagaaaagtaagtccttaccaacgaagccttccatctatctgagaagaggtgggaaacaaataaatagcggctggcggtaagtcctgtgaaacaaagagtaaggaggatgcagagtgatggtgggtgggctcggggaaatcctcaccaaaaaaagtgacttgagcagaagccaggaggaaggggtggagcggaggagagggaggagtacctttgcctttttccaggaacagcagggagaccagtgtggttagaacgcaggcagggaggggtggaaacaatgtcagtcgcgggagttgtctgagggtttgcacagaggagtgaggagatccacctcagactgatgccgtgagaccagactgaaggtggaggaggcagcatggaaatggagaccagtcagaaggctgagagtctaggcaaggtgaggatggctcatcccggtggtggctgtgagggaggtaggtacagtgtggctcaattctggatatactctgacggtagaaatgaaacatactgctgtgttaggtgtagggcttgccagagagaggagtgaaatgactcaagagcatttggtctgagcaccttgaagcacggagctctacttagggagataagaatggctcagggggaagcagaaggacctggagctctgtttgtggcacgttgagtctgtgatgccttctccagaaaaacagggttgttgtgtaggcagctggatgcgagtctggagtatggagggctgggctgggtcggcatgcacatctgagagttgtcagcacagatggttttcaggtgtcagaagtagatgagatttcctagggagtatgtgcaggg

SEQ ID NO: 7301 - DNA, 1151 bp, Artificial sequence
  DNA replication origin
gcatcaaaatgagggggtaaacccagaaaaaggaagacaagggactcaatgcaggagggaggtaaggggtcccggtgacagctgtgagccaggctggtctgggatggagcaggtcagaaggttcctagtgagagtgcttcaggaggatggaattggtggaatccctggtgtgtccaagcatattgaggtggtgtaaaggagctaaactctaaaatgagctaaattctataatgcctaggactaaaagctgtgtgctagcatgttatctgcagatatggaagtagatacccaaataattagctgaaaagagttgggagggtggtgggaggcagctccttttcatatcagttctgtgatactacttgattctacattgcatgtatgaaattgacaccaatgagaaccaaacaaaaagaaaggactctcagttttcactaaggttggccaagatggaaaaggttgatagtactgaatgggaaaactggctgaactcttcctggtgggagcaaaaattcacgtgatctcttcagaggtcaatttggcagtaaatgatgaaaacttaaaaagggcaactcaccctcaaccctgcaagttgtttctctccctcagttgtgtatggtggatctggaacaggaagctgtgggtggaagggaacccccggaaggcactcctaggtgaaggaggggcaaatacttgggagctggtgtcagcaggcaggatcgggatgggtggaggaccagactgcaaaccagctgacccttgtcttccagtctccttccctggtaggggagtctcactgtggaagcctgaattatgctctcctgaaacattgctctgggggagacaaggggtaggtggggtggcagctgggaagggtggggaagaggggtgtgtgtgtgtgtgtgtgtgtgtgtgtgtgtgtgtgtgtgtaacgaggactgggtttgtttgtaagatagagagcaaacaggaggggagggagcatgcgggggctgggacaggaaggtctgattagggaaccccagatgctgaaggaggcagatgaacaaggtcagctttggtccgggaggcaggatgtcccatccaagaaaaacggaagaagactaaccccactgacaaaagctgctctctctcctgagatctcgaacaca

SEQ ID NO: 7302 - DNA, 841 bp, Artificial sequence
  DNA replication origin
gatggctgtcattgtcctggacacagagcctgcagggaaggaagtgagcggagggcagctgtgactgagtgactgaagaagcagaaagaataggagaagcagggggtcgatgttcctttgagaattccccccttggagatgccaagggggctgtaagagccctaacccaggaaggtccacgtgggggcaggtcctggtgtctgggatccagcctgtcctcaccccttttcagcagtgtctccagcccctgcccccacataccaggagctgctctggagctcacgcagtggtgtgtgtgttccagctgggtaataacgtgttctctcttctgtgctcagagaacaaagcagatctgtgcgagggctgctgagggggcccggcttgtgcctcctgcttccaggtgactggtgcagatggagtggggagggctgagttcaccaaagaggtggggtgggataggatcctggggtgggagctgggttatggaagtgggtcagggaagggcagggaacagcctgtgcagagaccctgaggaaaaaaggaggctgagcccttgaacctgaggctggactgtgctgggcaggtctggtgggcaccagcagggttgagaagggatgggctggggaaaggagcaggacttgggccctgagagccctgggaagccattgacggtatttaagcccaaggagtgaccaattttccagttctacaacatctccagggctgaggagagtgggccagggcagggatgataggacagtgaaaaggctagatgagagagaatttaatcatcgggagttggggctggcctggacaagtcgggagacaagggcaccggcaa

SEQ ID NO: 7303 - DNA, 1187 bp, Artificial sequence
  DNA replication origin
aagacagaaggccctggagctggtcccccaccacccgctcagagcctactgccctgacagctggaggctgggggctgatggggcaggaccagaggcctgagtctttgtggaagtctggagccctgaggagggccggttctgtgcaccggcctgtgccctgcccaaacagacttctgcaaagtgacctggttccaaatggcatctccactccagggaacacacccagctttctgtggagagaacagaggtgagaaaacgaggaggaacagagacctgctcaggaggaacaaaggcctgctcagcgggggagccagctgtcaagggccaggagaatcttggggaagttctagcaccttccacctcccacgtaggcatgttctgggagcgcttctgcttacttgagttgtctcagcttccctgagctggggttactctgcccaaatgccaggtgaggaaaccaaggcttagacaggctcactcacagaccaggacgaactgcatcaatgttttgtaggtggcagcacagggactggacctgggacccaggaaagggcaaggaccagaggggactgccctgctcagcaaccctcaacccaggtgggagggattggggaggtaggggtgttgaggggggacaccgtacaggtgtgcagtggggagaggggaaaggagcagagctggggcaaagggagggggtattgtggtggatggtgaatccacgtagggaaggagagggcacagaaaggctggcaggcccaggtctaacccccattggttatcagaagggttggaatcgggggctcatgggagtgatctggcaaacagacgcttagggatgggtcgagttgaggcaaagggcagggctgttaacaagggcaaaccccctaagggcagggtggccagggaggaggcggggcagggctctgcaggaggatggaaggagaaggagaggatagcatgaagaatgaatgctggctggatcttccataggctgtggactgtggaaaccccgaggtggccaaacccactgccatgtgacaggaacaagccgccccacccaccagaacagggctgagcacacagactcagttcaggaatcagagaacagaattaccctttgcacatctgagcgcctaggaaatgtgaacctgcttcagattcggaacgtagtgggatgaatctttttg

SEQ ID NO: 7304 - DNA, 1099 bp, Artificial sequence
  DNA replication origin
gccagcgtcttctgggtggagctggggagcagggatggtagaagccgggggatgagttgggggatccagagagatggctgtctttgtagcattttctggaagacaacatggctcaggagtggcagacaaggcggggtggaagggatacagaacaccagggaacggacacagtgggtattactactggaccccagtgtggggtgaacaagacagagagctatctggggacctaggcctggagacaagagggccagcagagagcccaggagaaaccagggagggcaaacgaagatgcaaaatgggacactcccaggtccccaggggcaggggaagcacaggcaggggtccaaaacccgtttgcactgcaagtgctagctgggtgggtgacattgctgggtggatgacactgtcgggtgggtgacactgtcggggggatgacaccaccaggtagatgacactggtgggtgggtgacactggcggggggatgacactggtgggtgggatgacactgacaagcaagtgacactggcaggtgggtggcactgggagggggtgacactggcaggtgggtgacactggtggagggatgacactggcaggggtgacactggtgggggtgacactggcgagggtgacactggcgagggggtgacactggcagggggatgacactggcaggaggaggaaactggtggggagatgacactgctggatgggtgacactggtgggggatgacactgctgggtgggtgacactggctgggggtgacactgctgagtgggtgacactggctgggggtgacactggtgggtgggtgacactgacaggagggtgaaactggtgggggaatgacacttttgggtggtgacactggtgggggatgacactggtgggtgggtgtcactggcaaggggatgacactggtggggggatgatactgcttgatgggcgacaccggtgggtgggtgacactggcggggggatgacactgccgggtgagtgacattggcggggggatgacacctctgggggaatgacactgctgggtggatgacactgccagggggatggatgccgcggggggatggacactgctg

SEQ ID NO: 7305 - DNA, 1195 bp, Artificial sequence
  DNA replication origin
tcgtctcttccaggaagccctccctgaatgcttccttgagcccttcctttggcccttgctgtccttccatttccgtgctgaactgtatttggtcgcgcatttgtctgttttcatctctgggctttgagtgctttaagcgcagggctgttggctgttattgccgagtccccagcacccggtgtgagtccggactcacaggaagcaagtggggtagtctggaaacggtttgttcaaatggcagtggggtcgtagaactcagtgagaaagacacagacccagccatggccctgccggtccaaggacgttcacttcctcatcgctgctagggtggcaggctgtcgagggcctagaattctacgtccaggctgggaacctcagccagggtctcactgaagtcctcagaaagatgtagctcaaaacactgtgtatcattttcctccaccagtgttgagctgatggagaatgaccaggaagccctgtggcttctgcgtttgggtgagtcctggggcacggtgtaagtgctgaaggaggggagctaatgggggctcctctaaggggaaaaagctaggtttatcctctcttgatactgttagaaagttgacctcctcactatagaacatttggaaaatactcaaaagtagaaaggaaggagggagtggggaaggagggagagaaggagagggatgaagtgacaggaagagagactttgaaaggggaggagagagagacagagacggagagagagggagacagagagtgagggagagagtggcagacggaggaggggagagacagggagataaaaggaggtggggggagacagagagagggaggaagagggcacagagagagaggcagagggagagagggagggagaggaggagagagaatgggggaggaagagacgaagaggagaaagagagctccatttccactgctcacagaatatggtgtattccagaatggcttaagcattgactttaaaatccagctctgtctcctgccagctttggggcctgaggaactattcccctgtccctctgagcggcttccctccctgtgaaatgggtgcaggaacagtcctggggtgagaatcccgtggctcaggaaggctggggcgccctggccattggcattctgctctccccatgttgctagaaacactcttaaaccatactttaattcttgtgaagat

SEQ ID NO: 7306 - DNA, 1260 bp, Artificial sequence
  DNA replication origin
cctcagggccactccctatcctgggcctgaactccctgaaacaaggagtgaatgtgccattcatgttttatggctgtctggagcttcccagcttcctgggccaggaagctgcctctggtctgacctcactcctcaccaaccccgggagcccaggcaggcccagcagacaccgtccccaaacacgcagtccctctccctcagcctcccactggagccgccttctcctctctcctctcccatcctgccttctttcctttgtgccttcctcctgtctaccttcagtacacatttactgagcacctgctgtatgctggcactctgctatgggccccggggagctggccaggagccagagatctgtgcctgccttctcagcattcacagtctggggtaggggagagagacatgaattgaagggccacacagttctaggattccaaactctggagagttctaggaagaagggtgtggggacggtgtccaccagggccctctgcagtcagggaagctccaggaggaagcaacactgtggctgagagttaaacaatgagttcgcagaaggaacggcatgcacaaaggtcccggggtgggaaggaaggcagtgtgcatgcatgcagggagaggggaggcagtgtgtgtgaacagagagagggaggcagtatgtgtgaacagggagagggaggcagtgtgtgtgaacagggagaggggggcagtgtgtgtgaacagggagagggaggcagttcatgtgaatgcagggagaggaaaggcagcgcatgtgaatagggagaggaacgcagtgtgtgtgaacacagggagagggaatcagtggccggtgggggtgcagattggggtggcgaggccaagaccacacctctggccagctactgctccttcaggaggcagctgaggtttcgtctcttccaggaagccctccctgaatgcttccttgagcccttcctttggcccttgctgtccttccatttccgtgctgaactgtatttggtcgcgcatttgtctgttttcatctctgggctttgagtgctttaagcgcagggctgttggctgttattgccgagtccccagcacccggtgtgagtccggactcacaggaagcaagtggggtagtctggaaacggtttgttcaaatggcagtggggtcgtagaactcagtgagaaagacacagacccagccatggccctgccggtccaaggacgttcacttcctcatcgctgctagggtggcaggctgtcgagggccta

SEQ ID NO: 7307 - DNA, 854 bp, Artificial sequence
  DNA replication origin
ctgtggaggcaacatcagaacatccagcccagatacggggggtcagagaaggcttcccggaggaggtgatatctcaattgatatctagtggggattaggatttagccaagtgaagagagaaactaaagagttccagacagagggaacagtatgtctaaaggcacaagtgagggtttagcacagtggtcaagagtgcaggctctggggccattttccctattaactaaccagctgtgcaaccttaggcaaatgacttacctttctgtgttttcgttttcccatctacaaaaatactatacaatgcagaatattatacacgtttatagggttgttgtgaggattaaatgctttcaataaatgtcaagtgctcagaacagagactggaatatagccaatatcaatgcaagcttgttctgacaggtgcagaggctcagagttcagagcacagtggctggaccctgggctatttggcagtgcagggagttggcagggtggggtttgggggagcagtgaggactgagcctgcagaggtgagtggggctgggggaaggaacttggagtctgtgttgaagtggatctcactctcagggcaactggaaccctcagatggttggctatgtggagactgggctgggtctgtgtgtgtgtgtgtgtgtgcacgtgcatgtgtgtgttggggggtgtctagtggctggctgccacctgagaggagcagatgctgggatggggagaaggggatagtcgagaccactcccccatgtctagctttggtaggggtgggtgttggggacacggttagctgcagtcatccatcttttaagggcggtctttatttctcagatcctttttttatt

SEQ ID NO: 7308 - DNA, 1111 bp, Artificial sequence
  DNA replication origin
gaaatggaagcatttgaagcaaaatcacagacttactggcattacagctcagatgcacaaaccttctttctccagaacagatccgatttccgcacatgtgcctactctgctgtgtgtgtgtgtatacttatgtgtgtgtgtgtactcatgtgtgtttgtgtgagtgtgtacttgtgtgtttatactcatgtgtgtatacttgtgtgtgtgtactcatgtgtgtttgtttgtgtacttgtgtgtgtgtactcctgtgtatgtactcgtgtgtgtgtgtttgtactcatgtgtatgtgtgtgtgtatgtctgactatattggggtacatgctcagtctttccattgccccctttcattcccttccttgaagtccctgtgattgtggaagtcaatcctgtgtgctctctggtggcaagggaggggaggtgtgaggggagggtgggggggctgggtgccaaaaaggagccagctacgcagaggtgaaggagtggtgtggcagagcagtcaggcagaaggtgcaagggtcctgggggaaagagtgtttgtggcacgttcgagaaataccacagaaatctgtgtggaggaggtcagtggaggggtttggttcaggtcgcataggatcctcttggccattgaattacgtgtgagatggggagacatgatgggggctgagcagagacaccgtctgacaggcacgtagaagactcgctctggctgttggtaggaaggtcaggaatggtggcagggagaccagaggggtggctgctgcaattgtccaggccagaggagcagtggctgcagtcagggttgcagcaggagggtggggagaattctggatggagtctgcacagatctggaagtggagccaacaagatttgtgtatgggttaggggtgtgtgtgtgtgtgtttgtgagagagaaagggagagagagagagagagactgatctcagcggctggaagaatggagctagtatacaatgaaatggggacgtctcagaggtgctgatgttgggggaaggtcagcggttgagtgtctccacattgcttgagataccatctaaatcagtagttatggtaatgcagagaagaggtagtgagcctccctccttt

SEQ ID NO: 7309 - DNA, 933 bp, Artificial sequence
  DNA replication origin
gaactcatttgttgaagggggaagtcatgtgctccaggagggcaagggaatggggcattgttgaatcctgccttatccctgagcccccacaactagagaaatacgagtaacaccagtggaaaggctgccttccttccatacctgtggccactaggtgctctcagccctgctgcaggctaagggcgtggccaccccctgcccaggtagcctacaaggaggtttgtgccaagcccagagccagagcaagagctggctctgcctggaggagctcatgcgagttgaggagataaggcacaaaataattagtgagcagagtgtataattaagcgctaaattgtgtgtttcagactcactgagctgtgggagtgtgaggtgggggagtcacaccaggctggagtggctgggtgaggcagcttctgcaggttgggggcacgactaaggggggcagcccagagaagggacaaggttccaggtgggggcaaggcaatggggcgaggggtggcaggagcacagtgaggtgcagagaaagggaagagagcggccatcagtgtgatggggtctgcaggttggggccccaagactgcattgggtaagcagtggatcccagcaccttgtgatacgctgggcctcatgtaccacatctgtgaaatggggatgctggatgtattccatgggcaagtctgtgtacaggtccagcccagggtctggtacatggggacacccaagcagacagacaggcaggcacatagacagaggggacaggcagacagacgggaggagccaggtggtcagacagatgttcagacatagatgggccagacagacaagcaagagaagttcaaatagacagctggattcctgtgtcccagcacctggcccttccacagccctgaccagagcaggtcctacccaccctcatcctgctctgagagg

SEQ ID NO: 7310 - DNA, 1179 bp, Artificial sequence
  DNA replication origin
caacgcccggcctctggaggccgtaggggctccctggcctctcgcccccagtgcagcccgggcacagtgcagtcgctccgcgccatgcttgacgtgggcaccagggggcggtgcggcaccaggcatggcggcgcgcggggccgggctccggaaggggaggggggcggaggggaggggaggggagggtagggaaagggacgggaggacagcaaggggaggggagaggaaggagaaagaggggaggagaggggaggtgaggggagagtaaaagaaaggggaaggcagcgagaggaggggagaggaggggttggagtaggaggggaggggaaggaagaggaggggagggaaaggaggaggaggggaagaggagggggcgcctccggactgccgcaggcccctctcagttgcgcctttcggaggggctgggcagcgcctgccctgctgcccagccccgggctgtgcgtctgctctgagctgcgccaacaccgcctggcttactcccctacccctcccccggacccagtccttgccccagctccgtccctcctcccttgacccctcctgagtaccccagcttatgtcccctctccagcacccagtccgtgtctcacctccagaccccagctcgcacccccagcctcagaccgcacccattgaccacagcctgtgcccctccctccccagtcgcaccaccttcccaaccccaatccttccctcctgagttcccctccgagcttcattttcttgcctggagctgtttggagccagactctcagggtttgagctgagcctgccgctggccttggtgtggaatggaaagcccaccaccgagctggcttcaaaccctccagggctcctgtcaccttaaaatagaatccccatgaatgccctgccgcccagctgacaccgcggctcccctctcccctcctctcctcttgcagcgggcacaacagccttcctgctatccacaaggcctcagggttgtgcctgcctcctgccccagcacgtgtggctcccttgcctggaaagcccttccctggcaatgcccctcaacctctcctgatggcccaaaattctctctccccccgatggaccaagtagtcccaattcctccctggatgtttctgttccactcccctatttattccttcctttttccccctagaacttcagggcagc

SEQ ID NO: 7311 - DNA, 1489 bp, Artificial sequence
  DNA replication origin
gcccggctaatttttttgtatttttagtagagacggggtttcaccgtgttagccaggatggtctcgctctcctgaccttgtgacccgcctgcctcggcctcccaaagtgctgggactacaggcacgagccacagcgcccggccagattctctttctttacctccttctctgctcagcatcaccttcccagagcaacacagctgaacaaccacactagaaagcagccccttttgttgttcatctatccacacagaggaaacagcagtgaagaaaccagacaaaaatccccaccctgaaggggctgatattctattgtgggaggtagataatccagcagacacacatagaatctgcagaggtttatacagcagtgagtgctagaaagaaaaacaagcagagaaggggaaggggaattgttggggtggggagaagaagcagaaagtgtgaataaactgtgcaggaaagacttaggaaaaagtgacttcggagttaagatatgaagaaagtgagggggcttcattgtgggtatctggggaaagaagtgggcagccgagagtatagtaagtacagagggaacatatatcaccatggaacagtaagtgcaggggaacagtaagtgcaggggaataataagtgtaagagaaacaggaagtacagtgggaacaggaagggcaaggggaacaaggagagcaggggaatagtaaatgcagggaaataggaagagcagggaaacagcagtgtaggggcacagaaagggcaggtgaacagtaagtatgggggaagagtaagttgggggtaacagtaattgtagggggattaggaagtgcagggggacaggaagtgtaggggaacaggaagtgcaggattaatagtaagtgcaggaaacagtatcagcaggggaacggtaaatgaggggcaaatagcaagtgcaaggaggcacagtaagtgcacgggaagagtaagtgcaaggggagcagtaagtgaggggacagtaatcaaaaggtgaatagcaagtgcgggagaacagtaaatgcagaggtaacaggaagtgtaggggcaacaggaagtgcagaggaaatagtaagtacaagggaacaggaagtacaggggaacagaggtgtgtaagcacaggatgtctggggacacaggaagtgcagggaacagtaagtgatggtggaacagtaagtgctagggtactgtaagttcagaggaaacagtaagtgcacaggaatgataactatagagtcctgctgttgttttacccctgagactcctgttcacaaattaactgtgctaacttgtttgttaacacagtttcttgttgatctcccttattgtgtaagttccatgaaggcagggattttggtatgctttgtttactgctctctccccagtgcctaggatagtgactggtcttattgagtgctcagtagcaattttgttaaaggaatggatggatgaatgaattggtgggtgctgtagggtgggg

SEQ ID NO: 7312 - DNA, 1752 bp, Artificial sequence
  DNA replication origin
gccggggcggccggggcggccggtcctgagcgcggcccgggctgtcaggtaaggaggggccttctccccgtctcctgccgcagctagagggggagccccgtccctcgccccggcgggaagcccagccgccgttcccctccttgctccgcgagcggcccatttccgctcgggcgcagctcggacggccaaggcggcgtttgggagggaaggccctggatgtgggaacccacgggaggggtgccgggcagtcgggagtcgctcggggcgcgggggcacgcgaggcccgggagggagccgcacgtagcggcgtcgggctcggccccggctggaggcagtgcgggtggagatccggacctcggcgacccggtccggcgcggggtggcggcacgggctccagccccacggtggctgcccgcagcggccgaggtgctcctgagccaagcctgccgccggttcggggctttgctgccccgtgagggggccatgtcgaagcctccgctccctctggactcggggaatgcaggtgggggctggctttgccctcttctctgcagtgaggaggggccgcagggtcgtccagtccccagcggggcttggcggtgctggagattcagttgttcccgtcataacaacctgttgagggctcgtgtcgtgccaggccttgttctaggggaccgagtcctgagcactcccgggatagagagtagtaaatacccagacgcggctcgggcgctggagacagctgagaagggaaggcttctcagaggaggtgtcaggagagagctgggggagagccagcccaaaggccctgaggaacggaccagctcagcaggtggaaggcaagcagggagggcaaggtgcaggtcagattgggcccaggcctccccatcttactggggtctccggcttaggacagggaccacacgcctgccagccccaaggccgaaggacaacaggggagagcaaagtaacttacttggcctctgccctatggagccttccccaccttgtcacccctgggctccaccccttctcaccacccttaggccctagggtttgtaagctcaacaacccgtcggtgtgggaagcactgagggcccctctccccagggtttcctatccggtagctgtgggtggggtttggtcaatcctgttgcacagatgagagagcagggaaagctgagtcccagagaggagagagaaggccttacccagtcgttctcagcgggtcctgcattgcgtgaccatgacctgagcctagccagcatcctgtccctcaactgggtgggagggagggaggcagaggcccctggaatgttgtgagtctgggagactcctcccaggtggaagaaacagtctgtcccagtttccctgttcctgggaggcctggggttgcccagggtgctctgcaccgcaggaattcctcctctgagaatcacccctgggctccaccccttctcaccaccccttctcaccacccttaggcccctatcgtgagctgaccaacccctcccacttctttgtcagtgcttgggagcatcagtctaagagaactaagtagagaaggctgaggactgaccccttctctgcctctcctctcctctgtataaggggacagtaattgtcctctctcccttagaaggcgatgccattgttaagtgtgtcaccacgtgtaaagcactgagcaccatgtctgcacataggaagtgtgcatcctattaactaaaagtcagtgcgggccaggcgcagtgg

SEQ ID NO: 7313 - DNA, 1194 bp, Artificial sequence
  DNA replication origin
atggcgtgaacccgggaagcggagcttgcagtgagccgagattgcgccactgcagtccgcagtccgacctgggcgacagagcgagactccgtctcaaaaaaaaaaaaaaaaaaaaaaaaaaaaacagcatgttgctccacaccgcctcgtgttgtgtgtcggcgcgctcgcagggttcgaaccgatacaagaaccttacagagggtagttattaggcctggtcacacatgtcccatgacttctacttcctggcacatggtagggtggcagtttcctgccctctggaggctagaagcggtggccaattgaatgtgcgtgagagtgatgtgtataactttctgggaggaacttgaggagccactggattccccacggctcattgtggctgtggtcattcgtgattacgcaggccggcattgcccagcctctctggcgaatatagaagcctaaacttaggtatgcacatttgggtgtggtccaggctgggaaagtcccagaggatcacaaggtggtttcttccccaatctccctgtgtttttaggacaggagcaaggagaagaatgggacccaatctcattccagcccagcggtgctgtcgcaaggtgtgagtcttggggtgcctgtaataactgagtgcctacaatctgcacgaggctctgagtcagcctcaggatgctgcaggggacatcctgcagcttggctctcttggctccatcctcatgacgctggaattctataatagggtggggagactggacggggaggcaggtaaatgaaaacaatcaggtgagaattaagatgctcggaaggaaatgagactggacagccgctccagcgagggtgtccacaaaaccctctagaggacatgatgtggcaaggagccagctctgcgggggaacaggtgtagagccaggagcaggaacaagcttggaacagccgagggacagaaacagagacccgcatggcttgagtatggtgaatgcagcatcgatgccaggggataagacaggcgcaatcagggagggctttccagaggaacaggcgtgaagaactgtggaagttagagttggggagaggcgtcctggctgtgtcgcttcctcattgcgcggctttggtcaagttatttgacctctccaagcctcaggtggccctgtaaaaggtgactataatgactgcctagcagggttgctaaga

SEQ ID NO: 7314 - DNA, 1508 bp, Artificial sequence
  DNA replication origin
ggccgggacacgcgcgctcccggcggcgccgcactctggcccctttgttggcggcccggggagctgtccagcaccgcgcccacgccgccgcccgccctcccgcgctcgggcccggagcgcactcacccccaaccagcagaagcagcagcggcgaaagcagcggcggcagccgggcggcccgcagcagccggcccatggtgtagccgtcgccgcctgcagccgcagcggcgcggcgcccgggcccgcgtcaggggccgcgcgggcggcggcggcggcgcgcgcccgccccattggtccgcatggccgtcactcacgcccggccccgcccggccgcgtgccgcgggcgcgcccccgcggagacgaagcggacgcgcgggcggccgtccctccgcccgtcccccccgccaggccggccaatcagcaccgccgaggctcgggggcttggcccggccgcccgcagacctgggcctcgcacctcgcgcccggatgccgctctctccccgcgcggtcacccgttccctgggaagcagagtgggcagctgtggcagatgggactgatgggacgaggacgacgcgtggaaatgactgtgagggtggacagaggcctggggtaaggaaagacttctcagggtacttagattgggtgagccctgaaggagaacctgagagcaaagaactggactttagagctaggcagtctggctcaggatcagattggttccgagaccttgagtaaatctcttctcacctctgggccccacttgccccatttgctaactggggggttttagattatgagagaggtgctgacttctctaacatgtgctcccttttggcaactgaagatccttaatatgccaagcactgtagtggtaaataaaacaggcacatccctcgtcctcatagtttaggctcgtagagaaaacagactgaaaaacaaaatggacacacatatggtcctatgattgcaattggtagtcggtctgttaaggagtataaggggctaggagacagcacagaggggaaccttatgcttgccttcctgaagaaacagcatttaaggtaagctggctggcatctggaaggatgagtgggtattaggtaggagattgggtttgggagagaacttacaaggcagagggaaaagctcactgatagagttcctgagttagaaagaagctcagcctcttttagggagagaaaaaccccgactacccttttagaagtactgcagcttaaatatacagcaaccacaattttgtggaatgttactttatatataccatattaggaaaacacttctttaaaataacaaatcgttatttgaatatgctttttcaaagtatatccccacccccctatgcaggggtatagcatcagacattggagataatctcacgggactcttccagactaaatattaatacttaggagaaataggagttggggtggaggagcatagggaagaaatgggttccagacaaaagaaagaacatgagcaaaatgta

SEQ ID NO: 7315 - DNA, 2514 bp, Artificial sequence
  DNA replication origin
ccgggcgtgagtgacggccatgcggaccaatggggcgggcgcgcgccgccgccgccgcccgcgcggcccctgacgcgggcccgggcgccgcgccgctgcggctgcaggcggcgacggctacaccatgggccggctgctgcgggccgcccggctgccgccgctgctttcgccgctgctgcttctgctggttgggggtgagtgcgctccgggcccgagcgcgggagggcgggcggcggcgtgggcgcggtgctggacagctccccgggccgccaacaaaggggccagagtgcggcgccgccgggagcgcgcgtgtcccggccgggccgcggcgccgccccgacacacgcgcacgaggagtgggtgcgtgggggccgcggcgggcgcctggcgtgccgggcgacccccgacaaaggcgcggcggtgaagctgggacacagcaccgtggcccccacgccgcggctctcaggggcaggtgcgcaggctgctgcctcgcgggccgggggggcgcgcacgtgtgggtgtgcatgtgtgtgcgtgtgcttgtgtgtgtgcgagtgcattgtgtgcctgcgcactcgggggaagaggcgtgtgtgacagccacgcggggaggaggccgcattgtgaaggtcccaggggccgcctgcggagtgtggggcgggtacgctgaggcgcgggtggctgtttacgcgtggcgttgccgggagggagtgtgagtgtgtcacggtgaatgggtattctctcctgttctgggcgactctattaggagctgacaaaaacgggcgtacagccacggaaggcccgtgacagcacacggcgggaggctcccacgcagctcacacacgagggaggtgtgagactcagatgtgtggtttccattcagcagccacgccgggcggcgggctgtgtgggtgcgtggcgggctgggggtgtggcacaggtgtgaaagggatgtgtctgcctgagagagaaagagacgggcctcctgatggcttccagcgcagacggggatttagtggagggggtgtgtagggaggtgggcatggggtgtgacagcccatgaggcaggcggccactatggaaatggcggggagaagggctgtctgcaaaggtgggtcaaataaggtcatagctgagcagctcctgcacacactggcagagcagagggagtgtgttacggtgtatgttaaggtgtgactggtgctgctggaggaatacccggatgaggaagtgtgcatgtgtgcctgtgcacactcatcagccagctgtaacttcacttctgatgcacacgtcaaaatagcgtcctagtatgatgtgtgtatgtgcatgtaggagtgtgtatgtgcatgtaggagtgtgcacaggacatttcccacgcagctggcccatgaagacacaggcactttgtgtccagatgtgtgtgagtgaaagagaaactagtgaagggtctctatgggaagggaggaacagtctttgcctgaggtgggccatgaacctgggactcagagtggcagaatcccagggtaaatggctgggaggggaaagtggtccctcgcacattcctgtgcatgtcatgggaaggctcagttcagggagggtacattttctccacagtcagtctagggatgaagaaaggccctaggtggtgtgcacagaaaaacatgtccatcagtgttggctcagacactcacacaaacccacctgtattctttcacgccgtaaatcctctttggaaaaaggcgacattcaataaataaacatcaattgattggtctgctatttctttgtgtgacagtcataaaccagaactggccagcaacgtcctcatggacccaggcccagctgtaactgcccatgtgcttatgtgaccagctgtgaggactgcaggcagcctgcctcccggctcctctctcccgtgcatgctcttcatgacgcacttcttaccccctgcttggagggcatgtgcgtgtgtctagcagtgtgtctctttcttacacacctttgtgtggaagcccttcagggacctgtcagcattgtttctcaggtgcttacagagtggaggtagcgtgactgtgctcagcagttcctgttgtcgctgacacttaagggtgaggagctgtgtgacagatgctgcagggcccctcccatgttggtgtctgccaagagcttagggagactggacttcaaagaccctgcttaggggagaggtggggtgtagctgatggtggaaatcagaaaggagttttgcaccgggagcagatcacagggactgatttgaaaaggtaagataaaacatgaggatcgctggggtcttgtttttttcacctccccaaatgtcagcctgcttcctttgcctccttctgtgtttgtttgggtcagattttcatttctttgaggctgatcccctaatccttttcatgtgccatctttttctctctcctctgttgggtgtgatgatgtaacagaaaattataggtgctagagggaaaaaggaaatcaatcacacgcagagtg

SEQ ID NO: 7316 - DNA, 2103 bp, Artificial sequence
  DNA replication origin
gcggcgcctgggggccaggaggcagccctgccatcttaggaggtgcccccacccagtgcagtctgctggctgcctggcccatcccgatcaacctctcctacccagctgccgcacaagcttggatgggatggcagggtcccccagtcctgctcctcacaccaccttgcctatggggtccttctgttcctcatctcacttcttgaggacagccaccatctccaccaaaactgcctttgctcactgtagagtccagtgccctgtcatcagccctctccactcccgaaggtgctgccatttttggcaggagagatgagtggtataatgctggccgcctcttcatccttgcatgccaggggagcagaggccctggtggtggtgcttttctggtgagcatgtcgaatgcccactgagcaccacactgtgcaaggctctctccctcagtcctcgccaccaccccatggggttgtgagggttaagtgaggcacctgttgagtaccaatggtgtccccatggaagatgagagctgaagcgggagaggttaggtgacctgtctgagatggcaccagcagtaagcggtagagccaggctttgcaggaagcctgattccggagcccgggcctttcaccacactgctctactgcctggagggccactgaggcccttcccagttctggaatcgtgggtccatgaacagtggggctgctggtggaagtgtgggctaaccttgaccttttatacagtcctccccctgcttttcgctgcccctgagtattctggcgttactggtcacttaattcacactgacttggccaaaagtcatgctgggtctttggaaatatactcaggtgaatctagcaagaaaaactgacccttgataacaaaaaattgagaaaagtactggagatacacgggtggttcacagaaaccggggaagagctgcaacctgaactcagaaagggggcctggtgcaacctaggcctcagcactgggaactgccctgatccctcacctgaggagcccctggtggtgctcgccctcctgcttctctctgctaagatgctgatctgtggagatagcacctgcctggcccctggcgccgatctccttggccagagaaggcaggactgaccatgacaacctgcagcgtggagggatgcaggcagctacatgccagcagtgaacacgccatgggaagggaggaagctgggcagccggggtggccccccatgtggcctgcatgccctcagtatccctccctgcaccggccctggcatcaggaagctgactggtccacccctccccaccgaggtggaagcggttgtatggtggaggatgtgtggggggctcacatctcctgtctctctaactagttaggataggtgtgggcactctctctagttggatggtgtccagcagcatgggtccactctcactggaggcctagggccacagtgagctcagactcagcggctggggcagaagctatggtgggatgtgaaggaggctgggaacatgggcatggggtggagaggcctccaggtgtactgaggcaaacgggatgggcatggggtagaggcaagcccaggcgccagggaacttcaggagccgggagtgccagcaccttctaagcctgctcccccatccccacccgagcccaatgcaaccaccccagaggagccatggcaccccaggacctcagctgaggaaactggcccctcccacccctagattggcatccagaactattccacaaccagcagctgccaggcgcgggccagccaggtgcgcagcgactacggcacgctcttcgtggtgctggtggtcattggggccatctgcatcatcatcattgcgcttggcctgctctacaactgctggcagcgccggctgcccaagctcaagcacgtggtgagtgtggggacaggtggggctgggggccagttgagaggagagtgcccatcgataggtgtcctcatctgcaaggggaggcagtgactctcctgggcgcacagggtcccgtgggtgaagcagctggtcagcctagcactgctgactgctctgcagggcaccagccccaggacaggtgccagaggtgcagggagt

SEQ ID NO: 7317 - DNA, 805 bp, Artificial sequence
  DNA replication origin
gctgaggaaactggcccctcccacccctagattggcatccagaactattccacaaccagcagctgccaggcgcgggccagccaggtgcgcagcgactacggcacgctcttcgtggtgctggtggtcattggggccatctgcatcatcatcattgcgcttggcctgctctacaactgctggcagcgccggctgcccaagctcaagcacgtggtgagtgtggggacaggtggggctgggggccagttgagaggagagtgcccatcgataggtgtcctcatctgcaaggggaggcagtgactctcctgggcgcacagggtcccgtgggtgaagcagctggtcagcctagcactgctgactgctctgcagggcaccagccccaggacaggtgccagaggtgcagggagtgagggggctgctagccccaccagggggcccctccctggcaccaccagcccctttccggcgcaggcactgcagggcctgagcacctgaatacctcaccagaggcaggccctgcgttggtggtgcccaaggatcaaggagaggctccagcagcctagaggcctccccaggaggaagcgagcagagccctagcgatgctccctgcccacctcgcaagtggagtcttcttagggggctgttgggggatcgatgacgtcagggaggccacggggctttgtagtgccaacgactagtaggtttattttgagaaaggagttgagctgcagcaacagaaaagaaggatctggcacctgtggagggtgccgcgggaaccccctgggtggggttgcacagacggccgcgg

SEQ ID NO: 7318 - DNA, 1563 bp, Artificial sequence
  DNA replication origin
agatcaacttggctgcaatggcaagagagaggcaggcaccgtgtccggggagaaatgctgatgactgggcccaggtcgtagaagtagagatgggcaaggtggacagagaaaaggttttaaagtagcaataatagtacttgctgattcgactgggtggtaagagaggaatcgtggtgctttgcaaatgtgtatcaaggcctttgaatgcacgcacgcatgcatgcacccacacgcacacatgcatgcacccacgcacacccgtgagccgggctccctgctctcaccattggccagaaggtagagtaccagctcctcgtgcccacacaagcaggcatagtacctgaagggaggaaggaagtacaggaggcagtcctcagtgctgaaggggtgcaccaacccccaccctccccacccctctctccagcactcacaagggggtgctgtcccacttgtcccgcacattcacctccacgtctcgctgctccagcaggtacctgggcaggaaggaggtcagagcctgggtcaggacgggttcatggtctgagaaagaaggcccgtggaaaggaacggagagaaaacatcccttttggtatggggaagcctcccccaggtgagggcaggtgacaggcagaccagagcaggagaggcactcaaggcaaagtgcaggcaaggatgtggaggtggggtcgaacaggcagacactgtgtgctatcagtgctgggggacgatgggctacagggacagaagccagagccagtgccgaggctggacctttggcctttcagcgtttgggagaggaggtgatggagccttcactcccaccagagctctctactgcaggaagaagctggccctgttagaagcagggagcccgggaaaaagctgctgcaggcctcctgatggtgtggagggcacacaattctaggaggcaggagtcgcgggatacagcaactgatgggatgcggaaggtgagcgaggggagtcgccaatgctaatgcagccccactgaggcgggggcagcccaaaggaggcctccaggctgcacctggaagtgctgtgaacccactcagcgttgacactatgcactaactcttgagtggcacgggatgtcagggagcggcccagggaggctacgggagtacagcagcccggcgccagcccaggggaggtggaagcagtcagtcagcaccaggtcaagggggaggaagggccaagaaaaaaggaggtcaaacgggatagtggaagcccaaggaggggaagggccccagaacccaactgggcaccccttccctccgcgtccggcccatggagggggcatctcagcgccagattcactttagctgcgtcaggagtttccgaatcctcagggaccggaggccgattatgggctctaggtgttccccgcgccaggtccagagagcacgagagaaaggggccacgtctggagtcccaggcctatacccgcgccctgcgcccggggggtctgacgtccgggccctaccagggcgaacagtggcccgccttctctccgcccacttctgcgccttcgggcctccgctgagc

SEQ ID NO: 7319 - DNA, 887 bp, Artificial sequence
  DNA replication origin
ttgggctcaggagtttgagaccaacctgggcaacatagtgagacaccatctctgcaaaaaaaatacaaaaacttgccgggcgtggtggtgcacgcctgtagtctcagctatttgaagatttgaaggggctgaggcaggaggatcacttgagcctgggaggttaaggctgcagtgaaccgagatcacactactacactccagcctgggtgacagagcaagactctgtctccaaaaaaaaaaaaaaaaaaaagaaaaaaccaaaataggaagaagaatggcactgaatgaagggaagtcatgaaaggtcactctgtaatggtggcagcatgcagagacctgaatgaagggggagtgggccatgtgaacgtttgcagaacggcagtccatgcaggaggaactgcaggtgcaaaggccctggggcaggaacaggggcatgcatagcacagtggagccccagcgaggccagtgtagcagcaagcaagcagcaagcaagcagggagagccgaaggaatgaggccagtgggagggcagaccctgtggagccttgggcatggccaggcaggctcactgtatcctagaggcaatgggaacttgctggaggatttttagccgatcagattcattgtgaaaagatcaacttggctgcaatggcaagagagaggcaggcaccgtgtccggggagaaatgctgatgactgggcccaggtcgtagaagtagagatgggcaaggtggacagagaaaaggttttaaagtagcaataatagtacttgctgattcgactgggtggtaagagaggaatcgtggtgctttgcaaatgtgtatcaaggcctttgaatgcacgcacgcatgcatgcacccacacgcacacatgcatgcacccacgcaca

SEQ ID NO: 7320 - DNA, 1883 bp, Artificial sequence
  DNA replication origin
tggatgagtgtgggtatgaatgagtgagatcatgagtgaatgaggggatgaatgaatgaaggaacaagagtgagggaatgagtgagaaaatgaatgagtgagggaatgagtgagagaatggatgaatgagggaatgagtgatgagtgaatgaatgagggaatgagtgagtgaggaaatgagtgaatgaatgaaagcgaatgaggggatgaattgagggaatgagtgggtgaggaaatgactgatgaatgactgagagaatgaatgagtgagggaatgaataagtgaagaaatagaataaataagtgaatgagtgaggggatgaataaatgagggaatgggtgagtgagggaatgtgtgatgagggaatggatggatgaggaaatgagtgagagaatgaaggaatgagtgaacgagtgagtgagagaatggatgagtaaggaaatgagtgagagaatgaatgaatgaacgagtgagagaatggatgagtgaggaaatgagtgaatgaatggatgagtgaagggatgaatgaatgagggaatgagtgggtgaatgaatggatgagtgaatgagtgggggatgaataaatgagagaatgagtgagtgaatgagggaatgagtgaggggatgaatgaatgaaggaatgagtggtgagggaatcagaatggataagttagggaatgaatgaggaaaggagtgagaaaatgaatgaatgaatgagggagggaattaataaatgaaggaatgactgaggaaatgagagaatgaatgaaggaatgagtgatgagggaatgagtgagaatggatgagggaatgaatgagtgagagcatgagtgaacaaggggatgaatgaatgaaggaacaagaatgagggaatgagagaaaatgaatgagtgagggaatgagagacaagtgaatgaatgagggatgagtgagtgaggaaatgggtgaatgaatgaaaatgaatgaggggatgaactgaggaaatgagtgggtgaggaaatgagtgatgaatgagataatggatgagtaagggaatgaatgagcaagtgaagacatgagagaataaatgggtgaatgagtgaggggatgaataaatgagggaatgagtgagggaatgtgtgatgagggaatggatgggtgaggaagtgagtgagagaatgaatgaatgggtgaatgagtgagagaatggatgagtgaggaaatgagtgaaagaatgagtgaatgagtgaggcgatgaataaatgagggaatgagtgagagaatgaatggatgagtgaatgagtgaggggatgaataaataagtgagaattgagagaatgaatgaatgagaatgaatgaggggatgaatgaatgaggggatgaatgaatgagggaatgagtgagcgtgggaatgtgtgatgagggaatgaatgagaggaaataagagaatgatgagttagtgaatgagtgagaggatgaataaatgagagaatgagtgagagagaatgaatgagggaatgagtgaggggatgaaagaatcagagaatggatgagtccatgagtgaggggatgaataaatgaggaaatgagtgagcgagagaatggttgagtgagggagtgatgaaggaatgaatgagtggccaagggagggagagagggatggaaagagggaggaaggaggcaggaaggctttatctgagccaggcactgagctgggaactgggtgtggaagcagggttggcctcgcagcctggccacccatgcagaggcccagaccccaccctagaaggtccgtgcgtttgggtgagtgctctactgttgctctctggaaattcttaatgctctttgagcaaggtccccacgtgctgttttgcactggaccctgcaaaccactcaggccctg

SEQ ID NO: 7321 - DNA, 915 bp, Artificial sequence
  DNA replication origin
aatgtagtctctattctgagcagttgtgtaccgaaggaaacatcaaggttctgtagggcagaacaagaattggggcaactaacagcaggcaggttgacaagcctctctgtgccttagtttcctcctctgtgtagtggagagaatgagagcaattcctcatacaggggagttatggaggcccagtgagttactgcatgcaaaaacacttagtgccgggcagacagccagagctcagatgtagctattattacttttattactcaatgagaccctgcatgtcgcagccctgcacaggctggtagatggcgctgctgttggtgactccaagccccaggctcttttgcgggccctacagccctccttccctcagggctcctggctgaccctggggaagcaccccctgtggttgggcctggccatgggcccccatgaactgccctgccagtcccgtgtcctctcaggctccgagcagatggcccggcccagcaggactcatgccagctcagctgcaggaagtggctaatctgtctcgtgtggatttacacaaatggtctggtttttggtgctcagtccccagcatgggaaggaatccagggatggcaggggtgactgcaggacagcctctcccacttggtgtggtccagaattctggccgaggccttgtaggggtggcagcagaaggggtgtagctcagttcttggaaatgctgagtcctagcacagtgggcaccctggttgcccggggagcagctggcagcatgttccttcctcgtccccacatgctctctgaccctcacccagtcctcaccacgtggcccctccccaacccaccaagaacccactggcaaggatgacaaacatgaatgaagaagcatcatggggccgggcgcggtagctcatgcctataatcccagca

SEQ ID NO: 7322 - DNA, 1473 bp, Artificial sequence
  DNA replication origin
tcggacacgcgcgcacacacaccgtgcacacacacacacgcacacatgggtagcgggagcccacgccgggcgtgtccgggaccccagtgctgctccccacccctgacggcggcactggcgggctggggcaggggccgggaggcagttaccggggccacgagcgccgctgtcgcgttccccgagcgcagcggatcctcgtttgcggcgggccagggccgggacgagctgcgcgcgaccggcttcgcggcgacagggtgcggcgtctgcgccgccactttatccctgggccggctcggcggcgggggcggcccgaggtgggtggggacgcgcgggacccggcgggcggcgggcggcgcggggaggcggcgcccggggcccacgtgtgcccggcccgcggggaggagcgggggcgccgcccgccgacccagccacgcactcctctcctccgcgcctcgtggacagccgcgccccggggtggccgcccgaggactgtcagggaggcctgaactgagctgggttcatgggagcctcagcgcgggaggacacaccacacccacgggcacacgcgcgcacacagacccacaggcaccacacgtacacagacaactcgcgcagggccgcacactcaccacacgtgtacacatgtgcactcccaaagtcactacactgcacgcagggacatacagacacacatcccagagataccacatgcatacagacacacacagaccacacatgcatgcacacacacaagccgagacataggcacagacaacccacagagacacagaggtgcacagacatatgcagactatacacctggcccccacatagacacagacacactcacatcatacacacacagtcgcacacagacacactcacacttcattgcagtcagacacatacaatgctggaggggcaattaaccggtcgtggtggcatgcgcctgtagtcccagctactcaggagaatcgcttgaacccgggaggcagaggttgcagtgagccgataccacaccattgcacttcagcctgggtgacagagtgagactccatctcggggaaaaaaaaatgctggagggggtccacttgactctagggtagtgtaaaagcagatggtgcatggctacaaatgccttgtcccttcctggcaatccccagcaactctcccgttcccagcggctgtgacccccagataaaacctctggtgcatctacacaggccagggcacagtctgagctctgtccagtataactagcaacgtggccgtggagggtaaggccactggactgagactccacaccacctgggttgaacattagctcctccgcttgctctttgagcctcagtctacctaccttcaacctgtgagtgatatacctatgccccagtggagtgtccctgtctcacactgacctcaagaggccttcctgtctttctccgcaaaaaattctacaccatagcagcgttg

SEQ ID NO: 7323 - DNA, 878 bp, Artificial sequence
  DNA replication origin
agacctcaagccccggcatgcagcggggctcctggggcctgtcgggaaggggcctggcgcgcggggcccgccgggactgggggtgtgcggctgcgcagacttggtaacgcgagagcgcgcggggagggtgtgtcacgcctcccgagactggggctgtgcggcctcacggagaaactgaggcaggcgcgaagcgtcgagtgcgcgcgtggccctgcaggcaggcggagaccctggtggctcccatacacgtaacagcactcactgctctttgacgttagtgaatagaccgtaagctccctggagcagggaccttatcccagcgtctaccgcggcgcccgtcacctagtaggtctccgtcattacctgctgagtagggcgcgggctggtggggcttaccgagcaccctcgctgtctgagtcattaagcaaacccggaggcttgtcgtgggtgtgggtccccttccatctgagaacgaatgggatgagtttctggagagacttggccggagaagggccggggcagctcgggaagtagtctgcctcacagaagaattcaggaaggcctcctgggagagtacctttgtgccgagccttgatagattctggcgagaaggaatgagggaacaggttgaggagactgttgtgggcaaagcatggcggtgtgattgcctaagatcggtgtgggaaagggggataacgggtagggcaagggatgctggggctgggggttggaatttactttcaggcatctgtagtcagtaggtatgatgtcatctaagagaaacagacttaatgctgtgagcatttagcagggaggaggtgggcacgccttgtgggatcaggcaaggtttcatggagctaaaccttgaccaggacagg

SEQ ID NO: 7324 - DNA, 1204 bp, Artificial sequence
  DNA replication origin
ctcggaactcgggaatcgggagggagaggctcgcccaacccaaatacccacatgccgccagggaggagccgtgtgccaggtgtgcagagagggggccggagggcttcccaatgccagtgacaggagcgcagcagggacagccgggcgcgagtgtgggactgacccgaagtccgaactgccaaggagagcgagacgaggggaaggggggggccccggctgggtggactggggcctatcccgtgggcagtggggatctcagggccaagcggcagcggaggcaggaccagccactctcacttttcccctcgaaaaccacagcgttccagggccgcgaggcaccccgcgggagcttgcgaggacacagcgcccccgtgtgggcggacgcgcacagagtcgcgcccgtggcgtttcgggcccaggctccgcccccgccgcgctgcccctccccccatgggggcgtggccaggcctagcccagggatccgagattccaagtcacacccagcacgacttgggaagtcgcgacgaaagtgcgcgacttcccagcaagcgaggttgaagtcccggcaggcagggaggaaggcgtgtgtccccccgtgcatgcggggaaggagcagtgggggaaggctgagttgggctttcaattaaaaaaaatgtgcatacacttagttttttgatgcaaaattgccaaaggcgtgtaccgtgaaaacctacctcgacacctgccccctgcctcctgttccctttccggaagcgcctgccttacaccggtgtgttcctctagagatggccaggacctgggtgaggcagcacacactcacaggaccttcccaacactcattatgaaacatatcacatggaaaactgcaagaattacaggcaatcgcctctcagcctttggctaagatcaagtgtagtgttcttatcactttaatatctgctatctgaggacagtatgttaaatggatttttggagcagggagatggaataggaccttgctctttccactccatgcatccacctggtattgcagtacctccaggaatagtgcaccccctttgggggaataaaaaaaaaggattgcaggtgagcccccatatccctgtcatctaggcactgcactgcccatccccctgtctgcctgccagtcagtcttgtcagtcttctgtgcatttcaaagtgagttgcagatacaacaacctct

SEQ ID NO: 7325 - DNA, 1522 bp, Artificial sequence
  DNA replication origin
tatgtttcataatgagtgttgggaaggtcctgtgagtgtgtgctgcctcacccaggtcctggccatctctagaggaacacaccggtgtaaggcaggcgcttccggaaagggaacaggaggcagggggcaggtgtcgaggtaggttttcacggtacacgcctttggcaattttgcatcaaaaaactaagtgtatgcacattttttttaattgaaagcccaactcagccttcccccactgctccttccccgcatgcacggggggacacacgccttcctccctgcctgccgggacttcaacctcgcttgctgggaagtcgcgcactttcgtcgcgacttcccaagtcgtgctgggtgtgacttggaatctcggatccctgggctaggcctggccacgcccccatggggggaggggcagcgcggcgggggcggagcctgggcccgaaacgccacgggcgcgactctgtgcgcgtccgcccacacgggggcgctgtgtcctcgcaagctcccgcggggtgcctcgcggccctggaacgctgtggttttcgaggggaaaagtgagagtggctggtcctgcctccgctgccgcttggccctgagatccccactgcccacgggataggccccagtccacccagccggggccccccccttcccctcgtctcgctctccttggcagttcggacttcgggtcagtcccacactcgcgcccggctgtccctgctgcgctcctgtcactggcattgggaagccctccggccccctctctgcacacctggcacacggctcctccctggcggcatgtgggtatttgggttgggcgagcctctccctcccgattcccgagttccgagtgggtcccggcggaccagcgctattctggaggggcagtgcctcagaggcaggtcgcttcgagtggggatttgtgcgctctggcgcggaggaggggggtgggaagccggctcttgccctcctcacccggtggggagcgagcagggccaacggtgcgctgagagcgctcagggcgtccccaacagcatgacccgacccagggacgaagctctgggggacgggaccacttgcgatgacagctaaaggagcacaggggggcggccggcatggagaggcggggccggcattcctgcgggcctgccgggagggtggggaacctgggatttagccatgggacctgtggaagggttttgggtcggggtcctgaccgtctagtctgggttctcaaagatggttgggacagtgggcaggcttgcaaagaccgaagaggctggtggacctggtggctgaggcctaggccaggcagggatcgcggtggggaggtcacagtaggtgtggtccctcctccccccacccctcaggcctaagtcactcaggcccttgtgtcacggtggcaccgggacctccacccactacatacacacgcgcgcgcgcagccccgtgaaaacctgcgccgtgtgccccagacctgcagcccgcatcccgccgtgtcccccgttccctgcatgcggct

SEQ ID NO: 7326 - DNA, 1785 bp, Artificial sequence
  DNA replication origin
atgcggctccagtgtaagtgcagcgtgccgtgtgcggcgtcccagcccgcaccccgcaccccaccatgtccctctgggtgcggggtccgcatgcccgcgccctccccgcagctgccggcgtccccattaatcacgcggcgctgacggcgctgatctgcgtgctggcggcgtgacggtgacggtgacggcgggtgacggagcgggcaatcggcaggcgcccatcggcccatcttatcgcggcggcccagccgccgcccgctgcgcgccgcccattgatcgcgccgggcccctgcccgggggtcagcgcgggccgggccggcctgacagccgcatccgtcgccgagacgcgcgctgatggccgcccagcccgcacggcctggccattaatcaccgtgcctgccgccaagtgacgggaggggcggcagggcagcaggggacgacaggcagcccccgtggccggcccaccccttcacagttccggggccctgctgcgtggcccgccctgcaccctaagctccccagcccccctgcccaggcctccctcaccccctatcctcttatggcctgctctccccagaacaaatggaaggggagtggctgcatactggaggaagcaagaaagaggaacttctgtgtggagaatgaatggatgaccacggatgaagggggtgaacactgttctacctcccgagggacctctttcccagacaccaaatgagagcaggtctgacctgacaaacaccagcactggctgggacaagggggtggtcatttcgccccctctggctgcctcagccctagctgagcctcacccaggatgggatgctagggccccagtgagaagcagtgcgttgtttctggcagttgccccgtgctaccccctctgctcttgggctgtgtggccctgagccagtgctggcccctctgggctacagggctttttccaaacacagggggatcctaagggtccttccaagtgccagctgtctgcgatagggaggggcagggcctagcaggctgcttcctccagtttgacaaactgtgacctctttccaagtgggccaggaatcaggaactctttactgcctcttagtctcttgggtacctgatacagctacatgtgggtcacttcaccaagtcctcacatgggtctatgggatatgaacttcccactcacacaccaggaaaccaaagactcatggggctaggaccaagggccacacagaggaggaaaatgcaatcaataccatgccctgctgagccccagaacccctgggtcccctcccactgctcctctgcccacagccctccagagcagggccttcttggggtaccccagctgctctgcccagggctggccagtttctgagggatagaggtcgactgggagtgcaaccccagcccccttctgtacccccattttattacacaaatggctaaggtttgctaaccaagaagtcactctctggtgtgacagcatgattcatttagtcctaaaaaacaaactatcctaccaatcaatctggcaggtgcaaccctaagacatgtggcagtaagaaggtatctgcactgagaaaatgaggcagggcacaaggtggtttccctgccagggccagggacgcgtctttcaagagcccttcccagtctcacaagtatctctggggccattagcacaggagacagggcgctgggatttatgtgaaaattcctccctccctctcctcagccacccaatcagctccctgggtggcacccaagagagcctgcgctgagagcctggaatat

SEQ ID NO: 7327 - DNA, 1495 bp, Artificial sequence
  DNA replication origin
ggggagatgcatggaggagaaggggagaaaggaagggggatgcattgaggaaggagagggaagaggggagatgcattgaggaagtggggaagaggggagatgcactgaggaaggggagggaagaggggagatgcctttaggaagggaggaagaggggagatgcatttaggaaggggggaagatgagagatgcattggggaaggggtggaagaggggagatgcactgaggaaggggggaagaggggagatgcattgaggaaggggggaagaagggagatgcattgaggaagggggaagaggggagatgtactgaggaaggggggaagaggggagatgcactgaggaaggggagaagaggggagatgtactgaggaagggggaagaggggagatgcactgaggaagaggggagatgcactgaggaaggggggaagaggggagatgcactgagaaggggggaagaggggagatgcattgaggaagggggaagaggggagatgcattgaggaagggggaagaggggagatgcactgaggaaggggggaagaggggagatgcactgaggaatggggaagaggggagatgcactgaggaaggggggaagaggggagatgcactgaggaagggggaagaggggagatgcactgaggaaggggggaagaggggagatgcactgaggaagggggaagaggggagatgcactgaggaatggggaagaggggagatgcactgaggaaggggggaagaggggagatgcactgaggaatggggaagaggggagatgcactgaggaagggggaagaggggagatgcactgaggaagcggggaagaggggagatgcactgatgccccctgcccccttgtgcccaggctgggctcggattcccaagcgtcagtaaggcccttgcacacagcgtggctagtgttacctggagccccacaggaacactgctgccctgcccagctctcctcacccctgtggcgccctgtacccagctgaatcccactcactgagacctcaggggtcccccgaccagctcacaaaacctgttctgagtctccaggcagaccaggacgctccttaagccccgtaacctgttagcatctgtccagtgtgtgcctgtgcgctctgttgtttcctggatcgggcagacagccccaggtagacaggctgggtttattttgctcaccaccgatcctcagcacagtgcctgccacatggggcacactctgagaggaagggaatgatctggctttctaccatgtggcccagcaaaggcccctgaccatctgtggcgaccttacaaacaaaccctcgtgattaacctcccagtcactgcaacaatggaaaaccataaaagtgacaaggggcctaccagggagcttcaccagggagctttacgctcctcctcccagccaccccaagtatttgccatcccataaaactttaaatgaattacagcaatgctggattcttctgttttctatacaactg

SEQ ID NO: 7328 - DNA, 1166 bp, Artificial sequence
  DNA replication origin
cgaggtaagggcttggatttcaccctttggggagcggaggagtgacccaatcagatgggaaggcccctggggccatagggtgggctggcaaggctggggaaggttgggaaggcccccgggtcctggctgggggctgagaatgggggtgctggctctgttaggtcagcagggagcactgggcacaggacctggggtgcagcatggcacctcagcacatgtgaaccggagtgcacatgccctgtcactgttgatgaaggtcaccgtggtctgcaggccaggacagtgtggccagtaacagttacggcaataatgagaccagctccatttatggggaccctgcatggaacaactcacttaattcccactggcccgagtgctcctgtgtgtggagcgccaggcatgtgctgggtgctctgcctgacactgggacacagcagtgagcaaaaggacagaaacccctgtccctagagcccccttcccatgggaacactggcagtaaatgaggtcgacaggcagaatgctgagagtgggagagcccagctagaaagaagggtgaaacagcgggtgggaatgtggatttttactgcggggctgggggcaatggggctgctcaatgaagaatgggtggggagcaagctgggggcagcgggagctgtgtgcagaggccctgaggcgggagggagtacctgggacatccaggagcaggggctccctctcctgaggctggagacctaggaggagtggggagatggcagaggaggtcagggaggtcgtgcagggcctgggggtcatggtgaggactctggcaattgccctgaggaaggtgcgggcgagagggtttacaacagagaagaggggccctgacacgttttaacaggattctccggctgcagccggcagagcaggagaccagggtgaggcaattgtgatggtccaagcaggaggtgattgggtctggctgggctggtggccatggggtgggggctgactgattcgggacaggctttgaaggtgaagcaacaggacctgctgctggtcaggaaccctgctgggacagtgagaggcatggctgaccgcacccaccacgatcgctctctgagtcacaaagcaggaacccgcggcaccaggcttctgcaacagagggaatgtgtggcctcccatgacac

SEQ ID NO: 7329 - DNA, 1727 bp, Artificial sequence
  DNA replication origin
gtatccttttgcaacttttttcacctgttttcaggatttatccacaggacactcagacttccttcctttacctattgttgagtatttcactctatggccacacagcactgtttcagtgtccacaccactactgatgaacattgccattttttttctcctgtttcaggcaggactgccaccagcagccgtgccccacttctttgtgcacacatgtgagtgagtgcttgtgctcatggggcccatgcatttttaatttaatagacgtggcagctggccctccagagttgttgtgtgaagtccactcctaatagcatcaaattcccactgccctcactcttcaccaacacttgatattatcaatctttaaaaatttttaccagtttgaccaatgcaaaatggcacttccttgttgctttaatttgtatggggatgaagagcattactgactgggatggagtcagggagggacatgtgatgtcccctagtcttgaggggatggcacagaggggcccagagagcaggggcagaggcagaggtccagagacagggtgaggaatagcaactgataagttgaggggtgaccaaccccaactcagtgcctgcatgtgcctcattccaaatcctggtagcagtgctaatcagaggtgctaggcatagtcagggtgctaggcagagtcagggcaccccggccacaggggtgctgggcagtatcagggatgctgagcacagtcaagggtgctgggcaaagttggggggtgctgggcagagttggggtgtgagcagagtagggggtgctgggcagagtgggggcagggaatggccatcactgacaggctccctgtggctgtatgtggacagtctgtggggcacgggggatgctaaggtgtgatcccagggagtagcctggcctggggtggtgcagcagaatgggggaaggtcagattgggatgtgttggaagaaggcctgggccttgctggtgtgggcatggggtggtgggggcaggagaggagtcgggcagagccgcctgctgttgggagcacagaggaggcacaggtgggtgcgtggagtcctggggaaacagccaggctggaaaggcagatttgagccttggcagagacactgcatctgggctgtagatttggagcaggaggtgaaaactgcacttaccgaggggccgtgagctgggtcatgagcgggtgcagacaggtgaggagggggtgctgagggagcaggactggacgagggcatcagcgtaggcagagggaggcgcaggcccagtctggtctggggactccagtggtgggcacgtggtgggtttgggaggtgccggccacatcctagagtccagaatgccgaggtaagggcttggatttcaccctttggggagcggaggagtgacccaatcagatgggaaggcccctggggccatagggtgggctggcaaggctggggaaggttgggaaggcccccgggtcctggctgggggctgagaatgggggtgctggctctgttaggtcagcagggagcactgggcacaggacctggggtgcagcatggcacctcagcacatgtgaaccggagtgcacatgccctgtcactgttgatgaaggtcaccgtggtctgcaggccaggacagtgtggccagtaacagttacggcaataatgagaccagctccatttatggggaccctgcatggaacaactcacttaattcccactggcccga

SEQ ID NO: 7330 - DNA, 889 bp, Artificial sequence
  DNA replication origin
cagcgcacttccatgagtcccgccgggttcaagtgctggctctgccccgcgtggcctgtgcagcgagacaggtgacaacctctctgaacctgagtggctctgctgtaagctgggggcgacagtagcccctcctgcgtaggactgctgtgaggattgaacaggggatgactgtaaggtttctagcaggtccctggaactcagcattcatccaaaaagtcgctgagtcacagcataataacacgattcacctacctcggggccttggcacctgctgggcccccgcctggaaacccttcccccggatcttggatgggatggcccctctgccttaatctcggttcaaactcacctcagcaaggcccgccccagtcaccctgttagcattgccctaattcatgcccttggagcccttgccaacagccagatggtcccgcgtgtccccaggctgcctggtttcttgcctgctgcccacaggacaggagggcccaggagggcccaggagggcagagctcgttcatcctggccatttccgtcactgggagcaccgcgcctggcctgggtgggtgcccgatgggaatgtgttgagtgaaaggtaaaatgcccagtcaggcgggaatgcagacagcagctggggtgggaaaccgcgtggcagtaaaacacacgccacacaacacagaccttccacggtgaggtgtttacttatgggagagaagcaccgatgctcacacaaaaccccacaagagtgttcggagcagctttagtcacagtcaccccaaactggaagcagcccgagtgtccttccgcaggtgaatccatccgctcgtccacagccacacctcggggccctgctcagtgacccaaggagctgctgggacgtgcagccacaagc

SEQ ID NO: 7331 - DNA, 1039 bp, Artificial sequence
  DNA replication origin
acactgtgtgtggactttccagcaaggcttcctggccttgggattcatgcttgtggctgcacgtcccagcagctccttgggtcactgagcagggccccgaggtgtggctgtggacgagcggatggattcacctgcggaaggacactcgggctgcttccagtttggggtgactgtgactaaagctgctccgaacactcttgtggggttttgtgtgagcatcggtgcttctctcccataagtaaacacctcaccgtggaaggtctgtgttgtgtggcgtgtgttttactgccacgcggtttcccaccccagctgctgtctgcattcccgcctgactgggcattttacctttcactcaacacattcccatcgggcacccacccaggccaggcgcggtgctcccagtgacggaaatggccaggatgaacgagctctgccctcctgggccctcctgggccctcctgtcctgtgggcagcaggcaagaaaccaggcagcctggggacacgcgggaccatctggctgttggcaagggctccaagggcatgaattagggcaatgctaacagggtgactggggcgggccttgctgaggtgagtttgaaccgagattaaggcagaggggccatcccatccaagatccgggggaagggtttccaggcgggggcccagcaggtgccaaggccccgaggtaggtgaatcgtgttattatgctgtgactcagcgactttttggatgaatgctgagttccagggacctgctagaaaccttacagtcatcccctgttcaatcctcacagcagtcctacgcaggaggggctactgtcgcccccagcttacagcagagccactcaggttcagagaggttgtcacctgtctcgctgcacaggccacgcggggcagagccagcacttgaacccggcgggactcatggaagtgcgctgaacacctggattcccacctcagctcgaatccctgcctgcagtcctgctgtgtggccctgggcaggtcacaggtcctctctgagcttccgctttcccgtctgt

SEQ ID NO: 7332 - DNA, 1049 bp, Artificial sequence
  DNA replication origin
gggcccagtgcactccccacctgagggctgcctgaagagccaggcgagcgtgttcccacccagcccacccagctgccgaggactggctggaccactcgggtacctggccctgacctcgtccagtgtctcacccacaaccacaccatcaccatcacacaccgggacacagagttacggacaagccgtgacacagagccaatgcccgggcagcagccatccccaaccacaggctcacacaacacacgtgatcctatgtgtgggcactcacacacagtcacaagtagccacatgcacacacacaatccacatggtcacaccctcacccaagaccatacacatgagtgtgcacacagggccgccaccagccggctggtacagaccccaggcccttggctgctggtgcccctgtgcaggagtgatgtcatggggaggccttccacctgggcagccagaggggaggccagaccgtgtcctgtgtgctgagtgcccgctgggcactggcgctgggggtgtgcacaggagctctcacagtaagtctcaagcaggggcagtgttcccgctgtatagaaggggaaactggctcagagaggtgagataaattgatcaagtcacacagcaagaaacagaaggagctgggcctggaatcagcctgcacactgccagttcacacagctatctccttctgaaacctgggggacgttctgggcaagtagggggcagggctgcccctgcaacaccaggaaggtgaccctcatgtggcccagctcagctgacccggaagactcagagccccagatctgcagcgagagctgggcactggagtgggggatagggttgcccatgcctctcaaggttgtcacagagcctgaggccctggctgggaacacagaagccaccacagcttgaatccccggcaagagatctgtgtgtgacccagccccagctcgcacagaagcctgctgtgcacagaggacagtgctccaggcatgggaagtgctcacaacagcggctgccacccgcaagttcttcattcattcatcggctcattc

SEQ ID NO: 7333 - DNA, 1688 bp, Artificial sequence
  DNA replication origin
tgaagtctcaatctgttgcccaggctggagtacagtggtgcaatcttagctcagtgcagcctcaaactcctgggcccaagtgatcctcctgcctcagcctcccaaatagctgagattacagacatgtaccatcatgccagtcttatatttatttcttgtagaggtgggggtgggggacgtctcattatgttgcccaggtttcaaactcctggcttcaagcaatcctcctgcctcagcctctcaaagtgctgggattgcaggcgtaagccaccatgcctggcctcctgatttttaaatggccacagtttattcaattttttctgaaactgttcgagccacacaaaacctttctgagagccaaaaacagtgtgtgggccactagtttgagaccttactgggaagtgaggtcctggattcaaatccggcctcccacactttctagccatgagacccaggcaagtgacttactctctgtgcctcagcactgtcatctgtagaatggggaggagggtgtctaccttacagagggcctaccttacagggtgctgtggaggcgtaaaggatttaatttactcatttatccagcacatatttactgagcatctactgtgttccagggaccatgctaggtttgggggtcacaacagccaacaggagacagtctctgccctggtgcatcttacagtcaatgggaaagacaaaaaacaaaatgagcaacgggaatgagtaccacgtgcagaaatgccaataggaagaagtgccgaggagaaaaactagggcagacagcaaggcaaaaggagttgaagaaggcatgctgacattttaaaccaaggagggcctcactgaggaggcggcatttcagtaaaggcctgaaggaagcgcgggagtgaggcacacagatgtcccgtgaagtgtgttccaagcagaggtagcggccatgcagaggccggaggcctggccgcccaaggagaaaccaaggagactggggaggctgagtggaaagacaggccagagatgggggaggtggcagtcgtgagatcaggtggtcctggagcccactgcggggtgagcttttcctgtgagtgaggtgggagccaagggagagtgtggagcagaggagggaggatctctgacttggctttaacagaccctccggctgctgcaggagaatgggctgcagcgggatagagccgcgtacaggagggagggtgctcactggtccaggtgagcacgatggcggcgggaccagcggccggaactgggagggggagacgcctctggggagacgtccaaggtggagccagcggagagagaggcgtggaggccggtgcctgcgggtttggcctgggcagcgggagtgtggagggactgtttcctggagcgggaaaggcgaaggggctggttgcggtgaatgtggggctgggaaggccagctggctccctggacatgcgggaaagtgaagagagaggctcccaggagagggtggtccggggacatggcgttgggcacccctgctggcactggaggaggcaccagggagaaagtgttgttggagctgaggacaaatcaagcagcccgcccggacggtggccgcatttgctgaacatttggaattccaggaaagggccgggggcctggaggaggacccaggtgatccccaggccaggtttcggggactgcggcccccc

SEQ ID NO: 7334 - DNA, 1664 bp, Artificial sequence
  DNA replication origin
ggagctgaggacaaatcaagcagcccgcccggacggtggccgcatttgctgaacatttggaattccaggaaagggccgggggcctggaggaggacccaggtgatccccaggccaggtttcggggactgcggccccccgagggggtctcagcttctgggcgctggggttgggcagccgggaggccgcccctcccccatcgccctctcccggagcgtccgccccctcccccgcgccacctgcggggtcggtcagatccgggcctttgtcccgcgccccagccccgccgccccgcctggctcccccccgagcaaacacagctgagcgcccgggctcgcgtgccgcccccgccccccaaatctccgggccgcggggtggaggcttagcagggcagctgcgggcctgcgggcgggcggagctcggggcgcccctctcccgctcgcaccgccggggcgcgcctttgtcatgcagatggcccgctggcggccggcctcgcccggcggcgctcgggcagctgacctggggggtgggggacaactccgctcccacatcatgccgaggctcccgtgaagaccgcgtcgtccttgccctgggacccgctcctccctccccccggcgccaggtgacccactccagtcgctgggcgtccctggcctgtgttcttgctcgcactccctgcaaaggaacctgctgtccacacacctggagccctggagcaggggctgggatttgccgctgccaagggtgtggggcacatgtggggggcagccccatccctcccaactggtcctaggccagccagacctctgtacccactgtgggtggctgggacccaatcgctgcccattcctgcctcagtcttcccatctgtactatgagcgctgctccagggcagagaggactggtgggcttaggaggaggcaggagccaggtttgtcccaccggccttgcagccacctggtgtggtggccttgggatgatacgtctggcctcacatgcagcgatgtggcctggggatgtggatgcccgcagctcagggccctcgtgggcaatgacactcatgcttaggatgccaggatccccaccctcccagacctacccctctcccacccatcctgacccaaccctaaggtcctgtctcctcctaggtaactggggtggggcttgactggggcacacgcccactttctccagagcaaaagattctccaaaacaggggtgaccaaatggaaagttatttactgcctagtgtcaggagtcaggcctggggcaagacctgggaggagaaacattcctgcagctggaatcaggccggaggagctggtgtcccctgccagggtcagctgctagtatcatcccaggagcaccctctctctttattttgcaggtgagtagcctgaggccagagagcagtaggaacctgtggcctcccaacccttgtcttctcctgcaaagaacagaggattgggattcacgccagaaggtacagaaatggccaacacagacgagatgcctcaagtctaggttatgcgcatggaatcacatggtatcattcctcatttctggagtaaaaggcaagaatactgacaacaagcagtgccgggcagctgtgggacaggtggagcccccatggaccctgcttctggcgtgcagtttgtcaatatgac

SEQ ID NO: 7335 - DNA, 1666 bp, Artificial sequence
  DNA replication origin
ccaagtactggtggtgcatgtgaggtgatagagaaggtggtggtggcagaggtgatggtagagtctcattgatggtgatggacatggtcatggtgatgtttgaggtgatgctggtgatactgatgtgtaaggcaacaatattgatcttgccgatacagaaggtgacagtagtagtggcagtgatgggtttctgttagtaatgatagtgatgcctgtagcagtggtgatgatgttgctaacacaaaaggtgataataacactaaaggtgataataacgcggtgatgatgttgctaacactaaaggtgataatccctgagtatctgggattacagatgcgtgccaccacacccagctaatttttgtatttttagtagagacagggtttcgccatgttgttcacgctggtcttgaactccttgacctcatgatcctccggcctcggccccccaaagtgctgggattacaggcgtgagccaccgcgcccggcccaatcctcccactctctaaagagacattaagaaatgtctccctccccaaatctctaacctctcccctgctgtcctctgttgctaacactaaaggtgataatgatggtggtgatggtgataatggtggggatagtgatgatggtggtggtggagatggtgatgatggtgatggtggtggtggtgatgatggtggtgctgctgctactgatggtggtggtggtggtgatggtgacagtagtggtggtgctggaggtgatggggatggtgatggtggtgatggtggtggtcgtgatagtggtggtggggatggtgatgatgatggtggcagtggtgatgatggtggtgatggcaatgatggtggtggtggtgctgctggtggtgctggaggtggtagggatgatgatggtggtgatggtggtggtggtgatggtgatgatggtggtagtgatgatggtagtggttgtggtgatggtgatggtggtggtggtgctggaggtggtgggggtggtgatggaggtggtggttgtggtatgaagatagtggtggtggtggtggtggtgatgatggtggtggggatggtgatggtgatggtgatagtagcaatggtgatggtggtggtggtagtggtgatgatgatagtggtggtggtggtgatggtgatggtggtggtggggatggtgatgatagtggtggtggtaatgatagtggtgctggtggtggtggtgatggcggcgatggtggtggtggtggtgctagaggtggtggggatggtgatgatggaggtggtggtgtttatggtgacggtggtggtggtgaaggtgatagtcatggtggttgtgttggtcatggtggtgatggaggtggtgatggtgacagtggtggtgattgtgacggaggtggtggtgatggtggtggtggtgatggaggtggtgatggtgatagtgatgggtatggtggtggcgatggtggtggttgtaataatgatggaggtggtgttcatggtgatgatggtgatggtgggagtcatggttatggtgatggtggtggtagtggtggtgctggtagtgcttgtgctagtggtaaagctgatgttcatggtaagggtaatgattttgccgacaccaatataatgtgttatggctgtaatggtgatggtaactgatataatttggatatt

SEQ ID NO: 7336 - DNA, 1019 bp, Artificial sequence
  DNA replication origin
tagaggtggtggggatggtgatgatggaggtggtggtgtttatggtgacggtggtggtggtgaaggtgatagtcatggtggttgtgttggtcatggtggtgatggaggtggtgatggtgacagtggtggtgattgtgacggaggtggtggtgatggtggtggtggtgatggaggtggtgatggtgatagtgatgggtatggtggtggcgatggtggtggttgtaataatgatggaggtggtgttcatggtgatgatggtgatggtgggagtcatggttatggtgatggtggtggtagtggtggtgctggtagtgcttgtgctagtggtaaagctgatgttcatggtaagggtaatgattttgccgacaccaatataatgtgttatggctgtaatggtgatggtaactgatataatttggatatttgtccctccaaatctcatgttgaaatgtaattctcaatgttggaggtggggcctggtgggaagtgattggatcatgggggcagatttctcatgaatagcttagcaccatccacttggtgctgtccttgtaatagtaaaagagttcccacaagatctcgtgtttaaaaagtgtgtggcacctcccccacactctctcattcctgctttcaccatgtgatatgcctgctcccacttcactttctgctatgattgtaagcttcctgaggcctccccagaaaccgagcggatgttggtaccatgcttgtacagcctgcagaaccgtgacccaattaaacctcttttatttataagttacccagcctcaagtatttctttacagcaacacaagaacggcctaacacagtaacgttagcagtaatggcaatgggcatggtggtggtggtggcaacggtgctgacaatggctttaatttctctatcctccttatcccagagtcaggaaattgggtcagtctacttgttctttaattttctttcagacttgtcctcttcctccttatgcaaaaacaaattccctaagtccagccttcccctct

SEQ ID NO: 7337 - DNA, 1053 bp, Artificial sequence
  DNA replication origin
tgtcggggtgccaacgaagggccagcttgcggtaggctttcttgatgtcctccggggaagcgctggcctgcacgcccagcacttcgtagtagttagccatggccaggggtgtgggtgagaggagagggaacgtggaggccaggtgggcgcaggggcccagctggtcagatggacgggggagaagtggccggtggtctggggcccttcagcaggggcctggctggactccgcaagctctaggcaagattctgcccaggagttcaccttttcgtagtaccaattctcagggactggaggggcccccactgagaggagtggggggaggggagggacactgccgctgtggggccaggccagagtgggctgccctccagagctccttttatgacgtcagctcccggggcggggcatacccccgcccccagctcctcaccaggcaaacctgggcatatgggcctgcccctgctggtgaggtggccacaacggtgtgtgggaatgggatgctctgtgacccaggtggtgtgggctgagtcccgggagccaaagggcagaggcaggatcagccacgggattccagccttggtgagtgacaaaggtctgtggccgtggtgggggaggcgggcaagggcgtcctgggtatgtccactcggccgatggctgggcagcagctgaggcaagaggaggccaaggtggggttcaggcaggctggggtggggacaagagcctgctttttttgtgcccattatctggccaggtcttccggggtaagctccacaaaggcgggaaagtctgtccctgtctaggacagtggctggcacacgagggccgtcggtaaactcttggatgaaccaggctcagagacacacagtgctcaaggtcacacagcgagtcagtgagggaggggatgtgaaaccagggccaaggctgcagcggacagcaaatccaaagaagtgttccactcaattctggtaagaaaaataggaattgatgataaatattgattactgactgtagtgggttgaatggtggcccccaaaaagatatgttcctatc

SEQ ID NO: 7338 - DNA, 1095 bp, Artificial sequence
  DNA replication origin
gacacagtggtggacatgctggtgtgagtgccgatggcgatggtgatggcactgaggtgtggggctctgtattttctgttgctaacttggcattacaccaacctcttccatggtctccttgcatcctggagaaatctgagggattttccagaatcccatcaccggtataattccagactagagcctgccaatacaagggatttggagagtggaaaagagaggccgttgcaggcaggtgacaatggtgagctttgcaacagctcggggcaatcttctgcgaagaccctgcttctgagccacaggctgaggcatggatggggagcttcctggaataccgtgagctcctcagcagctcccaggcaagctctagagagccgctcacctgggagctgcaggtgagcatctcgattccttgttccctgaccgctggtcccagactgttcagggtgcagcgtgtagtaaatgtcctcctccttggtacacatttgagggctgtgtactgtgagggtgatggcggctcagatgaaggtggtggttgtgatggagttgggtgtgaggatagcagagagaaagcagatggtgacatcaggaaggcattggaggggcagtggtggtggcagtgatgatggtggcagtctaattagaggcagtggtgggtctggctgaggcagacccggtggtggtgatggtggtggtagtagagggggcaatgacggtggtgatggcaaaggcggtgtgagtggttgatactggtggcagagctgataaggtgatgtcacagatgggatggtgggtggagatggaggtggaggaagtgtggtgacagtgatgtggtggtgacacaatgctgacacgggtggagagcaccgtggtgacggtgacagagatgatagtgatagtggggctggtggcagtggtagaggagatggggatgggacgctggggtgttgatggtgatggtgacactgctgagggtgttggtggcctgacattgtaaaggtgaagcctgaagtttccatgacgatggaatcaggacagtggaggaggggtggtgaaaacaatgttaagagacaaaggacctagtatgatgaggca

SEQ ID NO: 7339 - DNA, 1465 bp, Artificial sequence
  DNA replication origin
cacggcatctatgacacctgccatcatgttaaatgttcatgcattatcagtttctcctatctccccaactgcatgtcagcatcataagggcaaggctttgtctggtgccttcactgacatatggaccccagacccaggggagtgcctggtacacggcacgtgtatggacaactgctcaggaaacgtgtgtgggtggctgggtgtgtgggtggctgggtggctgggtgtgtgggtggctgggtgtgcaaatggctgggtgtgtgggtggctgggtggctgggtgtgcatgtggctgggtgggggggtggctgggtgtgtgaatggctgggtgtgtgggtggctgggtggctgggtgtatgggtggctgggtggctgggtggctgggtgtatgggtggctgggtggctgggtgggtgggtggctgggtggctgggtgtatgagtggctgggtggctggctgtgtgggtggctgggtgggtgagtggctggctgggtgggtgggtggctgggtgtgtgggtggctgggtgggtgggtggctaggcatgtgggtggctgggtgggtgagtggctgggtatgtgagtggctgggtgtgtgggtagctgggtatgtgtgtggctaggtgggtggattgatgggtgtgtgtatggggagatgggtggctatctgctggtacagatgtgtgcatacgcatgcacgcctttactctggaagatacttcaggcttttttgttctatactgtttccagaaagaccccggaaatgccacaccccggaaactgcagagccccgtgggtgaatggagaggctctgggggttggatcctcctggaggcttcgagtaactgaggaactcagggtaacagccctgcctagggttgctgtatgccaggggggctgggtgctgggaccctggaggaggggagctgccctaactggctgaagcaacttggaactcagagggccccgcaaatgatgccttcactcaggcagtaaacccctacttggggctagatctgagcctccagagaccacatgagccaccaccaggaaggatgtacctgggttgggatggcagggaagggatctgggcaacccagtgggcacctgtcatcactggcttggaggactgggcaggaaggctgcctgaagaggtctgagagcagagctgagatcgccctggcaccactggggaggacgtgagctcactggcccttctacggttgcgtagcccaccgccttcccaccccatgggccaccaatctgcatgtaagcctgccatgggcctgtctgcctaccatggcttccactggctcaccaggcaggctgccctttcatctgtctctgcccacccattatcgacactgccaggatgccagcacacgcacacacagctccttctccattctgagctcctcacagtaaccctgtgagaggggaccatcattacttcccttttacagatgag

SEQ ID NO: 7340 - DNA, 777 bp, Artificial sequence
  DNA replication origin
gcaggctgggtgcccatagtagctaggcctgggcgcaggggactgccactttccatcttcatgctctccgtcagtgacacctggtacttgacgccgtccttgtcctctcctcgggctgcactaccccccgcggaagatgaggctggagacgcagcccccgtggtgctagggtcaggagacacttctttgggtggcgtgggtgggaagccgaaaaggtgggagccagagtgggctgctgtaggggtgagggaggccactgagctcccgctgcctcccccgctcccacccccagcccctgggtacacagagagtgggcctccagggcctccagcagctgaggggtgcagtggcgtcttggagaaggggctcacggtccaggggttgtggtggtgggccgcagcggcagagagggctgctttgcccccgtccagccagggcaaacccgggctgtgcaacaagtgtgggcggcacatctggcctccggtcaggcgggctgcgggcaaagagagagaggatcagggtgggcagaaagatcagggtaggcagagctagggacgcccctgacagacattgagatcacgactcccagaaccagcagtcatcccctccccaaagaaagccagaaacataataccccaccggtaataatcaggaatgtcagtccaagctgaaggacaagtggcatagaaggaaccccaccggacagaccctacagggaaccctcacaggccagctggaagtgggcagaaaccctgtgggtcccagaccctccccaat

SEQ ID NO: 7341 - DNA, 978 bp, Artificial sequence
  DNA replication origin
ggtggggcgcgttggcagcaggggccgccaggagcgcgcagggagggggcccgccggctgaggggggccggcccgcgggtcagtcccggagtccagcggttcgggaattgcggacgcagccaatgggaggcggaggctgggaggcgcgcggcgttgattggctggcttgggcttcttaggcgtgcgcggcccccgcttcatgtctgtgcaggagtcggcagctggcgccagggcggccggaggatgccgaggggccggagccgggagggcccgaggccgaggcgcactctacccccagctcctaccctgtaagccccgccagcctccggacgtgctgtccctgggcccgtcgccctcggggctcccgccggaactccttcactctcagaggccgagtccctcccctccccacggctgcgtgtgtaagtttggggtttgagagccggctgggggcctggggcgctcctagctttgaggggactctggggggacttagggcggggggccaggctgcgggcgactgctttggtgtgctttgttgagaggtcctgattgtgccgcttagtactgcgctcagggggctgcgtgtgcatgttttcggggttgagatcagtatgtgtatctggcgccaagtgtgggtgtgtgcgtgtcgctgggatcaagtgccacactgggtgcccgggcgcctgtctccaacttttgagtctgtgttcatgtgtttgtctaccgggcgggggggctcagtgtgagtgtctgactgaagtgctgctctgtgcgtttgttggggtcactggtgtcgggacccgtccccgggcgtgaccccatgtgcacgggtgtgtgattctggagccgcgggtcaccacgtgagtgtgcgtggctgaaccccctcccccgccttcctttcgttttgagccttgggctttcctcccacccgggactggtgctctttctcgccggatctgggctggggctccgtgg

SEQ ID NO: 7342 - DNA, 926 bp, Artificial sequence
  DNA replication origin
ctaccccgggagcctcgggcccaacagggaagagggctggaggacgctgttgagtccccccagtactcggcacctgtctaggtcccccaaaatgcctttgtcctggacctccctcctcggcccggggctcccttcgagcctccgtctccccagtctgtacaatgggagggaggaagacttgtgcgcccggcccacacgaaccatagagccgatctccgggctagaagtgagtggggagcacttccaggtgacttagaagacggagacctcagaccaccgcctccccctcaccagaggccacctcggggaccccccccggaggaaaaaaaatgccacctcttgcccgggggcgtctccctccagctggcgccggcgccagtccgggtctccacggcctcgccccaggcaattgggcccgttggcctgcgaaggccacgcccggggaggggtgccccctccccctttctggagccaccggccgggccacctccactgggtcaagcacagccctgagcggccgcgtgtccgaggcccaggtgccctctagagccctgtagttcctgcccctctctgcccctctcggctcctgctgttccgccgctgtcgtccgaaccatcccaacccccagtccacccagacagcgcccgagctaggggagggaacggtctgggtaggtaactgcgctcggactgaccacgttcagcggtgaaggagcgtggcggggttagggtctcggggagaggccatccagagggtgtgcggcccgggctcctggggagggggcagttggtggttagttactgctagggaggcccagagcatcgagggatcccggagtgttcgcaagaggggctgcaggggtcgggccttggggtgagggtcccttagtggtggggcgcgttggcagcaggggccgccaggagcgc

SEQ ID NO: 7343 - DNA, 2575 bp, Artificial sequence
  DNA replication origin
ggcccttcccgcccccggcccggcccgcctggcacccgaatcgcttggtccgtttgccctgtggcccctacctttggggctcgccttggccctgccagagaccggaaaccctggttatagggactttaaccagagggagtatttggttacctgggcacagcaggcccgcctcgggcctcttgtcttcccatttctcggagccacaggccacgagaccctggcattcccagagcctcgcaaagcacccccgcctcccggcccccgaactggggcctttgtctcggccgcccccaatccccaggccaccgcggcggatgcgtccgagccgggccgccgagcggcggctgcacctgccggctggtcccgtgcgccggcttttcgcggcttaacccagctcgctcctgcttgcgcccccgcgcgctgcgccccgcagccctttatcctgtgtgactggggtgcgtgtgggggagagcgccgggtctggaagtctccccccgccccaagccggagtcggaatccgtttagtgggatttcaataagaatggggccgccgcgggcttgaagatctgccgccggtaggcgtagacggcgttctggatctgtctgaaaacggggcatttaaaattattctgtggcggccaggcttgaactccgcgttgctccaaccacgaggggaaaggccccgcgttcagggaccccgtgtgtggcgaacgctcctttaccggaaaacaaggaaggaaattcgttgttttggaaaaagcctcctctcccgaggtcgggaacatctggtggtgagctccaggtctacgcaggcaccccgtgctaggattcgtttatgagcaggcaggattcgagaaccaggtagggcccgtgcggcagccgaggcgtctggggagcgtttcccagccgggctgacaaattgcagacaaattgtgcctaacgaaacggatttaccagttgtcaggccgccggccccggccgctccaaataaaccgtggctgttcgtggaggagggagaagcacggcccgattgtctccgggtctcagcagggttccgcggggagcctgccaggcttgaaggtaggggtcagaagcgatatagaatctcggaggcgcctgggtccagggtgccgagacacctaggacgtgggggccacagactctacgattcccaaagacacagaacagtaatgaggtgggagagcctgcactgatgccgagggagggagccttctgctttaaggggctggaattgaacctcaaggagcaggaggggccgttatagcagtagtcccccccttgggaacccccccggagggatggctgctggcctgagatctaatgccccggctttaagggaacttctgaacccatctgctaaggcaccccacttcctccccgtacccctcaaggtttattgccagtgtggggctgggaggccgctgggttgcgaattaaatttctctatggaaggtagtcccttagcaaatgggtttccttgacaccccacccccagccccacaccgcgggccaattagctgcccataaggaaaaggcgagaagaattaggttacaaagggagggcaaacttatggtcccaaaggggccgcctcggatgagctaactttaaacaaagggctcagaggggggggggggctggacggccggggagacctgggcatctctgtgtccccacctggcacccgcggcttagtagaggcctgagaagcactctagaaccgggcaccagatctgctacctccccagctcccaggcagaagcacccaggtcaaatggtggcgatcgccgctgtgagttctcgggccaaaagggtccttcgaaaattctgcttcctggctgaccttctccagtcctcagagaaatcttgttcccaagtaaggaaagtgacagcttcttaatgtgatcaaaggcagcgccagcatttccaactatactcccgaacgaacaaagtactgaaaaagggaacgcgtccctctaaaggtgttttggggaccccaaagttccagcccataaattggagtaaatctgctctcaccaggcctggaacagcgcctcaagaccccagcagattctgggggctgcgttgaccctccccgggagtttgtttggggcccaaggtgggaggaccatgtcttcggcctaatggggaggggcccggttggtgtccctcggtctgcctggcacacacagacattgtcgagcgcgggtccctctttattggccagctgggcgccctgctacttggcgtcgcatttctctctcccaggcgggttcgtttccgccagagaatgcagcagtcccgcatcctacgcaggacctgcaaccgaggtggaggcttcggtcaagccggctcctgcctgcgttgtcgaggaaggcaaccccaaggcctgaaaggacctggcagaactcctgtttcctttttttcctctacaccggattgcgggcaaggaggctggttcgggtctcccgaggcccctgctcaagcactccttaaccgtcctgctaagcccctctgtgcggcgattttctgagctgccgagcggggtaattaaat

SEQ ID NO: 7344 - DNA, 1874 bp, Artificial sequence
  DNA replication origin
aagaaactcaccgagcgaggcgcggtgggcggcgcccccgggcggacggggcctggagtagagctgggagcagggcgaggtgcgcggcaggcgggctcgcgggacctgggcgcggggtggcggcgctcaccagcagagcctgggcggcacgccgagcggccgcatggtgttcagcggaccgcttttgtccgcctggtgggcgacggggccctgctaggatggatgtggcggcaggcaatagacagacttgagcagcgagtcccggggcgacgctggcctcgctaccttcctggcgctcacgctgcctctctctcccccaccggccgcaacgcggctttttatttcgacatcactttgcgggggggcagggggtggcgacgggggcgggagcgccgcagggggcaggagggtacccggggctctgcacccggcctaccaggtccagccgcctggccggccaagggccgctaggcactcagggcgcgcacaccctgtgcatccacactccaggccgctcccaccctctccggagcgcacacgcgcgcccctgacctcagggatgcttgctcagaaagcttgggacacgtctttactgagactctccccggggaccctcaggagctgtgagcacacgcactcactgataatggtacacagacgcccgctcctctgtcttcaacccacttccaggagtgctcacacggacacgcacacatccctgcacatgtgcacacagctgtggccgcgaggacatcctcagacagacggcctgggtcacaccgacacacatggccatacaatcagatgcaactcggcactcgggctcacactcaggacgccctcactgccaggcttgtttagctaagtgcaggcgcagcccctctccctgtcccaccccccctccagttcctaacgctgggggaccccctgagcactttagaagtccactgtctggtgtccccctggcccatctccttggggcagactctcacaatgggggaagcaaggaagtgtgcagagggcttgttcacagaagtgggagtcaggagggggggagaaagtgagtgtgggagtcctcatccccagaaggcccctgggtttgtgggcaaagacagtccagtccttgtgctgccaaagttcttactaagggattcaaccagtcagcgtccccccacccccacccctgattcccattccagcagatcagggagagtgaaagtggcctggggaccttgagcccagagggaaagtgcttgggcttggaaggactgggaaatctgtgctcccgtgcccaggtgtgccccagaggagtgtttctgtcccctggtctttgtgacccctgctgtccataggtctttctccaaatctggtggtgactattgcattgtgtgtgtgttctatgcatgtggctcagagtctatgtcctgtgtgcccaggtgtgtctgtgtgcacttaggagcacacaggagtgtctgcaaaactgggtgtatgagtatgttcatttcttcttgtgggttcctgagagtttgtgtattgggcagtaggtcacagtgtggctatttcatgaccctggaatttggcacaagagagtgtgtctgtggaaatggttgtgcgtccctttggctctgtgtctgtggggtcatcatgtcagagactcatgtaatgaggggtggggatttccaggtgtttgcccatgtgtctgtagcagtgtgtggcatgtctatgaatgggtgtgttttggagtgtgtgtttgcgtgtgtatgtgcatgtatctaggcatgtgttactgtgtgtatttttgttgttgttgttgttttgttttgttttgtttcttgagacagggtcttgatctgttacccagactgaagtgcagc

SEQ ID NO: 7345 - DNA, 971 bp, Artificial sequence
  DNA replication origin
cagcagtgccctgttctgtggactgtagaaaagtgtgtcctgggtgacacgcggggtgtgcatcctgcaggatcacacaccatccagaccttccttaaccagcagggcaggccgccagtggagctctagggtaccatttgctcgggcactttctgtctgtctgtgggaggggagatgagctgataaggcttatctgctgtcgccagcgccatgctgaataactgctctaatgaggtgtcctcattgggaccacccgatcccaaggccctgggcctcactggggaggggcatgggcgagcttgtctgaagcacaggagcagggcctgggtgcctacagggccttttctacttctgtcttgtttccttggaaagggggttccaggccttgcacctccccaccccacctgcctcctgcctactgggcggagctgggctggccaggccagagctggctggagccttccagtctctggtctgtggccaggttcacagccttgagagggcaggaggtatgaggcctggagatgtggggccctcagggtggggtggatgaagagaaatggagattcagtgacagaaagatccagagagacaaggagtggggaaagagatgggaggcccaaagacagattttaaaaaaacaatgaggaagaggcactggtggggacaggcctggagcttggggacacttggagacagacagaaataaacaactaaaaagtggcagaaagggtcagaaagatgggaataaaagcaaagaaggtgataaccacagagacatggacagagacaggagagagataagagaggacagagagataagacaaaaatagagagattcaaagagaggcgcaaagagccaatgcgagaagagggacgtgagaagggccccagagagaagagtggggacgcaaaggaaagatgggcaggatgggatggacagactgagatggaaaggccgacagggctta

SEQ ID NO: 7346 - DNA, 718 bp, Artificial sequence
  DNA replication origin
gacaggcctggagcttggggacacttggagacagacagaaataaacaactaaaaagtggcagaaagggtcagaaagatgggaataaaagcaaagaaggtgataaccacagagacatggacagagacaggagagagataagagaggacagagagataagacaaaaatagagagattcaaagagaggcgcaaagagccaatgcgagaagagggacgtgagaagggccccagagagaagagtggggacgcaaaggaaagatgggcaggatgggatggacagactgagatggaaaggccgacagggcttagccgccaagctcgaaggaagcgcgggaggccgggcgccgggcgaggatgggctgggcatgagctgcgggccgcgggcagggcgggacaccaaggcgcgggcggtggtggcgggcagggggctccgcgcggggctgcgccgctgtccggggtaatttttcatctcggccggctaatctttgttcccggcgaagataatgaatagccagtcgttatctgcccggctcccggaggctgcccgagaatggggttgtacagggctgggaattgtttccaaagtgccgcggaataaatggtgttccttatctctgccttccagattatcggagccctttcagagagcgcacaacaaatgcgcccgccatcgaatgcatcatttaccaccgcagatccgagcgctgatgggcaggcaga

SEQ ID NO: 7347 - DNA, 1189 bp, Artificial sequence
  DNA replication origin
tttttcatctcggccggctaatctttgttcccggcgaagataatgaatagccagtcgttatctgcccggctcccggaggctgcccgagaatggggttgtacagggctgggaattgtttccaaagtgccgcggaataaatggtgttccttatctctgccttccagattatcggagccctttcagagagcgcacaacaaatgcgcccgccatcgaatgcatcatttaccaccgcagatccgagcgctgatgggcaggcagatagccctctgctgggggcacgcgggctccccgtgcccgtaccactcgcctgcctgccggggccactgagtgtgcgccccggtgtgcccggcgtgtttggatggacacgtgggtgtgccagtgcatgggctaacgccgatgcaactgtgcgggtgtgtcaaacaagtgtaccacaaaaaagtgcaggtgtgcgagcccatccatgcacacgcatggcaggcgtctgtgctgtgtccggaggcggccgatgaggcgggtggagggttcacacaggaggcggtgctgcactaagcttgtgggcaggcatgcggcccagggtggctggacacgtggtggaggaatgggaatgcaagcccgcgtgtccgagtgcagcggatgagcatcctgcgagtgcctcactgtgtctgccctggaggtggctgtttaggggagcacgccggaggccactagggtggatgtgctgtgtgcatgcaagtgcccaccctacgttgtgtttcggggcacacaagctacctgtgcctaccgggatgagcatgcaagtgtcaccgctcccgccgggcgtgcttggggtgtgcttgggtctgcgtgaggctgtgtgtgtcctgccgtatctctgcccaggtgtgccctggtgagctgagagaggggcacggggaagggcagtcgtcggggcctgtccgtgtgccagcgtgggtggactccgggctggggaagcgacagggaatggtgtgtgccggtgtgacagacgccagagcggcggggtggaacgtgctgtgtcacgggagactttcttgaccaaaacggaatgtgcgagtgtggaaggaagaggggccgtccgcggagtttggggacacccgggcgtccgagccccagagcctctgcagctgggacaaggaagcccgagcccgccgcctgaggtccccgcgccgtt

SEQ ID NO: 7348 - DNA, 863 bp, Artificial sequence
  DNA replication origin
cgggtcagatgtgttctccgcccccatgggcacagcgggtgcagggatgtggaggggcctcagtggttctctccctccatcccaggcccctctgggataggggcaggttggtggggctggagtggctgctgaatgacttccaaagtcatgaggggaaggaggagttaccgtagtgataaagagaaatgacaatgatgaaggcaggtggctgggcccgtccagccccctctagtcctcattccctcattcccagagttgcgactgatgccaaccaattgtcagatatgattccagtggctgagctgtagccacaagcaaaacaggaactccctcacctccaaggatcctggtattctagagggggagtcagacaacacacacacaggggcgagactatttcagactgtgttaagcactataaaagaatgcatagacagagaagagcaggggacaggggagcaacttggctcttggagagtgacacttgagtggagtcagaatgcattcggggtggaggggacagtagactcaaaggccctggggtgggaacactctggaacaagaagagagtcattgtggctgcagtgaggaagaaggaaatcaggtctgagaggtcagtaagggccactacataggttctaagagtttggcttttattctaaattcagtgggatgcgttctcagaaacgatttttttgctgccaactaaactgtagcctttggcagtttgcccccgtctataatttcctgcccatccatccatccatccatccatccctccaaacatcctttcaagaaacacttatggagcacctactgtgtgttagtctggccctggggaacagcagtgacaaagcaaagcc

SEQ ID NO: 7349 - DNA, 1833 bp, Artificial sequence
  DNA replication origin
ctgaggcaggagaatcgcttgaaccaggaggcagaggtttcagtgagtagagatcgagccactgcactccagattgggtgacaagagtgagactcgatctcaaaaaaaaaaaaaaaggaagtgaatgaagagcaaaaggagaccactgtgggcaactaagaacacagtccaggcagagcgaacagagggcaaagcccttggtgtggtaaggaaatcactgtgtccagggagcagacacagctacatgccccggtgtggccgtgtggcttgaagctgagtaagcaagagaggaagggaggaacaggctcacagaggagctggagaggtcacagaagctccctgatgaccagagcctctgttcagccagaacactccagtggaacaccttgtgtccactaacgaggccttgccactaatttggcaaagaagtaaataatgtgttaaaactcagatgtcctaagttctggttttccaaaaaggcaggaaccatacacaccaatcaccagggaccagacaaaaagcacgaaaagtgaatcacaggagagggaaccagagggaaccactggttcccaaacaccagaccagagaggaccaagcaggtccacccagatgagagggagagaaggtaaggatttcaggtcagattctaggtcaaacaggacttttctggtggcaggtggcagtgacccaacagaactgtcttaactgaaatgagcattgttgatataggtagctggaaaaacccagacacgggtaggctctgagtcactggggcctaaacacaactggtcagccagcgctagcttctgtcttggagctcagcccacctcctcagatgaccgcactctcctcctggtggcaggatggctgcagcagttccaggccttacctctgctcagccctgaggccatggagaaacaggcaatgcctctggttgactatggtcatacccatctccgagtcagctgctgtgggcaaaggaatgcaaggattgactaggtatggctgaggtgacccccattagggcgtgatggggtcagccgcagtcaaatcacacgggctaagagtgggtgagcgaatgaaggtgaatgtcaaaagaagagggagcggatgctggtccaccggagacttacagcaaaggggcacctacaccgcagcgccactgctgctaagaattagcagtcacggaggctccgagctcctgtcagattgagcactttactcgtgacccctcagcccataccgacaacggcaggacgggcactcctcatccacgagggcaatgactgtgtatcaagcaccttctgagcgccaggccttgttctaagtgtcccggcgtccccagtgaagcaggcgaaataagccacggtgtggaggcagggagtgcctcccaagaccccgagaccgctgagggcagaggagggttatttaaaggcagcacttgaagacccaggaatcactcctgggggcgcagccttgcacagctagagggcctgtgggtttgaggagcctcagggttgggggcgccgtggccggtgagggagtgaggtcagaggggaggggagggctggcatccttgggaaggctcgaatagaggggaggcttggtgtgaacgataccctgccggctgcgtgtggaggggaggctgtggcctgggcggaaggcaggagtcccgggaggggcagcggggacggggaccctgaggcccaggggattgggctcaggggccggattcaggatgctttccgcgcagagccagccgcagaaggggcatgggaaagagcctcatctacgcacgagaaaaccgggccgagagtcaagagccaaggcggg

SEQ ID NO: 7350 - DNA, 961 bp, Artificial sequence
  DNA replication origin
gccttcgctcctgtaacaggctggggcttggcccggcccgcggccgccccgccaggaagcgccccgtccgccccctcggggcgcgtccgcggcaggcacttttgaggacaggaaggggagaggtgacctgagcatccacgcagctgtggcattcggggacgggccgaggactgggtttcttgccatcctcagcgctgggggtgactccaagcccccgggtgggggtggggagtggccgggcatggcgcccggctccacaatgcatcgccttacccggccggaattcctgcaggacgctttgttctcagatggcagcgctgctagagccatcggacctgtgaggggggggcgcccggggcaggccagagccaggcctcaggaagcccgcagcggctgcggcgctgggcattgccccacatgcccgccaccctcccccgggcaccccccacccaccggcgccacagtccccccagcgccccccgcccctggagccgcctggaaactgggccaggtccagctggacaggctgtgtcaactccagctggggggcttcgcggaagccacccatttcctgcggccgtgcaggctgtctgcagcagagaccaccccaccaagttcccgcctctccctcccacctagccctcaatggcaacctactggacactgagcgagggtggtctctggatggcccccaatggacactctgaaacctgtccctaccccagcccctgccccagccctggcaggccatgtgacatcaggagagcagtttaccctctctgggcttcagcttcctgctctaaaggagaccagagactcccacttcggtgcagtaaagcaaagcatccctgagaaaagagcctttccgctttggagaactgaagcggaatgatggaaccagaacactctggagggaaagcacattaatttcagtactgccttgtgctgttacttcggttgg

SEQ ID NO: 7351 - DNA, 890 bp, Artificial sequence
  DNA replication origin
cgtgcaggctgtctgcagcagagaccaccccaccaagttcccgcctctccctcccacctagccctcaatggcaacctactggacactgagcgagggtggtctctggatggcccccaatggacactctgaaacctgtccctaccccagcccctgccccagccctggcaggccatgtgacatcaggagagcagtttaccctctctgggcttcagcttcctgctctaaaggagaccagagactcccacttcggtgcagtaaagcaaagcatccctgagaaaagagcctttccgctttggagaactgaagcggaatgatggaaccagaacactctggagggaaagcacattaatttcagtactgccttgtgctgttacttcggttggaatttttaaaaacaaccacatccagcacttactctgcactaggcactgctctaactcctcacctacatgcaggtgccagcagcagccgccttgccctctctaacaagggggcgaaggtagcagggagaggtggacacggtgcccagagccaggtcactgacaactggatgagaccctggcatcttggcccagggcccacggtcacagacgctgaaccacacgcattcttaggacccaatttttagaggaaagtaggttgttgcccaaaactgcgtgccggtgtggtgtgcatgtgtgtgagagtatgagagtgtctgtatgaatgtgcatctgagtgtgttctgagcgtgtgtgggtgtggtgtgtgagttgtaagactgcgtcatgtgtagatgtgtgtgtgtgtgtgagagtgtgtgttgtgtgtgtgatagtctagaaacctcctgagaagagctggtgaggaactagagagtggggcaggggtgagactttgggatgcgcctg

SEQ ID NO: 7352 - DNA, 1328 bp, Artificial sequence
  DNA replication origin
cccaagtagctgggactataggcccataccacttttacaatttttaaaacacagaaacattttgtaatgaatctggatataaacagatgtggtgataccatcacaacattgtaaccccagtgcacagagaccccagcaaggcagtaaccatgtctatgagagggagaaggaaagtagcacttaagctttcccaggagtaaccctgggggtgggttttagagaatgaataggagtttttcagcggggcgcgggggctcacacctgtaatcccagcactttgggaggccgaggcaggcagatcacgaggtcaggagatcgagaccatcctggctaacacggtgaaaccccgtctctactaaaaacacaaaaaattagccgggcgtggtggcgggtgcctgtagtcccagctactcgggaggctgaggcaggagaatggtgtgaacccaggaggtggagcttgcagttagccgagatcgtgccactgcactccagcctgggctacagagccagactccatctcaaaaaaaaagagaatgaataggagtttttccaggcagacaagaaggaacacttcgaagacccaggacaccagtagctgtggggatcactggggaaggttttgtggcatttgtggaggtgttaagccttgaaggaggggagaatcggagtgagacgggggttagggtagggagtgtagcacaggcatggacacagcacaatgccagggacagtgggatctggctgcagctccaggaaggccatctccctgatgtcagggaggggtgaagacctaggttcaagtccaggttctcccaattacttggcgtgaagccttgaatttgccctatccatgccccgttcgctcacctgctaaagcagggatgtgtagcagggcgtaatggcgcacgcctgtagtcccagctactcagaaggccgaggcaggaggatggcttgagcccaggagtttgaggccactctgaccaacatagccaaaccacatttctaaataagtaaatggaagcgtggaagttgtgccctactgagagtgtgtatgagaagcacctgagaaccacagctaatgaactgcccacaggctgtgaggagtttgcaccggtcctcattgccttgctcagggtcagcccaggagaggggccgccccacccaacgctgccacacaggctgggaaaagccatggctctccaacgggcatccacactcccggctaagcaaaggctctgcaaagctggggccagacagccactcagtgtctgctgtttcctctggccctgaatcgcaggccgcgctggatggctctggtgccaaagggt

SEQ ID NO: 7353 - DNA, 1496 bp, Artificial sequence
  DNA replication origin
gccgcagtggggtgggattcaggagaaaaccaggcagtgtcccaccagttcacttgcttgtaacacagaaacctcttcaatggaaatggaaccctgtctagaatgccagactctctgctgaccattctctctggtcagaactggatcactttatttgatgtaaattgtatttgatttatttttttcttttttaagagatgaagtctcactatgctgcccaggctggtctcaaactcctgggctcgagtggcccttccgcctcagcgtcccaaagtgctgggattacacgtgtgagccacagcactggccataaattgtatttgatttttacagctacctgtatttagccatgtgaaagtgattttccacttatgtcagagatacaaagtttcgtttagggataaattgtaaaaaagaatataggcctgggtggtggctcatgcttttaattcccatactcagcttgagtaccggaaccaagactagtcgaggcaacatagtgaacctcatttctttaaaaaaaaaaaaaagaaaaatggcttgagcagagtggagctggattagctggaagctccacctcgcagaggccgggagccggtggccagggttgggttgctggatttgacgccacctggctgtgtgactgtggaaaggtgctcagctgctctgagcctccattttccattcataaaacggggtcatattaatttctaacaagagcgtggttgttggtgtgatcctcaaataagctgacagcggtcaggtggtgcccatggtcagtactgtgtaggcctggcgttaggatgtgaatatgaacacgggtgataggtgcgtcctgcacatgctgcaaggtggacctgaatgctggcaaaacactgatctagttcagctcatgtttcagaggggaaatggtcccttttgcctcatgccacactcccctggccacagtggaacccagtggctattaaggggctgtctggggtcagtcctaatgggtggctttagagtcagacgggtctctgagcctcagggcctcatccatagcatgagataacccctttgggaggctgagggaggtggatcatgaggttaggagttcgagaccagcctgaccaacatggtgaaacctctactaaaaatacaaaaattagcgtggtggtgcctacctgtaatcccagctactcaggaggctgaggcaggagagtcgcttgaacctgggaggcggaggttgcagtgagccgagatcgcgctgctgcactccagcctgggcgacagagagagactccgtcccccccgcccccaaaaaaaagaatgagataaccccatgctcggggggtggtcatgggactatacctgcagagcacacagcaggcgctccataaatgctggagtcataacaccccatgtcccatgtgccagctgcccagcagcaagtctggcctcctcctccggttctcggccctgaacaaagtcaccgctccagcgacagctccttg

SEQ ID NO: 7354 - DNA, 969 bp, Artificial sequence
  DNA replication origin
gggcttaagcgatccacccacctcagcctctcaaagtgctggaattacaggcatgagccaccacactggccacctgtcacgttcctaagtctcagctccaggtcctgtcactctcccctctgcctcttggggcctggcttgaagccctgaggcctgcccactttcctgaccacttctctccatcaggatggggccccaggcctggagcttgtgcatggcacaaaggcctggaggagagggagtggggtccaggcacacagggagtgcatgttggatggacatggacgaaggcatggccacccaccaccagcacccgcagctctacccgagagcccagggtttccctctccaccagtagagaggtgtggcctgcagctggtccactgggccaggtgctgggagccctgggggagcaggaccagaggatggggtggggggatttgtcagagatggaggctgacctgaggaggagatccttctgaatctgacagggctagagaggggtgatttggggagggaggcttgggctggaggaatccatacacactcggggtgagggggaaggagaggcgttagctccaggaaggtgttattttgggctgtgacccatgtgtgtgtgtgtctgtgtgtctctgtgtatgcatgtgtgtgtctgtgtatatgtatatgtgtgtgtccttgcacatgtcatgtggctgtgcaagtgcatgtgtgtgtgcatgcatgtgtgtgtgtgttgtgtgtggtgggaggcagcctggggctgtcagaagagggcagaaggtgggatcaggcctagctggacctgaaccctgcttgtgccagctgggtaactttgaggcaagtcatttaagttctttctgcctgtttccccattcaaagaatggaccaaatattacttacgttgtgaagatgacaaatatgtgtgtaaaatccaggcacacacgatgtgcttaggacacagcagtt

SEQ ID NO: 7355 - DNA, 1984 bp, Artificial sequence
  DNA replication origin
acaaaacatctttgtgttttgaacaaaggaattttcaatatttgattggtattctgttctgaagtctaagatatttttcagcctataaagccccctgttttatgcccttctaattctgatgtttgggtattgtgtgagtgcatgtgtttttttttttttttttaaagcgtgtgtgaacaaatggaaataaagcagggactgtgaacatttgtttttggtctgttgaagatctctcataatttaattcttaattttgggaatagtgcttttatcaagtgctttttattcattaaataatggatttgcttctcagcaggtttgcaaggcaagcatttacattttacatattagaacactgagttattctagtaccagagtgttgaaagtggtgccagagtgttgaaagagttgacgtggcttatgtcacagaatggagtagtggagtgaggcctccatttttgtagtttttgcatccttcctgtgagtcatgttttactcagcatcaaggaaacagtgatgagcaaagcagagatggttcctctcaagaggcaagggattgaaaggtcatgtggggaatcgacagtgccagtgagtgccaggctttctgcccctctttcctctctgcaggagttcgctccctgtctccacctaatgaattcctgctcagcctcaggatgtgttacttaaggttactgtgtcagggagccatccgtggcctgccacactcagtcaagtcctgtggtaccctctcgttttcctttgtacctcttctccacctcatataccacggttggaatgtgtgtgattactgaactagcttcaatagggcaggggttttgtcttttatgctcatctttatgttaacagctaggtgttcagaccaatctatgacacgtagttgggttattgaatgtttgcatgagtggcttacaaacagcttaaatattggcaggtgggttgagggattactggggaagtctgtagaagaccagttgtgaggaactgatgctgaattctgtttcagacatggcaaaatggaggtgctcgggacatccaagtgggagtgtccctgggcaggtggatattcaggcctggaattataaggtctggtgtgcaagtggtaaatgtggggctgccgggcctagacatggttatggaaaaggtgagaaggaggctgtgggaggggacagtgcctaggaagggtatagaataagaagagatccagaactgaatattaagacgacaaagtaatagtggccacctgggttgacaaagaccaggactctccttacctgggacgagaaagaccaggactgtggtgtcatgaagccaagtggaaaaatgtttccaggagtgaaccatctgaggctgaagagaccgagcagtgccttttggctgtaggagtggatcactgaagccttttacccattggtgacttgagaactgtgttggtgtggggatgggaattggacggaagtgagacttaactttgagtcctgacaaagcatttcgcaaacaggctgggaaagggatgagtgagggccttcaggaggctgtgctgcttgaatgttctactctaaggttggggacaccaagtgtgttgaatgccattgggaaagatccagttgaaaatgagaagttgaacatagggattaggagattgtgcagggggaaaatgggggatccaaggacagtggaaggatgggaggagcaagaaggaagaccctccagagtcgtgctctgcagtcggatccctggatggaaatcccaggcctgccgctctctgtgacctcaggcaagtctttccgtgcaaaatggagtagggctgttacctgcttcctaggatggctgtgtgggtcacatgctgtcataatgcaaggtggcgtatagcaaatgcttgttaaacagcgacggtctcgccgagctctggcctgagccgggggcagagggttggtcctgtcctgggggttggaagccgtggagg

SEQ ID NO: 7356 - DNA, 1568 bp, Artificial sequence
  DNA replication origin
cgccaccacgcccggctaatttttgtatttttagtagagacggggtttctaacagaatggctttgttcttaggaaataaaccttgaaggtaggggttaagcaaaaagatgtctttaacctatcctcaagtggttccgggagaaaggggaaggtaaagaaaaaacctgaggcgtgtgagctgcccggggctggagaggggagggcgccgggagaagcttctgcaggcacccttaggcggctggagcagcctccaccccgcagcctgcggccagccctccccaagcgacgctgggtccccagcgggacgggaatggcagctcaggctccgggctgctgttgtcgggggaaaaacggctcggcgctgtggccgctcccaggggccaggctgggccctggtgaggcaggcgggtggttgtggagggcagaggctgggagcccgacccctgaggaaaaagagacagctggcctgggttgggggcggggggtggtgggtggggtgccgcgctgaggtcctgggggaggagggggccagaaccccgggtcagaaggaggcggccggagatcaggaccgtgggttctgcggaaggaggaaagccgccagcctagggttcccctccgcatttctccccgccaaacatcccgctccgcagggggagggtcccaggcaggtggcagtggctgagcgggtgaggagcccagcggggcccgcgtgaggcacgcagttctaggtgccccgggaggcctgtgggagacccaggcgggaaggctgcggtagcgggcggctgagccgtcccgaatggaagtcgctcacgcaggagtgcaggggccagggtggtggcgtctgcgtacagccttctgggccctgggaagcctgtttgtcaccgaggcgggagcggggaagggcgttcttccagcaatttttaaaaatgtgattcgcggccgggcgtggtggctcacgcctgtaatcccagaactttgggaggccgaggcaggcggatcacgaggtcgagagttcgagaccaacctggccaatatggcgaaactccgtctctactaaaaatataaaattagctgggcgtggtggcacgagcctgtagtcccagctacccgggaggctgaggcagaagaatcgtttgaacccgggaggcggaggttgcagtgagccgagatcgcgcactccagcctgggcgacgaagcaagactctgtctcaaaaaaaaaaaaaaaaaaaaaaaaaaaaaggccgggcgcggtggtttacgcctgtaatcccagtactttggaaggccgaggcgggcagatcacggggtaaggagatcgagaccatcctggccaacatggtgaaaccccgtctctactaaaaatacaaaaattagccaggcatggtggcgcgccgcctgtagtcccagctactccggaggctgaggcaggagaatttcttgaacccgtgagacggaggttgcagtgagccgagattgggccattggactccagcctggcgacagagcgagactctgtctcaaaaagaagaagaagaaaaaaagcgatttgcttcagaataaatgaggac

SEQ ID NO: 7357 - DNA, 1221 bp, Artificial sequence
  DNA replication origin
cttgttatgttgcccaagctggtcttgaactcctgggcacatgcaaagtgaaagcagagaaagagtggacttaccccagaggcggatggttctgcagtgtgcaaggccatttcagaatacacatagagaaaacaggagaataggtggtgagggttttggggaaagagccaattttggttgaaaaagtaggggaaaccccagacattgtaccatctcagggttgagactgcttgcctagcttttgagattttttttttccccagacccctcaactcctgagatcttatcgggaagctgctgatcaccagttttaggtgtttttatctattgggagactgcctttctctggtctggctgcaaccaattattattttagagagacagcttaacctgacaaccacgtcatggttgcctcacattgctggtcggggagtggcccctctcctgccctgctcaggtctgactacttactgtaacaattgcaaggtttttggatggaacaattgaaagaatggagcttgcatgaaccaaaataagaaaagactatgagagggcattgttgaagatggaggcaaaaattctgagtggatcctgatgtgttcggatggggctggtgcttgggaggctgctctgtgcttacaagaagagttctacccggtccatctttatcacatcttctctaatactaagttcagagaggctttagctcattttccattttcttgggctgtctcctctgccagacaaagtgcctatttctcctgtctctatcaccgagccacacaattgctgtagtcatttgcagtctactagaacgataacacatattggcatcagacagatcttggttcaaaacctcgctccaccagtttctgtgttgagctagaccaagtgacatgatatactgagtctcagttccttatttgtaaaatggtgataataatttttggttaagtaattaaagtaaggataaatgatgcctttcgaagaaggacacaactggaatggccagtttaccccttgtcccctcttcggtggcattatttattctggagtaaggagggatggctgagggaatctgtctgtgggtccaacatggcgccgtcctgctccttgtatgagcctcaaagatggggacaaccatttgggggcagacatgtttgtagcacgagatccaggctcagtcccgaggcagccggaacgtgacgcaaggttgaggcg

SEQ ID NO: 7358 - DNA, 1218 bp, Artificial sequence
  DNA replication origin
ggttggaggtaaggtcatagatcaacagcatcccaaggcagaagaatttttcttagtacagaacaaagtgatgtctacttctttctacacagacacagcaacaatctgatttcgctatcttttccccacctttcccccttttctattctgcaaaaccgccatcgtcatcatggcctgttctcaatgagctgttgggtacacctcccagacggggtggtggccgggcagaggggctcctcacttcccagaaggggcggccgggcagaggtgccccccacctcccggacgggtcggcttgctgggcgggggctgacccccacctccctcccggacggggcggctggccgggcgggggctgccccccacctccctcccggacggggtggctgccgggcagaggggcgcctcacttctcagacggggcggctgccgggtggaggggctcctcacttctcagatggggcggctgccgggcggaggggctcctcacttctcagatggggcggctgctgggtggaggggctcctcacttctcagatggggcggctgccgggcggaggggctcctcatatcccagacggggtcgcggccgggcagaggcgctccccacatctcagacaatgggcagccgggcagagacgctccttacttcctagatgggatggcggccgggaagaggcgctcctcacttcccagactgggcagccgggcagaggggctcctcgcatcccagacgatgggcagccaggcagagacgctcctcacttcccagacggggtggtggccgggcagaggctgcaatctcggcactttgggaggccaaggcaggcggctgggaggtggaggttgtagcgagccgagatcacgccactgcactccagcctgggcaacactgagcactgagtgaacgagactccgtctgcaatcctggcacctcggggggccgaggctggcagatcactcgcggttaggagctggagaccagcccggccaacacagcgaaaccccgtctccaccaaaaaaatatgaaaaccagttaggcgtggcggcccgcgccttctgcaggcttttaaacccttaattgagtcttccaaatcagatactagggacacaagacaaccaccacaagtccaacaatttgcgaaagggcacaagttcattttgtagctaccatcctcagaacagatatccaaagtagaacatgcttctaagtgcatc

SEQ ID NO: 7359 - DNA, 1308 bp, Artificial sequence
  DNA replication origin
ccctcccggacggggcggctggccgggcggggggccgacacccccacctccctcccggacggggcggctggccgggcggggggccgacccccccacctccctcccggacggggcggctggccgggcagaggggctcctctcttcccagtaggggcggccgggcagaggcgcccctcacctcccagacggggcggctggccgggcggagggctgacccccccacctccctcccggacggggcggctggccgggcagaggggctcctcacttcccagtaggggcggccgggcagaggcgcccctcacctcccggaccgggcggctggccgggcggggggctgacccccccacctccctcccggatggcacggctggccgggcggggggctgaccccccacctccctcccggatggggcggctggccgggcggggggctgaccccccctcacctccctcccggacagggtggctgccgggcggagatgctcctcacttcccagatggggtggctgctgggcggagaggctcctcacttctcagacggggcagctgccgggcggaggggctcctcacttctcagacggggtggttgccaggcagagggtctcctcacttctcagacggggcggccgggcagagacgctcctcacctcccagacggggtctcggccgggcagaggcgctcctcacatcccagatggggcggtggggcagaggcgctccccacatctcagacgatgggcggccgggcagagacgctcctcacttcctagatgtgatggcggctgggaagaggcgctcctcacttcctagatgggatggcggccgggcggagacgctcctcacttcccagactgggcggccgggcagaggggctcctcacatcccagacgatgggcggccaggcagagacactcctcacttcccagacggggtggcggccgggcagaggctgcaatctcggcactttgggaggccaaggcaggcggctgggaggtggaggttgtagtgagccgagatcacgccactgcactccagcctgggcaccattgagcactgagtgaacgagactccgtctgcaatcccggcacctcgggaggccgagggtggcggatcactcgcggttaggggctggagaccggcccggccaacacagcgaaaccccgtctccaccaaaaccagtcaggcgtggtggcgcgtgcctgcaatcgcaggcactcggcaggctgaggcaggagaatcaggcagggaggttgcagtgagccgagatggcagcagtacagtccagcttcggctccgcatgagagg

SEQ ID NO: 7360 - DNA, 942 bp, Artificial sequence
  DNA replication origin
ggagggaggtggggggggtcagcccccctgcccggccagccgccccgtccgggaggtgaggggcgcctctgcccggccgcccctactgggaagtgaggagcccctctgcccggccagctgccccgtccgcgagggaggtgggggggtcagcccccccgcccggccagccgccccgtccgggagggaggtgggggggggtcagcccccctgcccggccagccgccccgtccgggaggtgaggggcgcctctgcccggccgcccctactgggaagtgaggagcccctctgcctggccagccgccccgtccgggagggaggtgggggggtcagccccccgaccggccagccgccccatccgggagggaggtgggggggtcagccccccgcccggccagccgccccgcccaggaggtgaggggcgcctctgcccggccgcccctactgggaagtgaggagcccctctgcccagccaccaccccgtctgggaggtgtgcccaacagctcattgagaacgggccaggatgacaatggcggctttgtggaatagaaaggcgggaaaggtggggaaaagattgagaaatcggatggttgccgtgtctgtgtagaaagaagtagacatgggagacttttcattttgttctgcactaagaaaaattcctctgccttgggatcctgttgatctgtgaccttacccccaaccctgtgctctctgaaacatgtgctgtgtccactcagggttaaatggattaagggcggtgcaagatgtgctttgttaaacagatgcttgaaggcagcatgctcgttaagagtcatcaccaatccctaatctcaagtaatcagggacacaaacactgcggaaggccgcagggtcctctgcctaggaaaaccagagacctttgttcacttgtttatctgctgaccttccctccactattgtcccat

SEQ ID NO: 7361 - DNA, 1531 bp, Artificial sequence
  DNA replication origin
ccccctccgcgcgcagccccagcacagcgcagagcgctcggaagtcggcgcggggcagacggccggcgccgcggcagtccaggtggtggaagacctcctgcaggtactggtccaggccggtggccagcaccacgatctcgttctccacgccgcggtccagcccgtagtggtgcgccagggcgctcagcagccactgcgtgcgccgcgcaggtcgccggtacgggtcacctcccgcgccctccatgccggcctccgcgcccgtgctgaccggctccatcgctgcgccgcgcgcctcgctcctccggtccctcctccggtcccttcgccccgccacttccaggggcggccccagagtttctcgaaaggaggggcttagcggtcgcggtctggttggagcggcgccggggaccgtgtccagcagctgcgctggcctcacagtgcgtctggtttaccccagttgctttggaggggcctggggtagggggtccaggaacccccgggaccccggcagcgccaccagtgcccggtcggcgtctgggtctggcttctccgcgtgactcccacgctctcctctcctcactcacggggcgttcctggcgtctgcgcttttcctcccactcccggccgtccactctcaactccctcctccctccgccccgcccgcctggcgcggagagttcgctccgagacctgggcgaggggttggcgcgggatccgaagcccaggagggccttgggggtggcggcctcgtccggttgctggggatgtgcccccacacccaagcgtcactcttccccctcttcccggaaggcctttcgagggttgcctggcaagcctgctctcgccgccctgtagccgtaggtgcggaaaagcctcccctccgcttcaattcagctactgggtttccgaacccacttcttgtgccaccatagaccgtgcaaagagccccaagtagtaactgggaaagagagggaaacaggcttggagaggcaaggggtctaggttaggggcaccccgctggtgagaagcccatctgagacgagccctgtgctaactgctctctcccgatccctgttgggggtggggataggactctcgggaaagtggtgtctcccggccctgccacctttgtgcctgccggtgctgacttggcaatgggatccgagttccatctcttgagctggggttaggttaacaggtcgatgattggctgatgtttttttctggtgttttagaacacatttctggaagatgaagaaaaacctgcttctctggtgagtgctagactgtgttccctttctttttcacgagaggggtgcagtgatattgtgatattgtccacctgttacctgcaccgggaacggttatccagccacggtacccagccatgttggagcaagaggcagactcttcagctgttcctagctatgacagagacagaatcttgccttgtggataactctgtgagtttaaatgtaaaatcttgccgtttgaaaagcgatagcattctgtctcctctgccacagtatcc

SEQ ID NO: 7362 - DNA, 938 bp, Artificial sequence
  DNA replication origin
gcggcgccggccgtctgccccgcgccgacttccgagcgctctgcgctgtgctggggctgcgcgcggagggggccaccacggccgggcaggcagcaggtgacgggaactccagagatgtgacccccggggatgcggccgctgagttggccacggacggggactcagataccgatgaagaggcgcgcctggcgctgcgcgccgagccgccggagctcaccttccgccagttccacgcgcgcctctgtggctacttcggcacccgtgcggggccccggctgccccgcggcgctctcagcgagcacatcgagacgcagatccgcctgcgccgtccgcgccgccgccgccgcccgccctgcgcgcctggccccgacagcggtcctgactgtgagcgcgttgcgcggctggaggaggagaatagcagcttgcgcgagttggtggaggacctgcgcgccgcgctgcagagcagtgatgcgcgctgcctagcactgcaggtgcgcgccggccacgaagggagggtggtaacgcccgggagagggctcgaactaaaagctggctggctgcggagcccgacaggacagagtcagaggaaggggagacagagggcagccccacaccatcccactccgcatcagcacacttgcatcttgcccctgttcctccccattccactccagtccccaaccctattcttaccacctattccattcctgaaaaccccaatcacactcaaacaaccataccccacttttctgctccaccgccacatcatcgcgtcttgcccctttaacctaggaattgcacctgtctgggtagtctcacatattccctttcaacaagcatctttctctctccttcctgccaggcttctgggaggtttaggagacagaagtgtgaagaaggccctgtcctcacctttagggatatccctgcctcctggg

SEQ ID NO: 7363 - DNA, 1122 bp, Artificial sequence
  DNA replication origin
cgccacatcatcgcgtcttgcccctttaacctaggaattgcacctgtctgggtagtctcacatattccctttcaacaagcatctttctctctccttcctgccaggcttctgggaggtttaggagacagaagtgtgaagaaggccctgtcctcacctttagggatatccctgcctcctggggtagactgacagctccttctgtcaatcagcaaagacttatggggctccctgtgggagaaacagagacaagtgagaaacagacaatgtggctcacactgtggatcaggcactcacgggccaccaagtgcctgcgggaaccagacccgctctgggctattgagaagaaaccatggggtgagatagggacccagccttagcatctgggagccgtcgacaaacacttaagcactgtgccagccgagcaccaagggcagtgctgggccgcaggggtcagaggaggaaaggaacagcccctaccccaggcgacaacaggccaggaagaaactgacattatatgaccccgccttagctcaggacactgcagagtgcagggaagtggcaaggtgtggttttcagtgtcagtgtgcatggaagccagggtggaggcgggaaactactcctctgatgtggaatcccaagtaacgtactgggagccatgggatgcgcctgaacggtcttccggcatctctcatgcttggtatttattgagcacctactatgtgccaggtttgttttaggctctgggaacacaccagtaaagacagatagaaaccaccctcaaaagcctctagtgagcaggcacggggagggctggaaatgccactggggggagtctaggagatgaggaaccgccacccggcaggctgaacgccgccaatacagtaggccgagaagagtcgcgaggttggtactatagagggaacagaatacaggcgtcgtgtctcagtttccttcagtgaaaaaacgttggggggtgggggatgaggaggaatcagagcttgggcctccctggggatgtggcgagggttaaaggagcttggacgcaccggacctaagggcctggcacccggaagcagacggcgcaagaaacgtgctcaagcgcttctgggtgcagaggcatgg

SEQ ID NO: 7364 - DNA, 905 bp, Artificial sequence
  DNA replication origin
ccaatctgtgttccacccaagaggaagcagggtctgtgaggggtggtgacttgcccacactcacacgtctgccaaaagccctgccaagatttgaacctgggtcccaagtccagcttcctgccctggtggagctagcacaggcagtcattacacacctgtttcctcatctacagagtggaaacatagcagtacccacctcacagggcagctgtgaggcttaaatgagttaagccacataaagtacttagctcaaggcctggcaaacagcgagtgcttagtaactgtaagctattatcattatgatcgaatccaggaacaaataagaatgagcacattcaactgcaatctatgataaacaaatagagggtgtttgtggatgaacaggaggatggatggacggctggctggctgggtgggtggggggatggatggatgatggatgggtgggtgggtgagtggatgggtgggtgagtgagtggatggatgaatagatggatggacgggtgggtaggtgagtggataggtggatggatgaatgggtgagtggatggatgggtgagtggatggatgggtgggtggggggggtgagtgaatggacaaatggatggatggatgggtgggtgtgtggggtgggtgaatggatggacagatggatggataaatggatgggtgggcagatggttgcagagcaagcaatggagcagacttataacttaagaaatggagaactgacaaaggaatgaaagaatacatgaataaacgcatggagaaactgcggaacacgagagcgcgtgggagggggattgcacacccgaagtttgggaaaatgggagccgaattggggaacttgggcccagggcacgcgcccccgctcacctgtagcgttgcagctccgcctccagccg

SEQ ID NO: 7365 - DNA, 1150 bp, Artificial sequence
  DNA replication origin
gcacacagtaagatgtgtgtggacacacgaatggaccagcgggcatgggagtggatgctgtcctcaaaactggaagaaagggcgtaacgcctgggacttcagcacaaggagacccctaagtggtccagtggccttgtcctgccttgaggggtcccccttcagtcctcagtagaaggtctctggtgggtttgtgacatctcgtccttttgaaaccgcccatatctcaaccagttgcctggcctggccccctaccctgctctgaagccaaggagcagctgagtccccttgatggggccttcaggacaccggggcagggcaggcagcctagggccagcaccactgggcaggggctggtgcccaaaaagacagaagagacagagagccagctcagctcagccggaacagggaggagaggcctggcggcctggcctctggctttgttgttgggggagggtgaaaaggctgggatggaggaaagggggtgggagagggagggaggagggacggcaattggctggccaccgtggaggggacacaaagatgaggccatctgagggctacctcctttcttctgccccattgctgctgcctggcctgacctggcagcctttgggtgggccaaactcagcgggtccagggtgggagggaggcagatgagtgggggcgagcagagggggcatggggcaccatctggagctgggaggcctcggattccatcgtccttggaggtgggtgtgtgggtggccttggtgagaaaagaggcctttcctcctccaggaacaatactcaggctcacaaagaggcagacccactcaggcacccactgcatgccccaggccctcaggatgcacagggggcttggtgggtgggggcctaggctcagaaggcccagcccaacctggctttgattcctggctcttcaacatgtgtggtaggagctagagctgttcccttcacttctgtgagtctcagtttcctcggctataaagtggctatgggattctgtcttggcataaacattgagtgtgatgggggaggcagcgtggtggtggagctctgggagtgtgacctgcagcaagccattctcacctctgtgagcctcagctcatctgtaaaatgagatgagaataataatgataataatacccac

SEQ ID NO: 7366 - DNA, 1328 bp, Artificial sequence
  DNA replication origin
ctgagtggacttcctatgaccaaatattattggaacacaaagacccctgctcgggaggtgccattcggagccatggccccttgctgagcctctcactgcgcaggtggaagccctgcagcacccaggaggggcaggcagggagcctcccgcggctgatccgcgtgactggggtgagcccccgcggagagtctgggcaggtgaggggcgcgggctcccggcccgggctccgtcaggtggacttggcacttggagggcccgcgagcccaagaggggagccagccggcagcgcgcacagcccaaacggggcacgggcgccggggccccctgcagcgcctccccatggccagctccccgccggcacctcggctgcgagcaccgccgccgcccgcggggcctccccgtgctcatcagcataaccccaccctggccaccgtgagtggcccagggctgcacgggtagccaatgaaacacaaggagcgtctgcaggcgtctgcaggcgtttccggcgtttcgctgactgcctgagggcgcggagcatgatgaccgacgaagcgggaagttgtgcctctgagggggccgtccggagatgcttgggggctgcagatagagcccaaagatgacggcaaaagaaacaggacccttagtaacatcagttgagctgctggatcaggctttgcctaaagccagggctaaccctggaatttcgtgttttttgagcccatgactctgattcataaaatcctgcattcagggtcccccagtgcaagccgagaatgggcacgttgcttagcagcaaccagtgtgaaaacccccgggtggggattcttgcttcaatgtgagaccgcgtgactacagcttaggtcataatagttgagatctcactggggaggtgccagtatctccctactccacaggctccagactacagcctggagaagaaaagacacaagggaataaggtcactgtctccaagactcaagggtagaggcaggtacctggttatatggccccatagggaggtgtttaactggggtgagacagcaaagatgggagttggtaatcaaagggaggcgattttagctcactgggaggaacaactttctcgcaggaactgctgatgaagaatgatggatgtgctgtggaaggcagtgagcttcttggcagaggaggtatgtcagcaggtaagggacttcagcggctggaattgtgaatacagttggaggttgaattagacattaatattgaaatctttccactatgagatgctgctgcttcttctattccctaaatcatttaagggtttcaacaagcaaaatgagatggaggga

SEQ ID NO: 7367 - DNA, 1218 bp, Artificial sequence
  DNA replication origin
agccgggtgcacacctcagtcttgcccagcatgccatgggaccagagacttgaatctgcagtcctgagaacagcatccttgggaagacttggccacgcggcaaacaaggcctctctgatgagccataaaagccctgcggaagctgggcaggggaggacagactcgtgcgtttcctcctcccgcagggacttatgcagcacctactgtatgcagtgagtacaacaaacagcaggcatagcccctccacgcccaggcagaggattcagtgaggagaggccaggaggcagaggatgtgccaggcttccctgcgggcggggaggtggcagtggagcaggctctttgccagcccctgctcagcggcagcagggcccagccctgtcggggacgatggggaacaaaggcccaggccgctggctctgcagccaaccgcccggaggaccagccagtccacccttgcctcaaggtcctggcgggcacgcccagtgcagcacaggccggcgtgggtccgcagcaccgcgcccaagtcctccctgagcccacggggcagagctggaggtgaccgcctgggacaaagggacgaagctggccgcacagaggggcctccagagcaggcaacccagacacccgttgctcagatgtcctggcctcactggagaggtgggggctgcagtccacgggggttggagggcggtttttctttccggaggggccccggagcgggaggcggcctcccttcctcccagcggtcgctgccggttctctggaagtcgcactgcgagagcatggaggccaacacctacctccgccgtgccccgacgacgaaggccatctgctcgggcccggccaggcctcatcctcccccgccgcctcccccaggactaggagctgcctctcagtgagaaccctggggaagtggtaaagctcttccaagctgatgcccgagcaggacctcatgatgagcggcagcggcggacccagagcgagtatgccggagaaggagcgcgcgagggtgaaacaaaggccggggccccggcgacgcctcctagtggagggacagtctggaggggcgctgccctcttcctgcggaagggcccatggtcgaaggcgggcgcacactctagctccaggcctgggtggccgggacgtacctcggccttagcaggttgtgaacccggtggtgccccacactggcatcagcaccatctcgcccaccttgcg

SEQ ID NO: 7368 - DNA, 1185 bp, Artificial sequence
  DNA replication origin
ccagggttctcactgagaggcagctcctagtcctgggggaggcggcgggggaggatgaggcctggccgggcccgagcagatggccttcgtcgtcggggcacggcggaggtaggtgttggcctccatgctctcgcagtgcgacttccagagaaccggcagcgaccgctgggaggaagggaggccgcctcccgctccggggcccctccggaaagaaaaaccgccctccaacccccgtggactgcagcccccacctctccagtgaggccaggacatctgagcaacgggtgtctgggttgcctgctctggaggcccctctgtgcggccagcttcgtccctttgtcccaggcggtcacctccagctctgccccgtgggctcagggaggacttgggcgcggtgctgcggacccacgccggcctgtgctgcactgggcgtgcccgccaggaccttgaggcaagggtggactggctggtcctccgggcggttggctgcagagccagcggcctgggcctttgttccccatcgtccccgacagggctgggccctgctgccgctgagcaggggctggcaaagagcctgctccactgccacctccccgcccgcagggaagcctggcacatcctctgcctcctggcctctcctcactgaatcctctgcctgggcgtggaggggctatgcctgctgtttgttgtactcactgcatacagtaggtgctgcataagtccctgcgggaggaggaaacgcacgagtctgtcctcccctgcccagcttccgcagggcttttatggctcatcagagaggccttgtttgccgcgtggccaagtcttcccaaggatgctgttctcaggactgcagattcaagtctctggtcccatggcatgctgggcaagactgaggtgtgcacccggctgctctccacgccccatcctgggaccccatcaaggcatgggcaggcgagcagcactgggatgtgtggtggggccatgggctctcaagtggccccatccacagctctgtgagtcgtccctcctgcaggggatatcccagacctctacctctacctggattcacaagatgtgggggctgggattctgccagccccaccctctccacccaaagtccacacatttttttagctggccctgggtggcagtccccaccccagcagaggaggatgcattcaaatc

SEQ ID NO: 7369 - DNA, 2017 bp, Artificial sequence
  DNA replication origin
gttataacaaaatcgagccaggttttcagaaggagtcagactcaaatgctgagaggggaaaaaaaaaaaatctctgagcttatataaaacagctgagctgccagtttattctgggcttctggtggtttgggctgaccaggcttggtggagtctggggacctgcctcagggactggccccctggcctggagccaggggttctgggggcctggctcaatccagggcctctgtggtggcacacagcaggccagccagaagagccaggcccagcgcggccacggcgaccagcgccacgtcccacaagacccccgggcgcacccaggacgcctgcagctgccagccacagctgcccagctggtagcctgtcagccggcccagcgggccatgggcagcgaggctggggctggcacagcggacctgcagcagggcctcgggcgtgcggtcctccagccagaggcgcagataggtgaggctgcagtcacagtgccaggggttctgcgtcacatcgagggtctgcagctggggcaggtggtcaaaggctcccgggggcacggactgaaggctgttgttggccagcagaaggtggcgggtgcgggccggcagggcaggcagggccgtgagtccgtggcccctgcagtccacccacagccccatggtttccagggcgcggcaggtacatgggctggggcagtccttggtggcctctgctgtggcccagagcaggaacagggctccccaggcaggcatgggacaggctggctgcagagagaggggctgtgagggagggcctggcagcctggaccgatcctcagggacggcaagcactggggatgtagcggagcctgacatgggacggggtgcactcacctcccttctcgggtctcagccttctcctctgggaaaccagctggtgactagggaaggtggagtgtgcccagcccaggcctggctaactgtctctggacaccgtagaaggccgggcggtgagggcggctgtggattgggtaagtttgtttttgggaaggggaagggacttcctggcccttagcagagaccccatcccctgcttggggatgagaggagcagatggctgctaaatgagtcccagcccaggaccacagtccccagagactaggaaagagccttggagggccctgcaggctgcgcccagcaccccccaccagctaagtgagctgttacctgattcccagatgcagaagacagcaggacagggacactggctggagcagggaggggaactcagtgggaccccatctggaaaaccactcatctgggctaacactgacttggggaaactgaggcccagagagggaaagcaatgtgcccagggccaccggtgtggtgtcagaggccagactcacactcgggtctcggcaaccgtggccctctgtttggttcttccccacaggcgtttcccctccaccagcagagctccccctacccacagcaggtttccagtgaataagtgtcaaatcaactcactcatcttgactcagccaaggagatggtgtctcagagggaatgtcccacccaaccctgtcttgttaaagggacaggaactgacctcctctctccctgtgggaggccatgctgggtaatacggagggccacttacctgtgaagcctttggtcaggtgctcctgtctggcctgaaaggtcctggctgaggcctgggtggcaactctatgggatacagctgaggtggccgctgcgggagcgggcggaaggaagtgatgaaaatagcctggcttatccccccagtgcagccttggggcctatttccagaggcaggaggccctcaggggcccgcgccttgggcacagaaccacatctcaaccccggtttatagaagggggtcccactgtgccgccagtgccttgatgggctttggaatcaggtctgtggaggactgagggtggcccctcacctgctcccagaaggtgggaactaggagacccctgagaaacgtggctctgctggttgttcctccgaatctc

SEQ ID NO: 7370 - DNA, 830 bp, Artificial sequence
  DNA replication origin
tgctgtcctctttgtcctctgctctcccactggccaggggcatgcagaagaggggaaggacagtttcagaagctggggaagacagtttctagaaagacagacttgccacctgtgcccagtgcagcactattagctggcaggcttgagctccacttccataataggcaccgtagcatgttgtcttgtatgttgagagtggattctgtgttacagcagagaaggaggcctcccagtgagcaggtggccagcagagaggcccgtgatcaggaagagcggccggatgggtgggtcagtggttatagctgctggtaaaattaccctacacaggctgggtgcggtggctgctcacgcctagtagtcccagcactttgggaggccgaggctggctaattgattgcttgagtccaggagttcaagatcagcctgggcaacatggcgaaaccccttccctacaaaagctacaaaaatcagccgagtgtggaggtgcatgcctgtggtcccagctattcgggagaggtgggaggtaggaggatcacttgagtccaggaggctgaggttgtagtgagccatgatcgcaccactgcaggaggtcagtgtgaggctggtgtcaggggaggtgatgtggatggctctgagggaggggagatcgtgtgaattgctggcagagttgcccgtgcaggggtatgtttggtcaaccatgcctgtggtgggagaggcactgaggctggggctggtgctgttgaatgctgaaattttatccctagtgtgcttgcattaggaggtggggcctttggaaggtaattagggcccttataaaagtgcttgaggtt

SEQ ID NO: 7371 - DNA, 1174 bp, Artificial sequence
  DNA replication origin
ccgctacactatgggagccccggccagcccctttctgggctggccaaggccggagccggctccctcagcttgcggtgaggtgtggagggagaggcgggggcgggaaccggggctgcgcgccgcgcttgccggccagcgcaagttccgggtgggcgtgggctccgcggccccgctctcggagccgcgagtccggagcagtgaggggcttagcacctgggccagcagctgctgtgcttgatttctcgccgggccttaactgcctccccgcagggcagggcccaggacctgcagcccgccatgcctgagccttccctcctcaaccactccccgccggccccagtgggctcctgcgcggccccagcctccccgtcaagggccgccccctgctccagggcacccagttcccattgaccacccaagggctgaggagtgcgggcgcacggcacgggactggcaggcagctccacctgggcccccgtgcgggatccactgggtgaagccagctgggctcctgagtctggtggggacttggagaatctttatgtttagctaagggattgtaaatacaccaatcagcactctgtagctcaaggtttgtaaacacaccagtcagcaccctgtgtctagctcagggtttgtgaatgcccaatcgacactctgtatctagctactctggtggtgacttggagaacttttgtgtccacactctatctagctactctggtggggacttggagaacttttgtgtctagctcagggattgtaaacccaccaatcagcaccctatcaaaacggaccaatcagctctctgtaaaatggaccaatcagcaggatgtgggtggggccagattagagaataaaagcaggctgcccgagccagcagtggcaaactggtttggtccgcttccacgctgttggaggtttgttcttttgctgtttgcaataaatcttgctgttgtttgctctttggagccacactacctttatgagctgtaacactcaccgcgaaggtctgcagcttcactcctgagccaaagagaccacgacctcaccagaaggaagaaactccgaacacatccaaacatcagaaggaacaaactccagacgtgccgcctttaagaactgtaacactcactgcgagggtccgcagcttcattcttgaagtcagtgagac

SEQ ID NO: 7372 - DNA, 998 bp, Artificial sequence
  DNA replication origin
gcggctgcaacccctgggcaagatggggcctggcctcctgccctctgcagggtcataggagtgtctgggagctcagggtcagggccagatggctgttcctggggcctggggctccagctcaggatgtttgggaacaggaactcttggcttggagaagcccattacaccacaggaggcctgagatggtcggtctgcggggagcagctcagactgggggtggcagagcagcgtgtggctgtgtgtggccaggtcaggggagagtggccaatgctgggccctctctaaggagcccgagggccacaaggaccgtggaagaggtcttgagtgagggagtcgggaccttgtggctaggggtcttgcttgaggatgctctctgcagccacaaggagatgcccaggcaggaccaggtcaggaagaggctggggcagaggcccaggcaggaggtgggtgggctgggtggggatgggagtagccagggtgaaggtgaggacagggaaggggcccccctgcctcctggcttccctgagggcggggctggccaatcccagcggcaaatgtgtgcagggaggagtggggtccaggttggagctttgggagcccttggaggcagcaaggcagactcacctctgggacccagcacccagcttgggcgtgcaggtgggggctcagaagtgaacatcgtggggctttgagcaagactctctgggatccagtctcagcttccatactttgaagtcaaggagtggacctgtgctgtctgtttgctctggggtctgggcagtcctgttgtttgggtagaggcctcagagggccctagggacagactgacccaggtctgagcctcttgggagcgtgcggatggccgggctcagacaggcctggttatgggtttgacttacaaggggcacacgcgcactctggtgcttcctggcattcagaagagaagagggagttcagacatcaggccttccttctccctgggaaggatggcaggtgcc

SEQ ID NO: 7373 - DNA, 1183 bp, Artificial sequence
  DNA replication origin
actcagccagagaactgcatccccaccccaggactaggagcgatcaggaagtagttgcttttaggaccagagggccaaaactttttgtcagaatttccggcctggccacgcctccctgcagtctctttgtggacctggtggtggaactttactcgactagggccagccccggttccctcccccagctggagtttgatagaaactgaaaacttcacagataccggaaggtgggggagagaaccaagctttggcaatggctccgaataaaaacagcaggatgtggttgccacaatgtcctggcagtggtttgataaatatttgtgatgaatgaaatcagagtttcttaacctaggtgttagtactccctaatcaaccaggagatcctgggctgaaggcactcagtaacttttctgaaccgcactgtacagaaatctttgcttgctttcatggtttcgagcccccatgatcttcaggacaccctcagggcacagggctgggacgatctctgccagggagatgggagtcactggagccttgctgctgctgggctctgcctctccgggtggctctaggcctgctccttgttgcctttggctaggatatgtagctctttgtctttgtttctataaaattgggataatttctgggtgttgcctccctcctgccccaaggtggagaaaaaagtaagtcaacagtctttatgtgtccacagtgcctctcagtagatgtgacggggaagcagaaactcctgcctgaggggttttattattattatattttaatcgtcttctggggtctgtgttttggtctccgtggatggaaaagagcaaggtgcagaaggcagctttgagtcactcgggaccacccttttggagcaggtagccagggaagggctggagtgggtggagtgtccgttattgagtgtgcccagtgatgatgccagcagctgcagggaaatgggagtgtgaaaatacaggctaaagagcagtggtgtcctcctcatgtgctatcggtctgtgtctggagtgtctgtggtggcccagtgctgacggtggtcagggagggggcagggttcctgtttacctgttgagataacagactgtgtcccagcagagctcctggtttactgcgcacgggttatgcaatgcagggccaggcagttcgttattttctttccttatgg

SEQ ID NO: 7374 - DNA, 1062 bp, Artificial sequence
  DNA replication origin
caggccggtcccagcgtccagagcgccggcccttcggcttcttctaggccatggcagggccgggcccaggcccgggggacccggacgagcagtacgatttcctgttcaagctggtgctggtgggcgacgcaagcgtgggcaagacgtgcgtggtgcagcgcttcaagaccggcgccttctcggagcgccagggaagcaccatcggcgtcgacttcaccatgaagacgctggagatccagggcaagcgggtcaaggtgggaggccggccagggcccctggaaggcgctccctcggagggtggggcgggggcagcggagcccctggccgcggcgagcgcaccccgcgtccatctgaagtttcctttggcttcccctttttccttcctcgggtcggagcaggcctgggccccggggtctgggccgggttcaagtcctcaaagcgccggccgtgggttgctggggggggggggggcgagggagtgtggaggaggcggccctgccctccggagctcacaccctaggaggggactgtgctccaaaataactttagccattggaaggcagggggttagactcccctgttccaggtactagcggagcgccttggagtgcggagatcagaccccccacctccatccaccgcgatggcagcccccagctcagcccaccggcggggcactcagccagagaactgcatccccaccccaggactaggagcgatcaggaagtagttgcttttaggaccagagggccaaaactttttgtcagaatttccggcctggccacgcctccctgcagtctctttgtggacctggtggtggaactttactcgactagggccagccccggttccctcccccagctggagtttgatagaaactgaaaacttcacagataccggaaggtgggggagagaaccaagctttggcaatggctccgaataaaaacagcaggatgtggttgccacaatgtcctggcagtggtttgataaatatttgtgatgaatgaaatcagagtttcttaacctaggtgttagtactccctaatcaaccaggagatcctg

SEQ ID NO: 7375 - DNA, 2086 bp, Artificial sequence
  DNA replication origin
ataaaacccacaggttgtaagtttacattttaatgattttaataaacttgaggagttgtgcaacccttaccacagtccaattttagaatcaccccgcaaaggcaagggagtggtgcctgggttttctgacaaaatctatactcagaccaacatgtcccctgccccagcccaaccagttccaggctagagcagtggaaaggccagttagctatccaaccaccgtctacccctacgcttcatcctggctcctggattccacaccattttgtgctgtggtagctgctctgagctgggggcaggccttgttttctggagttctggactttgacctgagctagtcccagcatgcagaaaccttccatcccatctcctgtctacttctaccctggagtggaggttatttcctgcctctctaactctccgctcccatcaggtgtaccaaagtggggctctcaattgcttttcagtggcactttggggtttcctgtctgattctgttgggtatttcccatgggagtggagttcaaactttcagaagaaacaactcttctgccttctccacggggtctgcctttgcagactgctcattcagtccctttctatcttgacctgaaaggttggctggggtcctcacagtggcactgggggacttgctctctgcgaagtctccttcagcttgaagactttccccttttctcctggatttttgtctgctttgtccacaggtgcattacaaggccccaggacaatgcccgcctgtagtagccattcattaaatatgttgaatacctggaattggagtgccacaaggaagctgtctagaggggtaaggggtgctgtcaattccttcccatcttcggagctgggaagcccagtcctgttggatctagtataagcttcttacagatgtttgggtctcctttctctgaggcgccctggttcactgggccaactcaggagttggtctgcccttcctcagaaatcccttcaagtttttctgttcctcttcctagactggtgctttttggctgggtcagtttcccaaatgggcctgtagctgctctgagctgggtcatccagccgtttagcagctgcttcaaccactgctaggctgccttttggagacaagagctcccagctcctccttctggcctagcttcccatcaaatggggccctgggtcctctcctcacaaggattttgggctcctccgcagttttgtagccagcctggattctggccttctgcagcctgctccctcccttcccttccgcccctgggaagagcgacccccaccactctcggagactgcactgcccgcctgtcagagtgggcactcaggtgacactgctgtggtcgtccccttcctccgtgatccattccggagggggtcattcttagtctaggcctgcaggcccggagctccagccatggtctccgcctgtccctgaccggcggtctgggaggcagcaggtaggggatcccgggcaggcggaccaggcctgggtggggggcgagcaggaggcgcgggacagcacctgggggtcccagctgatgaagggtcggggtgggcagcggtttgggggccagacggatccgcggtgtgggcgcgccggggtgttgatggaggaggggccgaggtgctgagggcggggtcgggctggggtcggggctgagggcggagtcgggtggggcggagtcagagctgaggtgagcctgagggcggagtcggggcgggctgaggtgggcctgtgggcggagtcggggcggtgtgctgaggtgggcctgagggcggagtcgaggtcgggctgaaggcggagtcggggagggctgaggtgggcctgaaggcagagtcgaggtcggagctggggacggagtcgagttcgggctgagggcggagtcggggcgggctgaggtggtcctgtgggcggagtcgaggtcgggctgagggcagagtcgggtcggagtcggggcgcgctgaggtgggcctgggggcggagtcgaggtcggagctgagggcggagtcgggggcggggacgtaggcggaacccgggtcgggctgaggtgggcccgagggttgggctggg

SEQ ID NO: 7376 - DNA, 1462 bp, Artificial sequence
  DNA replication origin
cgcgtgggcgaggcggaggagagccgtgcgcagcggcgtatgtggggccgtgtgcagacccgcgtgtggcgcaggcaaggaccctcaaaataaacagcctctaccttgcgagccgtcttccccaggcctgcgtccgagtctccgccgctgcgggcccgctccgacgcggaaggtgagggctgggggaggggcccggcgctgacggagccgcagtgcgggtcgggtctgtggcggacagagagggtagggagcggcgaggtggcgatggcggccgcactttggcctgcgcctctgctgcgtcaggcgggaagctcggctgctgccgccgcctcggacccgggtttctggcgcaccgctgtcggacgacacttctgtcctttcttcgtcctggaaagctgggtcgccgagcatgcgggtctttcggcgccacggccgcaccccaggccgcaggcttagggcagaggaggcccgcccgtgcgcccttggggccgaggccctgacgcttcgagggtcgcggaatgagggaccgagggtggatttggcgggaactcactggaaggagtccgtgtggtggggaaaggctcccggctgcggatgaaggggggatggggtgggtatagtcgtgcaggccatgtgctggggtcgtgcgcctggcgggccatgtgccaagggttttgggggccttagaaaagggttcttaggccgggcgcggtggctcacgcctgtaatcccagcactttgagagtcccaggcgggcggatcacgaggtcaggagttcgagaccagcctgaccaatatggtgaaagttggtctgtactaaaaataaaaaattagccgggcatggtggcgggcgcatgtagtcccagcagctcgggaggctggacaggagaatcgcgtgaaccccggaggccgaggttgtggtgagccgagatcgcgccactacactccagcatgggcaacagagagagactccgtcttaaaaaaacaaacaaacaaacaaacaaacaacaacaaagggttcctgaagaagcctttgtgtttggagtggcgagactgctggaagacttgggagcttttagagtttatactccctatccttgatagttttccgattcttgaatttttatcgtcatttaaatactaagttgcttgtgttacattaccattccaaaaggggctgatggggctcacattccaagagttaacactatttaagttgctgggatcctttaaaagcgccattaccagaaaaaacacgaatttgtcaaacctccaaaaccacagcagcgggcggtagtctgcatcatttcttggattaatgaaacagatgtaattacaaacgagacacgaaattcaactagctcccctccatctagatttttccatatcgtgagaacctgttttagaatggcataatggtccacatttgggtttaggtgttgattttattatgggtaaggct

SEQ ID NO: 7377 - DNA, 1064 bp, Artificial sequence
  DNA replication origin
atcacttgaacccaggagttcgaggctgcagtgagccatgatcatgccactgcactccagcctgggtgacagagtgagaccttgtctgaaaaaaaaaaaaattggctgggcgcggtggcttatgcctgtaatcacagcacttgggaggctgaggtcggcagatcacttgagatcagcagtttgagatcagcctggccaacatggtgaaaccctgtctctactaaaaaaattaaaaaattagctggtgtagtggctcacacctgtagtcccagccactccggaggctgaggtaggagagtcgcttgacctggcctggaggtggaggttgcagtaagccgagatcgtgccactgcactccagacagagcgagactccgtctcaaaaaaaaaaaaaaaaaaaaagagtccttctggagcagagtggaggggtgactgggtaaagagactgttggagtaattcagaaggagaggatggtgcctgaaccggcgggagtaggagaggtgggacagtgcaagagctttttgagggataatgcctgttggcagggttggtgtgagggttgaggggtggatgtcaacagagatgatgccattttctactttgagctgacagtggtgctcttgactagtttgcaggggaggaaaagatggggtattggatgagggagggggaaggagatggagatgtttgtggttgcagacatgtggagtttgaagtgctgtgggcgccaggtggagttgtctgacaggcagttggaaaaggcaggtcttaagctcagacaggagataaatattgggagtcagtggcatataagaggcggttaaagccatgggaggggataagattgctgaagagactgtgagaagagaagcggccaaggacagaataccccagagacaggcttaaccaaaaaggagccagaggagatgatgggtgggaaccatcagtgggagccagtggtagggagagaagcaggacaggttgggtggaggggactcggagacttaagaagcctgagtagaagagcagagtttggggaacccagagtctgagagtctgacact

SEQ ID NO: 7378 - DNA, 1368 bp, Artificial sequence
  DNA replication origin
gtgaggggcggtgacgcgggtggccaaagcggagcggagcgggggtgaggagagtcgagggaggtgacgcgcgctgccggggcgaggtgaggggaggggaggcgacgcgggcggtcggggtatggcgaggggaggggaggggaaaggaagcgacgcgagctgacagaggggagcagaggcccgagcggacgcgaggcgacgcggagagggcggcctgggccgaagtgaggcgacgcggggcggcggagtctgagggccggagcggagcggaggcgacgcggggaggggcgagggatcgcggccggtggctgggggccacctgctccccgagcaccggcccccgctccggggagcagagtccggagcgggatccgcggcccacaggttcgcaggtcgggcccggggacgctgcggactagcgggcgggaggcggggattctgcaccccggccccgggccgtccagtggccgccctcgaggtgaccggttgctggccggcgtgggtcgctgaccccagcggggactggggggaaggacggggagttgggggcaccaagtcacccggaggaggcgaccccagctagctgcgcttgccctgcttcgctggactgtgaagccccctccgctgcggctcttcctgcgctcaggcaggcatttgcagagctcctctcgggacttgcctcagtgccctgcacggagctgggcagtgggctcagggagcgaagcaaacgggcacatccttgtctttgtgggactttttggggaagactttagacggtggtcacggaggggcacggccctgtgggaacggaaagagaaggcggggactcaaggaataagacctaatatttgagatacgtaagccttttccttacgttttgtaatttaaaggttgcgaggggcggtgttgaagaatgtgtgggcgaacatcctgtcacttacctagagatgttctcacgagagcttgcgcctaccaggatcggcggggccagcagcggctcccggagtggagggaccctgataagtactgcccctcttacaacaagagtcctcaatccaacagcccagtgcttctgtctcgactgcactttgagaaggtaaccagcattgcactatgctagcccctcgcccagcctcgtgatggtcatctcctatttggtttggtgtgtgctcagcctcttgggatgacattaaaaaccagcctttactgatatattctgacttccagttgagaacctctcttggcctcatgaaagaagttttatcagtggcttctaacactgataaagacgtatttttcaggctcaatttaaatgcctttgctatacatggcatactagccttaatatatgccaaatttatatgagct

SEQ ID NO: 7379 - DNA, 1605 bp, Artificial sequence
  DNA replication origin
agggcgctggcgccaagaaggacaaaggcggcaaggccaagaagacggcggccgccgggggcaagaaggtgaagaaggcggccaagcccagcgtccccaaagtgcccaagggccgcaagtgagcgtgtcggccggtcagagcggccggcgtgggcttttcggtgtttttgtttttctaccccaagtgacgtagattttgtacggctcacgccggccggggccgcgaggcctggtctgagcctcagggaggggccccgggtcctctcagtctttcccctcccccaacgatgtagcgtttttcgttgtttgctttaggtttttgaaacagccccggcgacgcctctattggctctcggccttggcaacggccgtcgtcatggttactggcccctaggcgccgatggccgaggccgcgcctgcccaccgggcggggtcgctggttggccgggcccaggcgcgcggggacgcggaggccgcgcatcctttcccagctccccaccctccttgcctttgggtgcgcgacaaacaatcgctccgggctcagggctgcgcggctcttcccttcattccatgggcctttttttgggcacaataaagcgtttaaacctttcagcctctctcgtttaatctgagtggaatagggatgggcgccttcggcacgcggggttggatggcgggcccctcgggtccttataccccagatctgttggccagggtaggcctggagccaggggccttcagcaaggggtgggaattgctggcttgggacgaacttaaagtacctgggacagggagatagacaggatcggtcccttaggagggatggatctatctgcccccacagggggtccatcggccattgcggggagcgggatgggggaggggagaggaggggggattaatgggttttcagagttaatggtcagggacctaaacttggcctccagagaggtagttcttacaaagtcacaccagactggcctgtaaacttagtcattctgactccagcgagggttagagtgagatgtgaccaggacgaagtgtggtggccagagagtggagttcctgaccacaatccaacgtgtggtctcagaagggtatttgctgtctctgagcctattggttaagctagagtgcaaacgggacccaaaggattgctgggaaaattagtaggagcagaaggatctccagccctgggacattctggtatccagcatgtgggatagttgtctgtccagttgggcaataggtcaaggtctattctaacagatgtccctaaaaatggacaactgcaaaacaggcccccaagggcagtggaaacagggaagcttctgaaacagtggatatatactcataccagcgtgagtgactggagttaggtgagaatgcaggagagctcgttttaccctctgtgtaagaaattgcagaaactacaggtggaggcaggacctcctggccatagactggagaggagggagcattgctggagaggagcccaggcctgctgctacccctgatctgggcctggcagacctctctgccgcctgggtgagttgccactccattccctctgcaaatcttcataacccattgtggcttcctccc

SEQ ID NO: 7380 - DNA, 1296 bp, Artificial sequence
  DNA replication origin
ccctaggctgcgggagcgcgagaggaggggggcacctcgtttggaggccaatagcgcgggccccagaggaggccccacggccgggagcttggcggccggcaacccagagaacgccacgggcacccgagccttgtcccggcccggggggctccaggcctgcccgcaagaggagctttaatttgtccaaactaacacagggcgcgccctcacgtggtcggctggggcaacgtgaactgcgctaggacatcctcgggggttttccgccccatccaaaggggatggcggatgggaggcactctccagctgcaccccgggttctggttgtgcctctgggagcctaggcacaacccggggaatggaggactacggcaggacctctctagggacactgcctcgccgctccccccaccctgttgccgctgatgttcccagggcctcattttgtaatccacaagtagctgccgccggtccccccaaagccaaatgggggctccagggtgggacagggtgggcgggggtgaggctgtgacacccagaggaattcctgtgagaggatggggaagggattcgctcttagttcctgggtgcacccctccccctctcccgtgcacagggaaatgatggcgggaacacagcaaaggagaccatgtcctggagagggtcccgggccccaccctccccgggggggcttgtgcaaggctggcggcccgatctctgctgattccagtattgggggtgcagagaaggcacaggacagtttttgttgaagccgttgcagcctccacttggggaagctgaggccagggtaagatgctcgggtaggagaggggatccctttgggggtaggtgatgtagggcacaggagtggggctggggctggggggtggcagggttgcaggcaggagacagtctccagaggcccagcatagaaaagcgatggaggggtgaggggggacaggacgctggcgaattggggttcccagagtgagagacaggaacatttacaggtggacagagtaaaaggccctgaaaagggggtgggttggtgcatttgtggccttgggcccaagcaggcttctctgggtgagggctagcagcacctcccctcttctccagctcacccctttcacacacacacacgccccccattttgtcaccctgtcaagggaataaaccccagagaggaagaaattatgtctaggaggaaacggtgagcctggatgggttttttaggggggaggctggcaggggcatggagccaggaaacagccttcgccccccagagcaccaggtacc

SEQ ID NO: 7381 - DNA, 1802 bp, Artificial sequence
  DNA replication origin
atatctgtatatagatatagatatatagatatatgctcttagagaaaacattcaaattcaaggcataagtatctccaaccccatcacatgggacgtgtcactgctttgatcttcctgcctgcacgtggcattagccagcaggactcgcgttagacagggctcgagtcctcgtggtcagtgcagggcacatcagtcctgctgtcccatggagtggtgacaggtgtcctttctatgcactggcactggctctctgctcagatgtgtcaccgtcctggccccttgggttctagggttgtttcctctggtctgggagcagaggtgcggtcgctgacctcccagcagatgatgaggagtgggcaggggtgtgtgctgggagcttgtgtctggtcagggaggcagcgccctgcagctggctcggtggccaggggttctgcccactgcagcctgagctttgcgaggtgccaccagattctggggcctctgtcatgggcatgtgtgtttgtgtgtgtcagtctcgaggtccccagaacatgagggcagaaacaagacaggacagagagggcgagggcagggggagcctccagccagaccctggctgacaccacgtttttccctgcagttggcatcgaccttgtgtgtgagtgagtaagtggccacaggtgtttttgaggatgtgagaatgggtgtgtttgaatgtgtctataggtatgtgtgtgaatgtgtaagaaagtgggtatgtgtagagctgtgtgggtatgtgaggatgtgtgtgaaggtataggtgcacgtgagtatgaatggctaggtgagtgtgtgttggcttgtgtgtaagcacctatgtttgagggtgtgtccgtggtcaagtgtgagcttgggtgagtgcatgtgaactggtgagtgggaatggtgagtgggtgaatgtgagggtaaatgtgtcgagtgtgtgtgaatgggtgagcctgtgtgaatgtgagcgagtatgtataagtgcgagtggctgtgtaaatcagtgagcatatgtgtgtgagggaagtgagtgggagcatgtgaatgcgtgtgtgaacctgtgggtgtgaagggtatgtgatggtgagcttatgagtgtgaagggcacatgcctgtgtgaacatgtgtgtgtgagcacgtgaatgggtggatgatgtgtctgagtaggtgtatgtgtacgaatctgtgagtgtgaatgggttagtgtgtgggtgtgaggggtaaactgtgtgaccattttgtgagcatgtgaatgagaggatgacaggtgtgagtaggtgaatgtgtgtgaacctgtgggtgtgaatggtatgtgtgaggataaatgtgtgggtatgagtgtgtgtgcatatatgtgtgaatggatgcgtaggtgtgtgtatgaatgtgaactatgtgaatggtgtgtgagcatgtgagtaggagggtaaattgtgtgtgagtaggtgatgtgtacgtgtgtcaactgtaagtgtaaatggtgtgagtgtgtgtgagcatgactgagtaggtatcagtgtgagtgtgaagtgtgggtgtgaatggtgagcatgtgtgagggtaaatatgtgtgagtaggtgtctgtgggtgtgaactgtggctgtgaatggtgagcgtgtgtgaaggtaaatctgagtgtgagtgagtaggtgtctgtgtgtgtgaactgtaggtgtgaatggtgagtgtgtgtctggaagcccagaatcagactgtcgagctggatcattcagactccatacatccagcccctttatacaaactgggagactgaggctgggcagtggtggtgggg

SEQ ID NO: 7382 - DNA, 853 bp, Artificial sequence
  DNA replication origin
ccgtccgggacgtgaggggcgcctctgcccgaccgcccctactgggaagtgaggagcccctctgcctggccagccgccccgtccgggacggaggtgggggggtcagccccccgcccggccagccaccccgtccgggaggtgaggggtgcctctgcccggccgtccctactgggaagtgaggagcccctctgcccggccagccgcccgtccgggagggaggtgggggggtcagccccccacccggccagccgccccgtccgggagggaggtggggggatcagccccccgcccggccagccgccccgtccgggagggaggtgggggggtcagccccccgcccggccagccgccccgtccgggagggaggtgggaggggtcagccccccgcccagccagccgccccgcccgggaggtgaggggcgcctctgcccggccgcccctactgggaagtgaggagcccctctgcccggccaccaccccgtctgggaggtgtacccaacagctcattgagaacgggccatgatgacaatggcggttttgtggaatagaaaggggggaaaggtggggaaaagattgagaaatcggatgtttgccgtgtctgtgtagaaagaggtagacatgggagacttttcattttgttctgtactaagaaaaattattatcctgttgatctgtgaccttacccccaaccccgtgctctctgaaacatgtgctgtgtccactcagggttaaatggattaagggcggtgcaagatgtgctttgttaaacagatgcttgaaggcagcatgctcgttaagagtcatcaccactccctaatctcaagtacccagggacacaaacactgtggaaggc

SEQ ID NO: 7383 - DNA, 2589 bp, Artificial sequence
  DNA replication origin
agtggcacttaagtcaggctctagactaggtgttggtttggtggggcttgcttttcctcctgccccagcccgcttcacaaaacctgagtcctggctaggctgggagtgagattcctgtttctagattttcatcattctgtgtagcacaaaacaaggtcgggggggaaaggagacagatattagcaagtatataaaagataattggctgggcatggtggctcacgcctgtaatcccaacactttgggaggcagaggcgggcaaatcacctgaggtcagaggcgggcgaatcacctgaggtcaggagtttgagtccagcctggcccgtatggtgaaatcctgtctctaccaaaaatacaaaaattagcccggcatggtggtgcatgcctgtattcccagctacttgggaggctgaggcaagagaatggcttgagcccaggaggtggagtttgcagtgagctgatattgcaccactgcacttcagcctgggggacagaatgagattccatctcaaaaaaaaaaaaaaaaaaaaagataatttagccagagaaaacctaaaagaggaatcaggatggggggattaggaatggcagagtaagagctgggggagaggaagttagggaaggggctggaacaaacagaaaggaggtgggggaggggaccagggaaataaagtccaagaggtcagcagggatcagaagccacaggcttagtgggggcctcaggagagcagcaagctgcgtctatcttggaaaagtggagagaggactgcagtgacctcagcggggaggaaatgggaggtagcagggcagaggaagcagcggacagacaggaggaagagatggtgccctgggtcaggtggcggccaccgctaccatcaccagaagtagaaaactctgtgttctccttacctctgtcaccatgacacccccatgctttctgcccccaccttctttagtaatagatgctggcaactaaggagcagaatctgatttgaggttgccgaggaaaccatcaggggcagctgtgaacccaccagccttgcccagtagggagctcaggatccctaaattggatgagcaaataagcttctgcaggccttgctgtccaggcaaataagacgagggcagggccatgtggtggaggtgggtctcaaacaggactcccaagggcacaggccctgcccagccttggcacccaaggcagagctcgtcagccctgggcccctgtgggctgctgtggccacctcccttcaggcagtgctgcccccacagggacaggtgacctctgcgggcctctcattttccagtggtgctcagtgtatccagatgcctcatgcaggccctctctgctgggtacccaggggcctcaaagcgctggccccaccaccaggacactcctttgagcctcccgaccttctcatgggtcctttggagcctgggttttggagtttgtccttcctaaagtgctgcccacctgaacgcagctgccccaggaccaccgctgaccaaatgcggccacgtcccctgcaggccacccatcaagggcacaggtgacaggtgcccccaaggggccgtggcctgtcctgcccagggctgacccctcggggtagggagagggcactaactcaggtcgtctacctgcctcaaggctctttcctcacctggggtgaagggctcccaatccttgcacctcaggggtcttcctgttttactgatgccaacaaaagaacattgaccatctcccgtgtgcagggacagagaagacagacacgttggccctgggtgggtgaaggagactagtctatcagagtgaaaactccccatggagataggggctaagaaggaaacaccagccctctccctctccctctccctctccctctccctctcccacggtctccctctcccacggtctccctctccctctctttccacggtctccctctgatgccgagcagaagctggactgtactgctgccatctcggctcactgcaacctccctgcctgattctcctgcctcagcctgcagagtgcctgcaattgcaggcgcgcgccgccatgcctgactggttttcgtatttttttggtggagacggggtttcgctgtgttggccgggctggtctccagctcctaaccgcgagtgatccgccagcctcggcctcctgaggtgccgggattgcagacggagtctggttcactcagtgctcaatggtgcccaggctggagtgcagtggcgtgatctcagctcgctacaacctccacctcccagctacctgccttggcctcccaaagtgccgagattgcagcctctgcccggccgccaccccgtctgggaagtgaggagcgtctctacctggccgcccatcgtctgggatgtgaggagcccctctccctggctgcccagtctggaaagtgaggagcgtctctgcccggccgccatcccatctaggcagtgaggagcgcctcttcccagccgccatcacatctagaaagtgaggagcctctctgcccagccgcccatctctgagatgtggggagcgcctctgccccgccgccccgtctgggatgtgaggagtgcctctacccg

SEQ ID NO: 7384 - DNA, 1700 bp, Artificial sequence
  DNA replication origin
ctgcaggtcccgcagctcctggtcccgctcagcgcctccagatgcctcacccgggccctctccgttgggtccccggggcctcaaagcgctggccaagcagcgaggtcactcccctgagccacctgtccttcccatgggtcctttggacccctgggttttagagtttgtctttcctaagtgccgcctgcccgaacgcggctgccccaggactgcggctgtcccaggatcacagccaacccagtgcggctgcctcccctgcaggccacccatcaagggcacaggcaacaggaactccaagacgcagcggcccgccctgctcggggctgaccctcagaatgggagaggccacgaactcgggtcctctccccttcctcaaggctcctttctcacctggggtgaagggctcccaatcccagtacctcagggaccttcctgtttcatttataccaacaaataatcatttgatgttctgggacagacaagacagacacgctggcccccagtgggcgagagagactagtctatcagcacagaaaattcccaatagggacaggggctaggaaggaaacaccaggaaaagtgagggtggaagacgggggtgaccctactgcagatggggtgctcagggagggtttctctgaggaggtgacattaactagactgacaaaagggacgggcagggcctgtgaaagtcttctaagagagggaacggcaatgcccagtgggctgtcctagggaaggaaataggacagcaaggtggtgggggggggatgtgagcctggcaggcgggacccagacaccatgtgatgggtgcaggggtgggacccacagaggctctgagaaagccctgggcctcagaacacggggaaacaggaggacccacttagaggccttcacaaccttctagggtacagacagtgcaaaatggcttaggccagaatgtggtttaggtttcagaagggtgctgggtcccccacgctcttcttgaggctaaagggctccagctccttaggccatttccacatggttctggggccccacagacagccttctgacggttttcttctgtggccaggcaggggttgtggggcgacccgcccctcacttgtccaagtggacagatgaagggagcctctaggagcaggatcgctggattgggaattagacttggagcgtaatccaaatgccccacgggccctgcctcttttctggagctcagcttcttcaagaaaactggggacaagagatggcaagactagctctcaggacccttgcccctccaccccatgatactttcagatggttctcaggggccacctttttcaggaagaatcgggctacaggaaagtaaagggaggaaacgtgttttgagtggcacttaagtcaggctctagactaggtgttggtttggtggggcttgcttttcctcctgccccagcccgcttcacaaaacctgagtcctggctaggctgggagtgagattcctgtttctagattttcatcattctgtgtagcacaaaacaaggtcgggggggaaaggagacagatattagcaagtatataaaagataattggctgggcatggtggctcacgcctgtaatcccaacactttgggaggcagaggcgggcaaatcacctgaggtcagaggcgggcgaatcacctgaggtcaggagtttgagtccagcctggcccgtatgg

SEQ ID NO: 7385 - DNA, 1089 bp, Artificial sequence
  DNA replication origin
tttttggcactgagatgttctcagccttgaatcccatggccaccgtgagctgagttgttggagttcgggtggtccaggagtggctctttgtacgatatcaatgagatctctggccactgttcacccacgggcccctcatcagttgttccagtagggatcgctccctaacgtttagcattaagtactttttaataaatctttcaatttgaagagggaaaaaatggtggggaatagtattgtcctgtgataatttttttcctcaggtccaccaggttccctgagtagaaggtcagggccccggccaccatggaatagagaatgacatggaggttccatacgtccatcacagggcactgatacacctggcccagggagagttctggggcaggaattgtggctttctgccctgacttctgactctccttgggcagccaaaacttaaaagtgtgaacagccggctccctttgagctgtctttggttccacaaggaagatggactttgtcggatggggaagagcaggagggacacccagaaggaaggaactgtgcttaaatgacggagcccttcctcctctgcacttttcctgtaccccaggattacgtaggtggccatgggataatcagatacttattttttgtagggtgggggaaatactgattccgagatgtgtgctgcctggcatcccatggccaccatgaccagggttgtagggggcccaggtgcccagggtctctggtgtcagcagcgtctcctggccagcaattgacccaggggtcccacatcagctggtttagtgggggccgctccctggagtcgagggtgaggaattgttttaccagtgtttccagtggaagtgaagaaataggtggggagtcatatagcctgaggtgggaagggaccacgggtagggctggatgttctttcagcctccctggcagagatcacagataagagtggtcagcttggccaagattctgtggtggctggctgtgatgtgggggagggaggcagtccccagagcaggaatgccttcccaggagcccctgtccttgcaggggaggagccggccatcctcccctcagagcctc

SEQ ID NO: 7386 - DNA, 995 bp, Artificial sequence
  DNA replication origin
ggaggtgagggccgcctctgcccggccgcccctactgggaagtgaggagcccctctgctcggccagccgccccgtccgggagggaggtgggggggtcagccccccgcccggccagccgccctgtccgggaggtgagggccgcctctgcccggccgcccctactgggaagtgaggagcccctctgctcggccagccgccccgtccgggagggaggtgggggggtcagccccccgcccggccagccgccccgtccgggagggaggtgggggggtcagccccccgcctggccagccgccccgtccgggaggtgaggggcgcctctgcccggccgcccctactgggaagtgaggagcccctctgctcggccagccgccccgtccgggagggaggtggggggtcagccccccacccggccagccgccccgtccgggaggtgaggggcgcctctgcccggctgcccttactgggaagtgaggagcccctctgcccggccgccaccccgtctgggaggtgtgcccagcagctcattgagaacgggccatgatgacaatggcggttttgtggaatagaaaggggggaaaggtggggaaaagattgagaggttggatggttgccgtgtctgtgtagaaagaggtagacatgggagacttctcattttgttctgtactaagaaaaattattctgccttgggatcctgttgatctgtgaccttacccccaaccctgtgctctctgaaacatgtgctgtgtccactcagggttaaatggattaagggcggtgcaagatgtgctttgttaaacagatgcttgaaggcagcatgctcgttaaaagtcatcaccactccctaatctcaagtaccccgggacacaaacactgcggaaggccgcagggtcctctgcctaggaaaaccagagacctttgttcacttgtttatctgctgaccttccctccactattgtccaatgaccctgccaaatccccctctgcgagaaaca

SEQ ID NO: 7387 - DNA, 1296 bp, Artificial sequence
  DNA replication origin
ctggccgggcggggggctgacccccccacctccctcccggacggggcggctggccgagcagaggggctcctcacttcccagtaggggcggccgggcagaggcgcccctcacctcccggacggggcggctggccaggcggggggctgacccccccacctccctcccggacggggcggctggccgggcggggggctgacccccccacctccctcccggacggggcggctggccgggcggggggctgacccccccacctccctcccggatggggcggctggccgggcggggggctgaccccccaacctccctcccggacggggcggctggccgggcagaggagctcctcacttcccagtaggggcggccgggcagaggcggccctcacctcccggacagggcggctggccgggcggggtctgacacccccacctccctcccagacggggcagctggcctggtgggggttgactcccacctccctcccggacggggtggctgccgggcggagaagctcctcacttcccagacggggtggctgccaggcggaggggctcctcacttctctgacgtggcggctgccgggtggaggggctcctcacttctcagagggggcggttgccaggcggagggtctcctcacttctcagacggggcgaccggtcagagatgctcctcacctcccagacgaggcgctcctcacatcccagacggggtggcagggcagaggcgctccccacatctcagacgatgggcggacgggcagagacgctcctcacttcctagatgggatggcggtcgggaagaggcgctcctcacttcctatatgggatggcggccgggcagagacgctcctcattttccagactgggtagccaggcagaggggctcctcacatcccagacgatgggcggccaggcagagatgctccttacttcccagacggggtggcggccgggcagaggctgcaatctcggcactttggggggccaaggcaggcggctgggaggtggaggttgtagcgagccgagatcacgccactgcactccagcctgggcaccattgagcgctgagtgaaccagactccgtctgcaatcccggcacctcgggaggccgaggctggcggatcactcgcggttaggagctggagaccagcccggccaacacagcgaaaccccgtctccaccaaaaaaatacgaaaaccagtcaggcgtggcagcgcgcgcctgcaatcgcaggcactctgcaggctgaggcaggagaatcaggcagggaggttgcagtgagccgagatggcagc

SEQ ID NO: 7388 - DNA, 884 bp, Artificial sequence
  DNA replication origin
gactgggtagccaggcagaggggctcctcacatcccagacgatgggcggccaggcagagatgctccttacttcccagacggggtggcggccgggcagaggctgcaatctcggcactttggggggccaaggcaggcggctgggaggtggaggttgtagcgagccgagatcacgccactgcactccagcctgggcaccattgagcgctgagtgaaccagactccgtctgcaatcccggcacctcgggaggccgaggctggcggatcactcgcggttaggagctggagaccagcccggccaacacagcgaaaccccgtctccaccaaaaaaatacgaaaaccagtcaggcgtggcagcgcgcgcctgcaatcgcaggcactctgcaggctgaggcaggagaatcaggcagggaggttgcagtgagccgagatggcagcagtacagtccagcttcggctcggcatcagagggagaccgtggaaagagagggagagggagaccgtggggagagggagagggagagggagagggagagcaggacagtcaaattttaaagctccaaaatgatctccttagacatcaaggtcatgctgatgtaaaacgtaggttcccacggtcttgggcagctctgcccttgtggctttgcagggtacagcctccctcctggctgttttcatagtctggcactgagtgtctacagcttttccaggtgcatggtgcaagtggtagatggatctactattctggggtctggaggtcagtggccatcttctcacagctccactaggcagtgccccagtagggactctgtgtgggggctccaatcccacattttccttctgcactgccctaacagaggttcttcatgaaggccctgcccctgcaac

SEQ ID NO: 7389 - DNA, 1750 bp, Artificial sequence
  DNA replication origin
gccatcttccagaaagcagcccagcctggagagcaggggctagcagccgttcttccccactctcttggcctttcagctgcctgtttgtcaggagtcaggtgcacttccctgccaggcgttcaccctgacctggggcactcagttcacactctcaacctcgttatctggaaaggaatctagccccggatttttatgaaagtcactttttcaggttgttgttggttacagacgcgatgttgtttctgatctagaaagtctaaggaagcagaaagagaaagagtttggagaggccccccaaggcgaagtcagtgaggggacacggtgaatttccttacagtcttccctggtcatggtttgctcacagttgaaacaactctgtaactgcttataaatgataaggggggggagtgtgcattgtgttttgatgtgtgtggtgtggatgtgctgtgtgtagtgtgtttttgatataagtgatgagtgtggtgtgtacgtgtgtggtatatgtgagtgtgctgtgtgtatattgtgtggtatggtgtgtatgtgtgtactgtgtggagggtgtggtgggtgaatgtgtatgatgtgcatgtgcatatgtgtagagtgtatgtgtgtggtgtggtgtatgtgtgtgatatgtttgtgtgtggtataggtgtggtgtgtgtacgtgtatttgcggtacggtgtgtatatgtgtggtgagtgtggtgtgtgtgaatgcatgttgtatggatgtggtatgtgtggtaggtgtgtagtgtgagcagtatgggtgttgtatgtgtgtggtatatgtgtacgttgtgatgtgtgatgtgggtgtgatgtgtttggtaggtgtgtgatgtgtgtagtgtgggtgtgggtgtggtgtggaggtgtggtgtgtattgtgtatgtgcatgtgtgtggtgtgtgcatgcaggtgtgtgtgtgacgtgtgtggtgtgggtgtgtgtggatgtggagtggctggggtgtgtggtgtgtgggtgtgtggtatggtgtgtgatataggtgtatgtgtgtggtgtttgctgtgtttgtgtgtggtatgttgtgggtgtgttgtgtagcgtgtggtctgaatgtggtgtgtggtgtggtgtatatgtatgtgtgtggtatgtggtatgtgtgtgtgtggtgtgtgtgtggatgtggtatgggtggtgtgtgtggtgtgtggtatgtgtgtggtgtgtggttgtgatgtgagtgtgggtgttggtgtgagtgtggtgtgtattgtatgtgtatgcatatggtgtgtggtttggcatctgtgtgtggtgtgcagtttatgtgtgtggtgtttgtatatatgtatgtatgtggtatgggtgtgtgctgtgggtgtgtgatgtgtgatgtgtttgggtgtgtatgtgtgtgttgtgtgtgtggcatatgtgcatagtgtgtggtgtgggtgagggtatggatagtatgtgcgttttatgtgtatgtgtgtggtgtgtgtggtgggtgtgtggtgtgtgtgggtgtgtcgtgtatgtgtgtagtgtatgtagtgtgtggtgaatgtatatgtgatgtatgtatgcgctgtatgtgtatgtggtgtgtgtgtatgtgtggcataggtgcatggcgtgtaatgtatgtgtgtgtttggtgtgtgtgtgtgtggtgtgtgtggtatgtctgtatgtctgtgtggtgtgtgtgtatgtgtgtttggtgcatgtgtgatgtgtgtgtggtatgtgtggtgtgtgta

SEQ ID NO: 7390 - DNA, 1141 bp, Artificial sequence
  DNA replication origin
atttatgagggaatttggggaagatcaaacataggcctcagactttaagaggccctttatgctttggtaaggggtattttcaggggtacggaggctttacaaccaaatgtgaactagagggagaataagaggaagactttgtggacagagagtactttacacaaaggtggagagtgcaaggaggggtcacaggacattagtgctaggtagtgtttacggtttgtttttagagacgtttctactctgttgcccaggctagaatgcagtggccattaacagctatgatgatggcctgctgcacccttgaactcctgggctcaagtgatcctcctgcttcgccctcccaaggtgctgggattacagacatgagccaccatgcctgcacaagaacagcaggtttaaaaaactaggcaagctcacgcctgtaatcccagcacttttgggagggcgaggtgggcggatcacaaggtcaggagatcgagaccatcctggctgacacggtgaaaccccgtctctactaaaaatacaaaaaaaaaaaaaataggcaagcagaggcagcaggggcagtctgtgtggggtacaggggcagtctctgtgtgtgcgcaagggtagtctctgtgtgtgtgtgtgcaagggcagtctctgtgtatgtgtgtgagtgtgtgtgtgtgcaagagcagtctgtgtgggtgcaggggccgtcggtgtgtgtgtgtgcaggggctgtctctgtgtgtgtatgtgtgtgtatgtgtgtgcaggggcagtctgtgtgtgtgcaggggctagctctgtgtgtgtgtgtgcaggggctagctctgtgtgtgtgcaggggtagtctgtgtgtgtgtgcaggggccgtctctgtgtgtgtgtgtgtgtgtgtgtgtgtgtgtgtgtgtgcaggggcagtctgtgtgtaggggccatctgtgtatgtgtgtgtgcaggggcagtgtgtgtgtgtgtgcaggggcagtctctgtgtgtgtgtgtatgtgcaggggcaatctctgtgtgtgtgtgtgtgtgtgtgtgcaggggcagtctctgtgtgtgtgtggcctctgctcagctcctgggaaggggcttctgatcctctgtcaacatcaaaggagctgggccttgaaaacctatctca

SEQ ID NO: 7391 - DNA, 2090 bp, Artificial sequence
  DNA replication origin
tgcgaaagtgacttgagtggaagagctgggggccaacaccgacatcatgacatcatgtcccatgttggctatgcaggagctatgcacagacagaggcacagccagtgccttttaggggtcaggggagggtgggagacccacacgggaagaccaaggtgccacttgccacttctgggtccttaggccctggccagctgtctgcccatctctgatccctgtccctgtcccatgtgggcctctccaatctctctgggaacacagggccaggctcagcatggcccgcgatcccctgggactgggccctcctacttcccgcctgtccccagacccctcacacagccgcacacacaggctctggccaagggcatggatactgttgtttgcaatctctagctgtctgtcatcccgcttgggtctcagcacctccaggtcgatgagggagatggcttcttcatcagtgatcccttcctccaggtagaactcaaccaggtgtagcacgtctggagggcatagagaaagggctgagggggctggaggccttgcaaaggacttgccgccaggcaggtggggtgaccacagagttgcttctcaacccactggcagcttcaccaaaagcaagaagaggcagcaggggcagtctctgtatgtgtgtgcaggagcagtctctgtgtgtgtgtgtgtgtgtgtgtgtgtgtgtgtgcaggagcaatgtgtgtgtgtgcaggggcagtttctgtgtgtgtgtgtgtgcaggggcagtctgtgtgtgtgtgtaggggcagtctctgtgtgtgtgcagaggcagtctccgtgtgtgtgcaggggcagtctccatgtgtgtgtgcaggagcggtctctgtgtgtctgtgtgcaggggcagtctctgtgtgtgtgtgcaggggcagtctgtgtgtgtgtgtgtgtgtgtgcaggagcaatctgtgtgtgtgcaggggcagtttctgtgtgtgtgtgtgtgcaggggcagtctgtgtgtgtgtgtgtaggggcagtctctgtgtgtgtgcaggggcagtctccgtgtgtgtgcaggagcggtctctgtgtgtctgtgtgcaggagcggtctgtgtgtgtgcaggggcagcctctgtgtgtgtgtgtgtgcaggggcagtctctgtgtgtgtgtgcaggggcagtctctgtgtgtgtgcaggagcggtctctgtgtgtctgtgtgcaggggcagtctgtgtgtgtgtgtgcaggggcagtctctctgtgtgtgtgtgtgtgtgtgtgtgtgtgtgtgcaggagcaatctgtgtgtgtgcaggggcagtttctgtgtgtgtgtgtaggggcagtctccgtgtgtgtgtgtgtgtgcaggggcagtctctgtgtgtgtgcaggggcagtctctctgtgtgtgtgtgtgtgcaggagcaatctgtgtgtgtgcaggggcagtctctgtgtgtgcacgcaggggcagtctccatgtgtgtgtgcaggggcagtctccatgtgtgtgtgcaggggcggtctctgtgtgtgtgggcaggggcagtctgtgtgtgtgtgcaggggcagtctctgtatgtgtgtgcaggagcagtctctgtgtgtgtgtgcaggggcagtctctgtgtgtgtgtgcaggggcagtctctgtgtgtgtgcaggggcagtctctgtgtgtgtgtgtgtgtgtgtgcaggagcaatctgtgtgtgtgtaggggcagtctgtgtgtgcacgcaggggcagtctgtgtgtgtgtgcagaggcagtctccgtgtgtgtgcaggggcggtttctgtgtgtgtgtgtgcaggggcggtctctgtgtgtgtgtgcaggggcagtctctgtgtgtgcaggggcagtctgtgtgtgtgtgtgcaggagcagtctgtgtgtgtgttcagggacagtctgtgtgtgtgtgtgcaggggcagtttctgtatgtgtgtgtgtgcaggggcagtctgtgtgtgcgtgtgtgtctgtgtgtgtgtgtggcctctgctcagctcctgggaaggggcttctgatcctctgtcaacatcaaaggagctgggccttgataacctatctcagcctcctggtctgaatgcaaag

SEQ ID NO: 7392 - DNA, 734 bp, Artificial sequence
  DNA replication origin
cctggcccatggcttgttgctgtttgctaatgtgatgtgtgcttcagtggcggtaatccagagctggaggagcccagaggagtcctctaacccactctgggaggtcagggaaagcttcctagaagaggtgaccctgaaggatgggtgtgcctcagccgggggaagtgttctatttgccaagacacctagggagatagggagggggtccaggtgccgagaagtaaaagggcagagttaactgggaagtcagaggtgtccaaaccaaggtgcattttgagccttgaaggatgagtgagagcagcctgcatgaccgggaggagagaggcagcccaggcagaggaaacggcatgggctaaggcccagaggccagcgcaccagcagcttgtctcggaagctgcatcttccttctgggaaggagggaagtgctggggcagtgctaggggagcagtgggagggcctccaaggcggtcttcagttaggtcaacttttatcttgaacagggagccatggacggtttcaagcagggaggtgaggggtgtgagatacagcgaggagaatgcatgcggtggggaagaggcagtggggaggaggctggggctggggagttggagaggagaggccagaatatggagagaaaagcctatggggaggcctcgagtgggtgtggtgaggaggaaagggcccagaatgcccccagttcttgcttggatgttgggtaggtatgggcagtgggg

SEQ ID NO: 7393 - DNA, 2382 bp, Artificial sequence
  DNA replication origin
ttgggatcccagggcctgtgtcagctgtgctaacttctgggtcctgggcacgtagccccttcctggaattcctcaccacagcaaagggttttccctctgctggcacctccctgagcagccatgtcctccgtttcaaaggggagagtttcatctttataaggaggctccaaaaggggacccatgccaggtcactcagagctgaggcaggtctgggacaaaactgcaccccaacatcaggactgtcatcagccaccaggaatacctcagggaccagacccacggcctgacttgtcattgctgggtcccctgcatcttgcctaacttcctgcatgtagcagctgccatgacagttgccatggaatgctggggaacattctcagcctaccccaagccggtccctgtggttacctggtgacagatcacagaaagtcccaccctggtagaactcctgggcgtgggtcagagcctggacttgcgtcacagcaggaccaggcggctaagcagggagaagagccagaggggcgtcaggtgtctgatgcggtgtgctggcagttgaggggtgaaggtagtttctagtcttggtgatggggagccctgagggttgggggacaggaaagaaacagcttgccaggagccctcccttccctgccgctcacagccttggtgattgtcctgctgtaaagatgagaagacgtggctgtggtacacggctggaggagggcggaggaagctgtgagcccagagccatctgacctcagcccatgttctgctgagcgtcaaggggcgaggtggtgggggcatggggcatgaggcagggcagcgcttcagggtagtgggggaggaggagtccagaggcacaatctgtgggaaagtggcaggcctagggcaggtggttgagagatcctgagatcctagaatcatagtagacagtgcctccaaggacagtggcttcgtgccttctccctgcctctcactgcctgtggagcccccctgtttggaacgaggcctcccattcggagtcttacggggggtggggggcgtgaggcacctgaggctctgctttcagccccaccccgtgtccttctccagttagttcccaagcacaagaagaaaatccagcccaggaagatggcccccgcgacggctcccaggagagcgggtgaggccaaggggaagggccccaagaaaccaagtgaggccaaggaggaccctcccaacgtgggcaaggtgaaaaaggcagccaagaggccagcaaaggtgcagaagcctcctcccaagccaggcgcagccacagagaaggctcgcaagcaaggcggcgcggccaaggacaccagggcacagtcgggagaggctaggaaggtgccccccaagccagacaaggccatgcgggcaccttccagtgctggtgggctcagcaggaaggcaaaggccaaaggcagcaggagcagccaaggtagttgtgtgacttgtagggggtggtgtggggatgggggtcttgacagccactggagcgggggcggggagccagctctggagaggggtttccttatctagtgcatgtgtcctgagtgctgggcttgacctggagagagagaactcatggtagctggttgggggaaggaggcagacatttcaagggttatgaagggggaagcagagaccaggagactgactcattcttgaggcagtggaggaaggtgtctcaagcaggggaagggcctgtgtaaaggcctggaggcataaagaaggtggagtttttaggccgggcatggtggctcatgcctgtaagcctaacactttgggaggccaaggcgggcggatcccttgaggtcaggagtttgagaccaacctggtcaacatggtgaacccccgtctctgctaaaaatacaaaaattagctgggcatggtggtgtacacctataatcccaggtacttgggtggctgaggcaggaaaatcacttgaacccaggaggcagatgttacagtgagccgagatcgcaccactgtactccagcgtgggtgacagagtgacactcagtctcaaaacaaaacacaaaaagaaggtggagtatttgaggaactgcatgtaattcagtctacctacagttttggcaaggagaagctgtgaagggcagctggaatcagggctttatctggaggacaatgcagagctgtggaaggattctgacaggaagcagctagggctagagttattattttttttcctctctctcttttagagacaggctcttgctctgtcacacaggtgagtgctgagcccaggaattagagaccaatctgggcaagatactaggatcccatctctgcaaaaaataaaaatattagctggcatggtgttgcatacctgttgccccagctact

SEQ ID NO: 7394 - DNA, 835 bp, Artificial sequence
  DNA replication origin
gcccgtgcacttttcccctgaaagaagtagggcccctccccacccacatcattgtcctaacagtcctggggaaagtaggcggggcagacagagcacagtgaggagcccctggtctggggccggctgagtgcggggacgttcagtgaccgggtgagactctttgggcctcgggggcctgctaaggtcacttatgtggcaggagggatgagggctcatccagaaaacgaccagatccgtcctttctccagcagccatctaacaccctcgctcttctctgcccaggattcgccaaccaacaagctcctctacgccaaggagattcctgagtaccggaagatcgtgcagcgctactacaagcagatccaggacatgacgccgctcagcgagcaagagatgaatgcccatctggccgaggagtcgagggtgcggtggctcggcggcgggggatgggggcctgaagagctgagggatcgggggtcgggggctgggcctcaatgcctccactggagtaagggcagggagcgcagagggcatttcagaagtggctgtggcctcttgctggcctgcaaattcgtcatgcattttcccagagtttgaggagcgggggcaggagagcaccctctggatggagaggagattggacttcagggtccgggaagccgtcttcgtccatgggacttgaggggcctcatcgctgaactgttctgtgggggccgtggggagttggggattgtgtgcaagcagctggctttgctgggactaggctcagctttgaccgctgggctaacctcctccccatcctgcctccttatagaaataccagaatgagttcaac

SEQ ID NO: 7395 - DNA, 1031 bp, Artificial sequence
  DNA replication origin
acccagaggatcccgggctcgcaggcctggcagccaggaggctgtgcctggggcgtctgagggtgtggagggggcacttgaggcagggacatggcccaaggctgagacgggcatgctggccccccttctggcctggctgctgcccagacctcctggaactgcatcccgccctcccggggcctctctccagctgccgcaggaaatcagcttgaggaggcctggtgtgggccctgccccagcagtactgggtcagaggaggctggccccgcccagcccccaccaaggaggcctcagcccaggccagccctgcctctcggagcctcagcttccccactggggcatgggatggaagcccctgtccacacgcagcctgggctcccttcccacgtgcacccgcactacctcggcccagtgtgttgtccttcttgtctatgagactcatggccagggaggcaccttcagggatctgatgggaggggagaggccgaggtcagaggccggaggttggggtgggggcatgagggtggggaaatgggggcggggggcagggctgcaccttgtaatgggccagcgtgttaagcttcttgcggccgtcttccaccactgaggtgtcgtccaggtcccgaaggatgtagctctgtgtgctggaggcgaaccactctgggggacaagggacaggccatcagggtccgggcagggagctgggcctgaggggtaggtaccggcccagccacatagggagaggcctctcgctctctccatgtaaactgaggcaagccatacctctctctgagcctccattttcccatctgtaaaatggggagggcaggaaagagctgggggagagtgtgagggtacaaagagaaggtgccagggtggagggcacagaggaggagctctggaaatggccttgtctgcaaggctgttcatgttacaattgctgatgaaacccttggcctaaccaagactcctataaaacccactccaggccccgcgcggtggctcacacctgtaatcccagcactttggga

SEQ ID NO: 7396 - DNA, 1398 bp, Artificial sequence
  DNA replication origin
gggatgcctgagactccccatgaacagaggagcccctggagagtggacccaacacagacagtcacagcaactgcacagctgccacgcgaggggagctgaccacaccccagatgccacgctcaaggttgggcgagccctggctcatcaggtccttacaagctctgcagagggactgtgtcctgtttcctatggggacgatcaggcccaggaaggcaggggaaactatgcacggagaccccaaggcctggagcctggcatggcatggcagggctgggatatgaggctgtgtgtgtgctggagaacaatggggtgggacatctgcggctttggggcaaccactggaatgagtcgcacaaggctgagccccacccactgcactgaggccccgaggccatgtggggcgggtgggggtgcccacctgtcatgggctcagggctgtccaggaatcgggctggccgcccctttagttggaggctgagcgggaacacctggctcttccgggtcgtgtgcagctgcaaaagggcagaaaagagcatagggggcatgggcaatgcctggggctctgctggggatgggtgtcatggaggcagatgaagttggggctgctggggatgggggaaccagaaggtagagagaggcagggtggggtgaggggtacagcatctggacttaacgcaggcccgccctccgcccatgctggagtcaccccactcaccaccacctggtcacagcgtacaacagactcattcacccacacagcctcgaagatctcctccagcccaaaactacactccagggctgcaccctgtgggaaacagggagtgggaggcgggtttgaggagaaccaagccagcatgcattgccctctaactccagcaggacaccacgggctcctgctgggaaaggtgggcttggtcgaactgtcaggcctttgcatgggctgtcccgtcccccaaaatccccttcctggccatcacgtccaatgtttgagggaggcaagcagtgcaggaatgccaagaactttggcctcatgcgctcagcaccactaaaagcctctccagcatccccagtgatctaacccaggggccttgtattcagctcctaaggctccactcccagcggggttcccctgctcttcgagccttcccacctcccatcctgccctaccaggccctgctcagacgtgccccaacgcccaacacggccagactctcctgccccggcctttgcctgagccctcccctcgcctgaacacctgtcttcctttctaccacccagcaaagctcaacacagccttcaggatccagcttaaaagccccctgttctgaagccttcccagatgctgccctcaaatcaaaggggtgtgcctcacttgatcctcattcattccctcagcag

SEQ ID NO: 7397 - DNA, 1107 bp, Artificial sequence
  DNA replication origin
ctgtatgttggtccagggcatccccagcccatcacacctctgggctcagggcttggcccccagggacatgctggaaacagccccagcctagaagcccatccggccgtaactgtgtttatttgcccaagcacagaaggacccactatttattgctttcttttgaaaactagctgagcctgtgcaaaaaccaggcaggcacatcatcagtggcttaagcttgcaaaaagcacagacaagaaatttaaaaagaaaaatctttaaagctttgccctaaagatggttccaatgctgccttccggtgacctccctgagtcctgctctgagcctctgatgtccaaatgcagctgaggcatgggctcaagtctgctacctgggtcagccctgggggcgtgacattgtagttagccattttcccctctgagcctcagtttccccatctgtgagataggacccctagggctgccaggattctgggagtcagtgcactggcctggtacagtgtcagttcccagtaaatgtggcctgttattatgtttactgttgtgactatttattgtttatgcaccagttttaccaaaatgggcccatgacatcctgtgacttttcttgtaatcagtgtgggcttatggcgtcactgcgggatgggggctgctctcctggatgataagccatgatggacgcactcagtcccatccgacacatgtgtgtgtccccttttcactcctctgcaccacccttgtgcctgcgtctttgcggagttgcacagttattgtctcagggtcacttcctggaggcctgttttctatttttgtgcaaattgcaccaggaacctttgaacataccaagacccaggagaagggagggaaggtaggagcaagttcagggaacagcccggacatgggatcacctctcacagctgccctgtgagccgcagctgatttgctgctggagggcatgggtgatgctgggctgttgtggacatgggactgtgcattcagacacacccagcctgtttgtccccctgtaatgtgggcagatgaggggataggtgcttggggagggaaagaaaggctgcggtttagggaggcctccacctggagtcttgca

SEQ ID NO: 7398 - DNA, 1915 bp, Artificial sequence
  DNA replication origin
acgcgtacctggcgctcaacagcgaggcgcgcgcgggcgacaaggagagccaggcgcggagcctgctggcgcgcatctgcctgccccacggcgccggcggcgacgccaagaagctcaccgagtcctacatccagttgggcttgcagtgcgcgggcggcgcgggccgcggcgacctctacagccgcctggtgtcggtcttcccagcccgggagcggctctttgctgtcttcgagcggccccaggggtcccccgcggcccgcgctgctccggccgcactctgcgccttccgcttcgccgacgtgcgagccgccatccgagctgcgcgcaccgcctgcttcgtggaaccggcgcccgacgtggtggcggtgctcgacagcgtggtgcagggcacgggaccggcctgtgagcgcaagctcaacatccaggtacacccgggcggtggcggcggcggcggcggcggcggcggcgggggcgggggcgggggcgggcgggaaccgagcgggtcgtgagctgagtgggtcacaggtgggagcgcgcagagatccagatgtacgtggaacccaggtgtgcacgcgagaatacaggtgtcccccgaggggtactactggcgcctgtatggcccaggtgggcatgtgcagggactcaagtgagtgccggctcatgggcgcgcatacctaggcgtactgggaggggtccaagttgccacaggtacccaggtgcgcataaagcccaggtatgcacgtgagggtcacaggtgcatgctgagggcgcagtaagtgactgcatgcctgaccaaagttgtgttctggggccactgcgtgagcctgtcagagttaccattgcacgttggtgatgggtgcatgggtgtggcaggtgtgcaaggaggcacacaggtgtgcaccagggccctgcagatgtctgcatggacttgtgtgccagcaagctggggcctgaagacgcacagggcagacaggtgtactgcacagacactggtacaacgggacagggctaggtgtgcagtgggatgtgcgtggcaggggacgcaggtatttgggcatgagtcggtactctgaggaggctgcatggttggcaaacaggtgtgtgcctgaggccaacttttattcacctattctgcaaatatttcctgagcacctagtatgtaccaggtgtgggagtctggggtaaacaatagcacttgtggagtgccagctaggggcatcacatgtcacaattcccagttctcagaacaaccctctcaggtagcctctattctcatcacattttacagatgaagaaacaggcacagagaggttaagcaacttgctgaggatcacacagttgggcactagcagaggtggatttgaatccagcctgtctggcctcagcatctgtgtttttaatgcccagcctttgctgccttctggacttggatctcagagtgcgtgtgttttgggggcgtcccaggcagctggggtgggcagatgccagggccaggagaatggagggatgtgaacaggggtgttttgggggcaggagagggccgtggggctcagtggggaatgaggaggagtacaggcaggcatggggcccaggtgtctgaggctgggttgggcagtagcaaggggggccaggttgacggaatcagcatgtgtgttgacatgacaagggtgcgggaggggacttggtgtggttccctgaaaggaagttcatggcaagggattgctcctcacactggctttgggagctgggtctgttgatccccatagttcaccctgaggaatgaggccccagaatgacactggggcctttcccacaccctccacccatctgagtctggcgagcccacttcagctccactgcctgccattcccttaggaagctgcatctccatcagcaaaatgcagaactcagcctt

SEQ ID NO: 7399 - DNA, 2655 bp, Artificial sequence
  DNA replication origin
gggaaggtgtggtttgttccttcctttattcattcattcagccagtaattgtcagcacctcctctgcccagccaggggtataggggctgccaccatgagccatcctggcctgatggtgctcccagctaatgggtagaagggagaaatcataagatgtggagccagatctgggtttcaatccttaccttgctaatgcccctcagtttccccatctgtgaaatgggtttgctgaccacagcctagtcagctggctgcaaggatggtgtaagatctggtagggcagtgctgggcacaggattcactctcaccgtctggtggctctgctagccacattggggctcaggacaggaggtggagccctggtctttagttgcaatgccccccaccccaactcctggctctaacatgggcttcaggggtcatggttcactgccacaaggcggggagaaactggtgtttgctaagagccttgttgtgcttgacacctgttatgttatattctccatctcacaccctcccaggggcaggtgttctgctacgattgtcctcattttacagttgaggaaactgaggctcagagagggtgagtgccttgcacaagaccacacagcacttctcacctccagttgatgtgaggatactcagacccgaatacccttcacctagagagctcctaaaccccactgctcagcttggcagggagcttgtgtcccaagtgcccaggatcatcaccacaggctggtctaagacaacactgagcattatcctcacggctcagtggggggagctgcaggatgcagcaagatgaaccagatgagcgggagacaggaaggaagagaggaggggctggagagggagtgggggtgagggatagggagggagacagagagagagacagagatagagacacagagagacagatgaagagtggaaagggaagggggcaagacactgagagaaggagagacaaagagagtgaacgggaggagcaagacagataggaacagagatgggtgggggcaggagagagagagataagacagagagaccagcggatggactggggtgggggcactgaggatgtgagtgaggaggaggggcatggaggcaggccccatgcacccctgctgggctctgcagttggcccccacgggtggcacgatgtgcgccttctccatccagagaggaagacagggacacagtcccacgggcagtcccctgagtggctcttggtgggtggatgggcctgggagggggcctccaatttcctgcagctcaacactcccggccatcaaagcagtggccagaccagggctgaggggtctggaacaaggcgggcaggatggcaggaaggcgagggtgttgagggaagtggggggcggctgcaggcccagcctttcctgccggccccatggtgcacagacacccctgcccttccttcctggttgggtgggaaagaggaaaatgaggtcccgctactctcagagtgaggcccaccgggcaccctgtggaagctgggggtctgatgggaggccccgttctgagaggtcggagctgaagggcttttgctttcaaacactgtagctctgctcctcatgagctgtgcatcttgggccagtcccttcccctcagccttggtttccatatctggaagatgggttaccaatagcgctcgcctcgggggaatctgtgaggaaaaagagagcccgtacatggcaagtgcttggcacagtgtctggcacgggctagccctgtgtgagcacccccgcaaaacagccacggcgcatggtcctcacagggctgtgaccttggaaccaggctgcctgcccctaacgctgcttttgagatcaagaaccctgcccagtgccggcttttgtgggactaatcttccactaagcctgggaggatgtcagggaaagtgcctggcgggggtgccaggggtgggggtgcggctgggtctccacaggaggcaactgtgggctccaggaccaaggccttgctctggctatcggttgtgggccactggctggaactatttcctctctccatgttttcctcatttatatatctgaccctgagcactggtccctctggccctgccacttgtaaatcccttttatgggtctggggtttgggggacagattatggggtctggggggcccgactggccggcaccgggggagcgaaggcctggacagtgcctgagaaaggtggtggagggaggctgagtgtggaggggagacacagggttcgggaaggcagagggagaaggaaaggggagctcagagggaccgagagagggacggagggtccgagggggaggcagagggagccacggagagagggagcgagcgtcagggacggaaaaacggagcaggagagagaaggagactagaaagggccgggggcggggctgccagggactggagagcgaagcggagtcggagggagaaggagaagcagaggcagaacccggagaagcgccacacgcgcggagtttggggtggggacagagacggagagacgcagagaccgagagacgcagagagagggagagacggggtgggggagagggcggaaaagagaaaacaggcgcgagcgaggcaggccaagcggccaagtgggaggaaagagcgaggagagcgagcgacggc

SEQ ID NO: 7400 - DNA, 931 bp, Artificial sequence
  DNA replication origin
tgctggggccgcagtcaccgcaacttctgggtggagcagcgagggcccggggggctcgggaagctgggggtgtacccgcagccggggaagcggaggcacaggacctgggcccagggctcggagcccttgctccctccaagcgaggcgggacgagcacgggctgcgggacctccgccccgtgcccccgcccccctaggccggctgggagctggccaggggctcagaggtcgcacctctggccgcgggaggacgaggcggagccggaacggaagcgcggacaatgggccctccggggccgcttccggcctctctctgcggggcgggagcacgggagagcctggggcctggcctgggcggggctcgggcgccctccctgggttgccttcgcagcaccccagcctgggcccctcccacccctgccggtcagaaagcagggacccgccccgccccagctctgtccccaggctaagaacctggcacaggctggcgagtatggaactgggttgtttttaaaaacttttattcattgagttataatttacatcaggagaagtggcctcagatctcaaatgtgaagtctggtaaactttgcacgtttataccctgtaaatgctctgaacaagacatggaacattcccagcaaccagaaaattccctggtggcccttcccagtcagtccctccccccagccccagccctagccctggcaactacccatctgtgtcccgtcctgtggcctggccttttccaaacagcatgtacatgggatcctgcagcgtggagcctttccagcctggcttggagatgcatccttgtgtcggagtatcaagaggctgttccttttcgttccattgtatggaggcctccatgtgtttacctcttcaccagcccagggacacttggcttgtttccagattgcagaaattatcaa

SEQ ID NO: 7401 - DNA, 1458 bp, Artificial sequence
  DNA replication origin
ggtcctgtgcctccgcttccccggctgcgggtacacccccagcttcccgagccccccgggccctcgctgctccacccagaagttgcggtgactgcggccccagcaccccgttccctggccgggcatcacttgcgcagcatgctgcccccagaggacagggctacagttagtcgcccacacctcattcacccccttgggcccttgagcgtcttagaagccgcagatgccaaggaggggacgctgcctcgcggatggtcacttgggagcaaagctggggactaaaggaaccagggacagagattcctgctctcgccaaattggccgctctgggccaggcactgaggacacaccgcgaagccggatagccaggtcctgtcctcagggccctgtccggaagaggactgggcagcctcgagtccgcggcaatgaatgaatgttcaattgcacagatggggaggcgaaggagggagggagggagggagggcagtcgcttgggcggtcattggaggctctgggaggctatgcgccggcaagaagcagcggggtggaggcagccctgcgggagtcggcgagggccgcgtggatgtgctcggtggttttgaggccagtggctggaggggcgtgagagtgggagaccagacttgaggggagtggctggagttgagactcaaatccaagaaggaaacggtggggcttggaccacttgcctactgagaaaaatggaagtcgggaaggctttagatctagtcgcgcttggtcacttccgtctccgggcctcagcttcccaggttgtagaaagcatcagggttggaggctctgaaattctggctcctctcaagccaagattagtatgacttcattttggttgtgcaagaaatgggcctgcagcggttcgcagaggcagagggacctaagcttgaagggcaatcaaaccggcgtaggcaggaacgtcgggagcccagaccccaggcagggagtttaaggtcttggacacagagggtgcgctcctcgaagcagccacaaagcggtgacagagaccaggcttacgttttgttttgaaataatttcaaagtaacagaaaagccgtgagaatagttccgagaactgcctcccttattaatgcagattcaccaagctttaacattctgctccccagcccttgcatattcaagcccccattgcaagcatcggagagtaagttgcaggcgcgatggcccttgaaccctaagtcctccaatgtgtattgcccaagaacaaggacattctattgcacaaccccagtggttttcaagatcgagtgatttaaccataatacaataatttaatctgcacaaccttactcaaatatcaccaaatgtcgcaacgaggtcttttatagcacatccccttcccatccccatccaggagccacgccaggatcacatttgtaaatttaattattattatttaagacgagtc

SEQ ID NO: 7402 - DNA, 1211 bp, Artificial sequence
  DNA replication origin
ggccacgccttccagggcccatccccgcccctgcggcgtgcgcgcgcccgtccgcccgctcccttgcgcgtgcgccgccggccgggggcggaggttgtgggcggtggcggctgtggcgggggcgcgcgcgcgctcgctctctcgcgccggttcgccctcccgcgccggggctgaggcggcggcggcggtggcggtgactgaggcggcggcggctgaggcggcgcggggggagggtcgggaggggggggtggttgtgggggatggaccgggtgcggcggccgcagtggaaggagcaggcgcttgagctcgagcgacggcgctggcggagacgccggctgctcctcccctccccgccggtgagtgagcgcccccgccccggacgctggcggcggtcgcggccccctcacggccctccgcggtgggtggggacagtcgtgagggagcgtggcctggcggcgcagcggacgcgggcctggcctcccgctcgcggcctgtcggggctgggacctgccgtcgcccccgttcgaggttgaagccccgggcctaggactcgacccccagcatcccacggggcctctttcctttcccggctcattccgctgtcattttgacctggggttcccctccagcccctcgcctcgttcccttcccagcatcccagggccgaggtgagggaggggcgtgtgagaagtcgggccgaggcccgagggactgtttaggagccggttcccgtcggaatctggggttttaggagccctcgatcgccatggcgtcccagaagttagccaccaggactcagccatttccacctgaaaccagttttgcacctattgttttgattttgaactgtctttcgaggggaggagggagcccggcgtactggggagaatatgtagtgggaggtgggatgtgaggaggagctggctgggcttggtctcggcctcaggatgccccctgttaacccctgtaggataggggaaagaggtgcagcgagttgcaccttccctaaagggccagagattcgtttatagcttgcgaatctctgctttttcagcctcggtaaaggggtatcatttgtggttggtttggttcgtcccttaacaacattcttggtgaggaatccccaggtgaatctgccacggagtgaagcagcccacttgagctgttggctacccccggcccccgcaacgcccgttggcttttgtgacacg

SEQ ID NO: 7403 - DNA, 1258 bp, Artificial sequence
  DNA replication origin
aggccaggcccgcgtccgctgcgccgccaggccacgctccctcacgactgtccccacccaccgcggagggccgtgagggggccgcgaccgccgccagcgtccggggcgggggcgctcactcaccggcggggaggggaggagcagccggcgtctccgccagcgccgtcgctcgagctcaagcgcctgctccttccactgcggccgccgcacccggtccatcccccacaaccacccccccctcccgaccctccccccgcgccgcctcagccgccgccgcctcagtcaccgccaccgccgccgccgcctcagccccggcgcgggagggcgaaccggcgcgagagagcgagcgcgcgcgcgcccccgccacagccgccaccgcccacaacctccgcccccggccggcggcgcacgcgcaagggagcgggcggacgggcgcgcgcacgccgcaggggcggggatgggccctggaaggcgtggcccctcccctagcccgccttcccacgcggtctctgggctggttgagctgcgccgctgcaggtagtgctgagttgctccaggtaagctcctcctctcaaaaagctctaggaaccgagccaccctcgccctaggagcaacgcccctgagtaatatggggtttcgtcggatttctgcccgccgctctggatcacacgtttgttctccctatttgagtcgcaaggccttccttcattccacctagcaggctgcttggaaaagggcagagactcattactttgcaccaggtattaccactgaagggattgtaagcagccaccagcccatccctttataattcccattttcctaatttattttatttttattacttatgtaatgaggcttcttccgtgttcaaggagctgggagtaccatatggggtcaacggagtccctggtctcatgaagtttgagatctggtggagaaggaaaacattcatgggagaatcagacaaaattaagttttcaattagtaaaaatcttctgagaggtatatggtactaagagaatctttatgggggaattgatttagttgaggatgaagagggtagaatctgaggaattgagttgggaggagttagttgctccaaggggtgaggtcttggcatggccagaatggggagcgctaaagaatattgaatgtggagtagactgcgagtgtgggaagaggtaggcgagaacaggtgaggattggggacctatttatttatttatttattgagacagagtctcactctgtcacc

SEQ ID NO: 7404 - DNA, 817 bp, Artificial sequence
  DNA replication origin
gagagcctccgatgtgcccgcgccgtgcctcccgtcgggtccccggcctgcgctcggggaggacccgggggtgcgagcacagcgcccgcctgtgcaccggccctgttctccaggaagctctcagagaaccgaaggtgagggcgggccgagagggctccctttccagtgctcccggacaccgtctgcggaaggagaggggttggggcggttacctgccaggagtgggctccacaggatgggtccgggatccggggactcgggatccgcagtcggcaggtcaggagtctgcagcgctgaggaccccgggcgcctgccgagccctcttcagatgggccgccgcttatatctgcgccaggcggcggctcgagtgaggtcagcggggaggggtcgcggccgccgggaaggggcgctgacggcagccggccccgcgggaccccgcccgcctgctcctccggaaatctggggcggggacggtggggaccggagccggggcgcggaggcactggccgcaggatggggcgccggcgcggggtcgtttctgcaccacctctggagatctgttgacgagaacacgcgtgtagggggcaaagggagggacagagagattgagagaagcgcacgattaaacacaggcgcacgagagagctagagggcgagacaaagaccgagatccacacggagacgacggagaaacacagggcagacacacacgaaagggacacggccgcagaaccaatgtagaacgcagacgggcgagagtagagcaagagagagagagagagaaagagagagagagagagaatggggggcaagtggg

SEQ ID NO: 7405 - DNA, 2151 bp, Artificial sequence
  DNA replication origin
ctctcggcccgccctcaccttcggttctctgagagcttcctggagaacagggccggtgcacaggcgggcgctgtgctcgcacccccgggtcctccccgagcgcaggccggggacccgacgggaggcacggcgcgggcacatcggaggctctcgctgctgggcactcaggtcgccagagtccgcagcgcggggtgggagctccgcggcaccccctgcctgggtgccgccggacagagctgggtattcagggcgtcggcctgagaacctgggagttcgaatcccaatctcaacgctagaaatagaattttagcgttgaagttaggattttagcgttagaatcagattcctggcttagtcatgaaagcttagcattagaaatagaatcttagctttgcaaatagactttgagctttagaacctgaatcttagcgatagaaatgggatcttcgcgttggaatgaggacgtcggccacggagcttggagttagaacgtggcgatggggacctttgggggagtcttggcggggacgcaaccgttagcgtcgcggctgtgcctggcgctgcaatctcaatggttgcactcccggcgaggcagtcccagcgttggcttccccagttccgcgtcacattgaagggtggcggtggcgctggcgatggggttcctacggcctcctgccttgcgcaagcagaactgggcgcaggcactacaggcacccgtgggggcgaggacgcctagaggtgacaggtgtggacgcagagccggggcgaacccgccgctgctcccgcccctgcacgaggggcagtggtcctgcttctgggagggcggttgaactgtgcgtggtttgtttctggcgggcgtcgggggagatggagcgggatgtgctgtgattcggtgcgctcaggctccctctgtcccctaacccagacgccgcgatgcccggcccttggttgctgctcgctctggctttgaccctgaacctgaccggtgtccccggcggccgtgctcagccagaggcggcccagcaggaggcagtgacggccgcggagcatccgggcctggatgacttcctgcgccaggtggagcgcctcctcttcctccgggaaaacatccagcggctgcaaggggaccagggtgagcactccggtgagtggatggggctgttgggggctgtggggctaggctattgggagagccgtggaaacctgccggcaaaggggaggggaggcttggtcagctagccttctgcctttcggaagctcagaaaccctccctggctgcgcctaggcgggatctggagttgaccattcctcggggtcagattcctcccctgtctcaatgctgggaatatttcacagagagcaggccctgggtggggaagcttctgtgtgctagggagagagtttctttgtgtgtgacagtttgaattactactgtctaggcacttctgtgccagacactattccaagcacttcaaacaccttatcacactgtttgatcttcctaacaacctcttagttaggtactgttattacgattttacacagaagaaaactgaggctcccagagatcaattgagtcgcttatggtcagacaactagggagcgccagagctgggattggaacccagaggcaatgcctttgactattgtgtgaatgtgtgtatctgtgaggcctgaggggcaggtgcaagaccatgcctctgagtgggagctgcaggaaatgtaccctgcctgggagaaaagcaggagtgggcactcaggcgcctgcctattacatgggtcaggggcccctcactgacctctttccttccccagcgtcccagatctttcaatctgactggctctccaaacgtcagcatccaggcaaaagagaggaggaggaggaagagggagttgaagaagaggaagaggaagaagggggggctgtgggaccccacaaacggcagcaccctggccgacgagaagatgaggcttcatggtcagtcgatgtaacccagcacaagcggcagcatcctggccggcgctccccctggcttgcatatgctgtcccgaagcggcagcacccaggcagaaggctggcagatcccaaggctcaaaggagctgggaagaagaggaggaggaggaagagagagaggaagacctgatgcctg

SEQ ID NO: 7406 - DNA, 1188 bp, Artificial sequence
  DNA replication origin
gagggaggaggacgacgtccctcccggggagaagaggctgcggctgttgctggaggggggaagagcacagccctaggactgcgaggacggggaggacgcgccgcggccgggcagggaggagaccggcacccagacaggtggcgacggcagaggagtaagtgacgcggacgcgggggtccgggggtgccggggacgcggggtaggggcggcgggaggctccgtggccggccccgggttgaagttggtaactgagcggcaactccggcgggcgcggagtgacagctcgtgacggcctccgagacgccagctgccccttctcggctgtgtggcttcgacttcctgattctcccacgacgtccctggccgggagacccgctggactctgcggctagccaaaaggggagggggagccccgcgtcctgggggcccccagcaggggaaggggcgggggttgcgctgggcatcctgtctggggcatctgtctgggactctgccagtgcctctcacctggcgaggggcttgtggcgggggtaggggggaagtccctggcgccaggcttggccaagccctgctctgctgggctgcgggctggcggcgctcacccagctcctcacctgccccgcatcttcctgtttttcttccctttctggttgggcagcgggagttgagaggaggcagatggcttccatcccagaaatcgctctcctctttccattcctacagagagggacagagagggaaagttccttgcatcccccggggcgctgtccctgtgagctcccggtgtcctgcacacgtgggcccctgagtcaccgggcctgtgtgtgtgcgatggggttccgtggccagcctggcctcctggggttcactttctgctttcctaccccaactcttcctgtgtggctttgctggccttccactggggaggcacgtgggtttggagggcagatgagggcccgctggagagctgtacccctcagtgagggccgccaccttgacggtttttgatggataatgcggttgacctctttgttccttccatatgtttttatgtttgaccatttgctcagctgagcttgtcttaatcatttgattcgtggtgaatgagccccacatgggagagagggcggccttcattctgaacccatttaagcagcacaggcagccctcttcgccatgggctgcatc

SEQ ID NO: 7407 - DNA, 2062 bp, Artificial sequence
  DNA replication origin
ggcgcgtcctccccgtcctcgcagtcctagggctgtgctcttcccccctccagcaacagccgcagcctcttctccccgggagggacgtcgtcctcctccctcctgggccggccatccctgcctcggggcttgccagtggcttcggagctgccggaagggctggccatggctccgggggctctgcctgcacttggggaagaggaaggacccggcgagagcggcctctcggcggagctggggcgtctgagcgcgggctcggtgggtccgcgcggcgcggagctgggcatcggggccggcgcgggctcctccgcgggccgctcccggctctctggcgccctctgctggccgctcacgcgcaccgcggacacgccgggccggggcctgcgccgccctcacctgccctggcctaggcggtcgctgtcccctgcccgtagccaggcccgctccggccaggccctccacctccaccccgccccagccaggttgcaccccgatggtctccctgcccaaggaggagagaagagaagggacgccccgagagggtggacatcggccacagccaccttgtctttgctcttaccctgtgtcttccatgatttggaggtggtgggaaaaccgaggctgctcaaaactcgtggagaattccgcctgcaggatgacatgaatgcaccttcgcattgcctaccaacagatcttttttgagcatctctgtggaccgggcgtggtgatgggggaggggatattgtggtggacatgacaggcattgccttcacccagtggggctcggcgctgggtgaggaggcattgagaacggacattgtcaattgggcaaaaggaggccaaggagaagtgctgggtgcatgggaactgaaaaagacaggaggctcagcaggtcttggagctgggagagggacagcagcagcggctgttccaaaggaagcaacagctgagagacttctcagagagttgttctcagcccagtggagcatgttcgggcagagggaacagcgtgtgcaaaagcccagaggctgggaaagaagcagaaggaggactgtggggctggagcgtggtgggcgaggggagagaggtgtggtgggcagacagattgcctgggacccagccgtgcagggacagaggagataggggatccttgcaggcccccagccagggctcaggcacagagacaatgcaggtgggcaaagagaggagaggtggagaaatattttggaggcatgccctgatgaatgagcccaggatgcacccttagtgtcagtgtggagcttcttctttggttgtgtgatcagctgaacccgggggtattttctggacactgaggtgctacaccaagagtccaggacaggctaagtgagcaccagcagctcctggcctacctcaaaagcaggagagacaggggagactggggagcccgggggagaaggggaagcgaggaaggcaggagaggccagggaagcagaggaggcccgggaggcagtggaggcaggagaggctggggaggctgtgtccttcccatgattctgcccaggatcctaggcccctgtactccctgagcttccccaccccaagcgctggaaccatgttgcacaatggtctctccattaagctcctgatggcagcccctaccctgctgtgctccctatttcaaccctaacagctctcacagtgggcagcacatagaaggtgctcaggaaacactggtgggggagcacatgggtctgctcagcaccttcctctctcctccagctctcccctgtcatgaaataattctgataaccacacatgggctttgagaccctcttctattactttccatatgctaatccatctatacctcacagcagccctgggggtgggtgctattaggatgcccattttacagaggaggagactgaggtataaagaggggaagtgacataggcacactacaggggctggggccaagtgatcagagcactcaatccccaaaggcaaggtggacgcagttaccataaaagacagcagagtcaaagctgcaaccagaatagcctgactctcagagacctat

SEQ ID NO: 7408 - DNA, 767 bp, Artificial sequence
  DNA replication origin
gtgccttaaccaagcttcttttaatttttcaaacagaagagcccctgtcccagttactgctgctgagccctttcaagatgattcagtgaggagggagaaaagcggaagcggtgtgggaagaggcggggtctgggccagctgctggtcctgctctcctccctcctctggcctctaggctcccaggactggtttggaacccgcgccatgtgctctggaggctgtggcagggcaggtgcggcttggaacccgcgccatgtgctctgggggctgtggcagggcaggggcggcttggaacctgcgccctgtggtttgggggctgtgccagggcagagggagtcctcttgtcccctgtgcacaacacagacagaaggctgggcccacccagtgggtggtcgcgtgccaggccagtgcttaccccgccttgtttgcagcccgaggccagctggttgcaggtgcagggctatgcatcaggggtcagggtgcacatacccctgcaggtcttggggctcctgagttgcttctggaaaggcccagatagggcctgactgcagctgccgaggggtggagcttctgggaaaaggatccctcctaggggggagtgtcttgggcctggggctatgtggcagggacagagacgggttcatggcagtgtctgctcttctctgtgaaggcaaagggcctctgagggagtattacagccgcctcatccaccagaagcatttccagcacatccaggtctgcatcccctggctggagggccgaggact

SEQ ID NO: 7409 - DNA, 865 bp, Artificial sequence
  DNA replication origin
ctgtggagacgcccccagcttccgccgccagctcgcggggcaggaggggtgagagcgactctggccaggccccagggacggggaccgggtctcgtggccctgaccggggagagcccaggaactcacgtggcaggagcgccgggggtttcagcagggagacccatcccgtctgcccctggacttccgcaagccccgcaggcctctccgctcgccccgccgcccacctgccaggggaaggagcgcagtgtgcgcgccgctaggaagcggcgctcgaaactctgcagcaagagtttggtacccgcgttctcctcaggcgccatgacgtgggcggggccgcagcgttgccaggagaccgggcggaagccgggcctggactgaaaagggggcgggcccagggtagtgcgcggaggcagagaggtggcggggcctaggggtagggtcaggaggagcgtcctgggggcgggcgctagggcggggccaagatgagcttaggagggtggggcctggggtggggccaggatgagcgtcatgagagcgaggcctggggtagggccagaattaacgtcgttggggcaggtcctgggtagattccaggttggcgggtcctggggcggggccaggatagggcgatcctggaagctgggcttcggaagcgtccaggttggtggcgtcctggaggcggtgccttgcgtgagggcaggataagagtcctggaggcgggcattagggcggggataaacgccattgggttcaggaggcgggactcggagcagagcccaggagacaggtcctagggcggggctaaggccagacccagagaagggctcaggaggcggggccggggcggggcgttgactatgtctta

SEQ ID NO: 7410 - DNA, 802 bp, Artificial sequence
  DNA replication origin
cgggcgctagggcggggccaagatgagcttaggagggtggggcctggggtggggccaggatgagcgtcatgagagcgaggcctggggtagggccagaattaacgtcgttggggcaggtcctgggtagattccaggttggcgggtcctggggcggggccaggatagggcgatcctggaagctgggcttcggaagcgtccaggttggtggcgtcctggaggcggtgccttgcgtgagggcaggataagagtcctggaggcgggcattagggcggggataaacgccattgggttcaggaggcgggactcggagcagagcccaggagacaggtcctagggcggggctaaggccagacccagagaagggctcaggaggcggggccggggcggggcgttgactatgtcttagcacatggccaggcggtgcgcggactctgggaggcggagcttaggacgggcccacgtggggaggggcccagggtccgggaggcggggcggagtccaggctgcgggctgcgctcaggaggcgggccctgggaggcggagcttagggaggggccggtgtcgggagggacccagggactgggaggccggtcggggctgggctcaggggcccagacctagctgggcttggggcggggccgagacggagcgaggggtccagggtgtgggaaacggggaggggtttgaggaggggatcggaatgtggctcaagttcgggaggcgttacctgcggagggtttgaggcaggtccaggagcgagcccacggtctgccgacgcggggccaggggcgggccccaggat

SEQ ID NO: 7411 - DNA, 1083 bp, Artificial sequence
  DNA replication origin
ccagagaagggctcaggaggcggggccggggcggggcgttgactatgtcttagcacatggccaggcggtgcgcggactctgggaggcggagcttaggacgggcccacgtggggaggggcccagggtccgggaggcggggcggagtccaggctgcgggctgcgctcaggaggcgggccctgggaggcggagcttagggaggggccggtgtcgggagggacccagggactgggaggccggtcggggctgggctcaggggcccagacctagctgggcttggggcggggccgagacggagcgaggggtccagggtgtgggaaacggggaggggtttgaggaggggatcggaatgtggctcaagttcgggaggcgttacctgcggagggtttgaggcaggtccaggagcgagcccacggtctgccgacgcggggccaggggcgggccccaggatccggagcttcgggcggggccgagtccgggtttggggcccgggaggcggggccagttagagcgagggtccctgggatcgtcaggtcaggccttgggctaacgtaggcactcgcagttcctccgccttcaggaaggtctttttagcaggggccttacgggtgcgcgcttcggtcctggaggccttatcctagcctcctctctccatcagcgccacccgtctggggcccaaaaggagggagctttacctctgtcccccagcctttggagtgtcaccaaacaagccattcgttcaccaaatacttattaagtgcctgacaacggagatgtaacggtgagaaaaactcggtgttgtccaggccctccaggggctcaggggctcgtggaagaagtggacattgaagtatttatcacacaaatgagtgtaaaagtacaatagcatatctgccacgaaggtgagcagacagagctagcggggcttgcaggaggagttttgatcttgcggggacaggaaggaggagttagctcctgcggggtgggattgggggttgtggtgatatagacgtggggacagagtggaaaacaacaaaaatataattattttagttcaaagttattgtgtcttgagttgaaaggca

SEQ ID NO: 7412 - DNA, 1622 bp, Artificial sequence
  DNA replication origin
cgcccctcacctcccggacggggcggctggccaggcggggggctgaccccccacctccctcccgggcggggcggctggccgggcagaggggctcctcacttcccagtaggggcggccgggcagaggcgcccctcacctcccggacggggcggctggccaggcggggggctgaccccccacctccctcccggactgggcggctggccaggccgggggctgacccccccacctccctcctggacggggcgactggccgggcagaggggctcctcacttcccagtaggggcggccaggcagaggagcccctcacctcccggacagggcagctggccgggcggggggctgacccccccacctccctcccggatggggcggctggccgggcagaggggtcctcacttcccagtaggggcggccgggcagaggagcccctcacctcccggccggggcggctggccgggcggggggctgagcccccccacctccctccgggacggggtggctgccgggcggagacgctcctcacttcccagacggggtggttgccggacggaggggctcctcacttctcagacggggcggttgccaggcagagggtttcctcacttctcagacggagcggccgggcagagacgctcctcacatcccagacagggcggcagggcagaggtgctccccacatctcagacgatgggcggccgggcagagacgctcctcacttcctagatgtgatggcggcggggaagaggcgctcctcgcttcctagatgggatggcggccgggcagagacgctcctcactttccagactgggcagccaggcagagggggctcctcatatcccagacgatgggtggccaagcagagacgctcctcacttcccagacggggtggcggccgggcagaggctgcaatctcggctctttgggaggccaaggcaggcggctgggaggtggaggttgtagcgagccaagatcacgccactgcactccagcctgggcaccattgagcactgagtgaatgagactccgtctgcaatcccggcacctcgggaggccgaggctggcggatcactcgcggttaggagctggagaccagcccggccaacacagcgaaaccccgtctccaccaaaaaaaaacgaaaaccagtcaggcgtggcggcactcggcaggctgaggcaggagaatcaggcagggaggttgcagtgagccgagatggcagcagtaccatccagctttggctcggcatcagagggagaccgtgagggagagggagagggagagggagagggagagggagagggacaatcatttctattttttgatttaaagagaggaatgtatgactctttctttcactggaacatttacaggccattgtagggttattattggactactttcagtactattgtgtcccaagaaataggaaggcccaaggagaagagagctggggaaatcactggtcagtggagaagtcagcacacacatttatccattaagttttctgtctaatgcgggcatgattcagggcaccccacaacaattacaatagtaacatcaaaaattaccacaggtcatcataacagatataataataatgggaaagtttgaaacattgca

SEQ ID NO: 7413 - DNA, 1011 bp, Artificial sequence
  DNA replication origin
tggccagccgcccagtccgggagggaggtggggggtcagccccccgcctggccagccgccccgtccgggaggtgaggggcgcctctgcccggccgcccctactgggaagtgaggagcccctctgcccggccagccgccccgcccgggagggaggtggggggtcagccccccgcctggccagccgccccgtccgggaggtgaggggcgcctctgcccggccgcccctactgggaagtgaggacccctctgcccggccagccgccccgtccgggagggaggtggggggggacagccccccgcccggccagccgccctatccaggaggtgaggggcgcctctgcccggccgcccctactgggaagtgaggagcccctctgcctggccagccgccccgtccgggagagtggtgggggggtcagccccccgcccggccagccgccccatccgggaggtgaggggcgcttctgccccgccgcccctactgggaagtgaggagcccctctgcccggccaccaccccgtctgggaggtgtgcccagcggctcattggggatgggccatgatgacaatggcggttttgtggaatagaaaggcgggaagggtggggaaaaaattgagaaatcgcatggttgccgggtctgtatggatagaagtagacatgggagacttttcattttgttctgtactaagaaaaattcttctgccttgggatcctgttgatctgtgaccttatccccaaccctgtgctctctgaaacatgtgctgtgtccactcagggttaaatggattaagggcggtgcaagatgtgctttgttaaacagatgcttgaaggcagcatgctcgttaagagtcatcaccactccctaatcttaagtacccagggacacaaacactgcggaaggccgcagggtcctctgcctaggaaaatcagagacctttgttcacttgtttatctgctgaccttccctccactattgtcctatgaccctgccaaatccccctctgcgagaaa

SEQ ID NO: 7414 - DNA, 914 bp, Artificial sequence
  DNA replication origin
gaggccgtgctggtctgctcccgcctccgactcctgcgctccgcccctccccgccgccggccgcccagtcgcgccccgcactcctgggccagccgcgaacccagctttgtcactattacttccgctgagagaggtgcgcgcaggcgcattcgtgttcacgggctgggaaggcggaagtgaagtgaaggccgagacttcggcccggaatggacaatgtttgggtttggatccgtccggtaggaggtcgctcggggttggtggcccgccttgttcttgctggcgcctcccttaccccagggacggtgtccgcccgtttatatgcaccccctgaacgcgagggtcggagattcgcccacgccccgtgtcggccacgcattcccgtggggcggccgcggggtcggcccaagctgagagtcatggccgctgtccccgaggcgtttaagcgctctctacaaagtctgtaggggaagctgctcccgtcggggtggcagtcacaatctcagcaggcaacgttgaggcccacggaaggaaggggcgaggtgtccatgctcctgccagggactggagcaccgtgagcagcctcccgagtctcgcactctcacttgcaaaaccctgcactgactgcttggttcttgggggagccggtaatcgcggggcgacttcccaaaattctttaaggggtgtgcttagttaccatgtgtaatgagagagcaaggttcagcctcagagagctccagggagagctaatctttttcattcgtttgtggtatatggaactggggagaggctggaacagcaattagaaaccagtcgtacagctgtcgaagccaatgaacgagcacttcttttagcagctgtacctttgtccagtgtcaatgccttttcacacgtaaacatttcacttgctcggcatc

SEQ ID NO: 7415 - DNA, 969 bp, Artificial sequence
  DNA replication origin
cggctggcccaggagtgcggggcgcgactgggcggccggcggcggggaggggcggagcgcaggagtcggaggcgggagcagaccagcacggcctcgcggagccggcccggcggaccgtgacgggtcccctcacctcctcttctctcccctccccgcccgccctctctccctcccttcctccctcccgctcgcttcttctcacgccgggagcaggctcccgcctcgcaccgctgccccgcgagcagctcctcttctcccgaggcgcgcggggcgcccccgcgagccccgcggctgagaccccgcagcctggaggagggctgtccggggctttgggtgggtaccagtattacctcctgcccccatttctagaaacttccaggttctgaaggaaggggaggttcgggtatcccctggatgggggggcatctctagggcgccgccccgctggcgtgagctggggacgttgcgggcacacgacggggcgggtgcgggatcttggggaggggggctcccgagatagtggctgggcggggaactccttcctcagcctctcgtcagcgccgcttctcctggtttctcttgcagatgctgctgctaggggtggtgggagcagccgtgggacgcgtggccgggagcgggggtgacagcctgggattccgggggcttctcttccttgtcctcctcctctcctctctattcccagtgtggccgtggctgacactaaagactttgtagccatcaacccgagtgcagtttcgatggaaaatgaaggtaaaggcccctggccgaccggttgcaacgcggagttgagggtgtggtggtttgcttttaagttgtctttgtttttccacctttttattttcgtgagcttatttatttactgtgtatgtgaagtgtccaaggatttgcttacttagggtatccagcttttattttggtaacatggggcatttgagagattgaggttct

SEQ ID NO: 7416 - DNA, 899 bp, Artificial sequence
  DNA replication origin
aaaggagaagaggaggagagaaagctgcttttagaaagtagactatgcagagtgcttgtgagggtttaggtagaacggaggcagaactgtacactgaattcagtaatatgagggtttgatgaccgtgatggcaacaatttcaaaaagggtggcatagaggacagactcaattggttgagtgaatggaaaatgagggagcagaaggtaggacaagctggccctaaaggggcttagggtgatcactagagagggctgtcgggtcagggagtgtttaaggtgggagacagggcatgtggatgttgatggcaacagttaagatggcaagaggaaacagatgggagggtgatcaggaggaggacccctgaagaggcatcgtccatgagaaaaaaggagggatgggacctttgtaggaggagggacaggcctgcagcgtaacagggctcaaggaaaacaggaatgaggcacgcatagaggattatgatggctaaattgatgggaagatgatagaatttgaatctcttcttggtgaaatgaagtgagactatcagctagctgtgggtggagcatgttctcagaaggtatgaagtaaacattcactttggtgtgaaaaagcaagttaaggaaacagcagaagggcagagcaaggctgagctctgagatgctcagtttagagtaggatgctgggcactcaggtgtgtgtgtgttgagtggggatctgcatgcacctgtcttcccccaattaggattcaggatctgggatggagatgcttactgcagtgttggggttttgccaggggagtataggaggtgagagaaagatggggcagttcagatgacatgcacaggagaaactgtagtgatgaaatgtgtggtctgaggattaatctgaccaagatgga

SEQ ID NO: 7417 - DNA, 871 bp, Artificial sequence
  DNA replication origin
gaggcagctaatcagggcggggcttgcagaccgggttgaagtccagggcccaggaaccctagggtaaccgaaagcagcctctgggttgggcctgcggtggggcggggctagaggtgtggccgcgccctaaacctggcgcaaggccggtacctaaaggctcctgggagccaaaagagcaagtcagggaactagctttggttgggttcggtggtacacaaagcacaaggcctgggttggggttaggaggaaatgagacttgcggcgggtcggggctgaagatgtggcagcgccctgaacctggagaaaggctggtacgtaaacgcctgcgtcgcaatctggagtcagctggagtgtcccggcaggtgaggaagagctggggcgctcagttgagtgctgggagccaaagaagtaataactacctttggttgggtgtggtggtacacaaagcacaaggcctgggtgggggttaggaggaaatgaggcagggttggcctcagacaccaaggcctatcctagggaaatggagatggacaggcgccatggtctgacaactatcttgagtggtgaaattgaggggacttggtgactgagtgaatggggaagagggagcgctgggctagtggtggttccgagtttcctggatgtggtgtcattttctgagagggggagagtaggagaagggtgagcagtgataagtgtagttctaaggaattggggtggccataggcagtgggcagctgatcgtgggggtctgacgcacagggagtggcacatagagaagtcacagggcagtgagattttcaggggaagggtgggggtggaaggagctgtgagtgaaatcctgtggcacaggactgggagtgaggagggg

SEQ ID NO: 7418 - DNA, 1504 bp, Artificial sequence
  DNA replication origin
tttttcttagtacagaacaaaatgaaaagtctcccatgtctaattctttctacacagacagggcaaccatccgatttctcaatcttttccccacctttcccccctttctattccacaaaaccgccatggtcatcctggcccgttctcaatgagctgttgggtacacctcccagacggggtggtggccgggcagaggggctcctcacttcccagtaggggcggccgggcagaggcgcccctcacctcccagacggggcggctggccgggaggggggctgacccccccacctccctccggacggggcggctggccgggcggggtgctgacccccccacctccctcccggatggggtggctggccgggcgggaggctgacgcccccacctccctcccggatggggcggctggcctggcggggcgctgacccccccacctccctcccggacggggtggctgctgggcggagacgctcctcacttcccagatggggtggctgccgggcggagaggctcctcacttctcagacggggcggctgccgggcggaggggctcctcacttctcagacggggtggttgccaggcagagggtctcctcacttctcagatggggcagccgggcagagacgctcttcacctcccatacgggttcgcggccgggcagaggcgctcctcacatcccagacggggcggcggggcagaggcgctccccacatctcagacgatgggcggccgggcagagatgctcctcacttcctagatgtgatggcggccgggaagaggcactcctcacttcctagatgggatggcggccgggcagagacgctcctcactttccagactgggcagccaggcagaggggctcctcacatcccagacgatgggcggccaggcagagacgctcctcacttcccagacggggtggcggctgggcagaggctgcaatcttggcactttgggaggccaaggcaggtggctgggaggtggaggttgtagcgagccgagatcacaccactgcactccagcctgggcaccattgaccactgagtgaacgagactccgtctgcaatcccggcacctcgggaggccgaggctggcggatcactcgcggttaggagctggagaccagcccggccaacacagcgaaaccccatctccaccaaaaaaatacgaaaaccagtcaggcgtggcggcacgcgcttgcagtcgcaggcactcggcaggctgaggcaggagaatcaggcagggaggttgcagtgagccgagatggcagcagtacagtccagcttctgctcggcatcagagggagaccatggaaagagagggagagggagaccgtggaaagagagggagagggagactgtggggagagggtgaaggagagggagagggctgaagaaggaattctaaggggagggggagtatctctaggcaaaagaaaaatgtggcaattaggctctggactgtaaatagtagtttctgccacatctatatgagaaaaaaccc

SEQ ID NO: 7419 - DNA, 954 bp, Artificial sequence
  DNA replication origin
ccgcgaacccgtatgggaggtgaagagcgtctctgcccggctgccccatctgagaagtgaggagaccctctgcctggcaaccaccccgtctgagaagtgaggagcccctccgcccggcagccgccccgtctgagaagtgaggagcctctccgcccggcagccaccccatctgggaagtgaggagcgtctccgcccagcagccaccccgtccgggagggaggtgggggggtcagcgccccgccaggccagccgccccatccgggagggaggtgggggcgtcagcctcccgcccggccagccaccccatccgggagggaggtgggggggtcagcaccccgcccggccagccgccccgtccggagggaggtgggggggtcagcccccctcccggccagccgccccgtctgggaggtgaggggcgcctctgcccggccgcccctactgggaagtgaggagcccctctgcccggccaccaccccgtctgggaggtgtacccaacagctcattgagaacgggccaggatgaccatggcggttttgtggaatagaaaggggggaaaggtggggaaaagattgagaaatcggatggttgccctgtctgtgtagaaagaattagacatgggagacttttcattttgttctgtactaagaaaaattattctgccttgggatcctgttgatctgtgaccttacccccaaccctgtgctctctgaaacatgtgctgtgtccactcagggttaaatggattaagggcggtgcaagatgtgctttgttaaacagatgcttgaaggcagcatgctcgttaagagtcatcaccactccctgatctcaagtacccagggacacaaacactgcagagggccgcagggtcctctgcctaggaaaaccagagacctttgctcacttgttaatctgctgaccttccctccactattgtcatatgaccctgccaaa

SEQ ID NO: 7420 - DNA, 1295 bp, Artificial sequence
  DNA replication origin
caaagccatgagcaagacagacatgtaaacaattcccactctataatcatagctatatttgaatggttgtaggagaagctgtgggaaattggaggaggaaatgcctgccttttctaggaggtttcatggagaaggagatatttgacttgtgtcttgaagtatggaaagtcattttatttatttatttatttgagacagggtctcgctctgttgcccagattagagtgcagtggcacaatcatggctcactgcagcctcaaactcctgggctcacgccatcctcctgtctctgcctcccaagtatctgagactacaggtggacaacacctaatttttcttttttttcagagatgaggagtttctatgttgtccaggctggtctcagacttgggatccagtgattctcatgtgtctgcctcctcaaatgctagaattacagttgtgagccaccaggggaaggagttctttaggtaggcaagagggtgacattaattgaggattgagagggggtagaattttaggcagagataggggaattagcagaggaatggagttgtgtccagagtgtgtgtgtgtgtgtgtgtgagtgtgagggtgtgtgatatgtatgtggagtgtgtggggtgtgtatgtgcagtgtgtgtgtggtgtgtatgtatgagcatgtgtgtggtatgtgtggggtatatgtttctgtgtgtgagtgggtatggtgtctgtgatgtatatgtgtgtgtggtatgtgtgggtgtgtgtggtgtatgcggtgtgtgtgacagtgtgtatggtatgtgtgtatatgatgtgtatgtagagtatatgtggtatggatggagtgtttgcatggcgtgtgtgtggtgtgtgtgagtgggtatgatgtgtatgtaaagtgtggtgtgtgagtgtgtgtgaaggaggttgagcagataagaaggggacaaaatgttggggatggggtgaggggtggtgagtatcctgtgctgtcaggggtttggacttgatcttgtaggccccaggagagcagtaacaggtttgtttaggaaaggtcaccttgccagctgtgggaaggatagtcaattaggaagtccctgtggtaatattagtgctggtgatgacccacttcgcactccctctccagaaaaatctctgtgctcttggggccttgaaaagcagaccaatacctctgatatcattctctaaatttaaccttttcagacttgagtgggcatacaatcttcttgttgaaatgcaattatggttccataggtctgggtggggtctgagtctctgtagtt

SEQ ID NO: 7421 - DNA, 914 bp, Artificial sequence
  DNA replication origin
gtgaggggcgcctctgcccggccgcccctactgggaagtgaggagcccctctgcccggccagccgccccgtccgggagggaggtgggggggtcagccccccgcccggccggccgccctgtccgggagggaggtggggggatcagccccccgcctggccagccgccctgtccaggagggaggtgggggggtcagccctccgcccggccagccgccccgtctgggaggtgaggggcgcctctgcccggccgcccctactgggaagtgaggagcccctctgcccggccagccgccccgtccgggagggaggtgggggtgtcggccccccgcccggccagccgccccgtccgggagggaggtgggggggtcagcccccccgcccggccagccgccccgtccgggaggtgaggggcgcctctgcccggccgcccctactgggaagtgaggagcccctctgcccggccaccaccccgtctgggaggtgtgcccaacagctcattgagaacgggccaggatgacaatggcggctttgtggaatagaaaggcaggaaaggtggggaaaagattgagaaatcggatggttgccgtgtctgtgtagaaagaagtagacatgggagacttttcattttgttctgcactaagaaaaattcctctgccttgggatcctgttgatctgtgaccttacccccaaccctgtgctctctgaaacatgtgctgtgtccactcagggttaaatggattaagggcggtgcaagatgtgctttgttaaacagatgcttgaagacagcatgctcgttaagagtcatcaccaatccctaatctcaagtaatcagggacacaaacactgcggaaggccgcagggtcctctgcctaggaaaaccagagacctttgttcacttgtttatctgctgacctt

SEQ ID NO: 7422 - DNA, 1449 bp, Artificial sequence
  DNA replication origin
ggcggggggctgacccccccacctccctcccggacggggcggctggccgggcagaggggctcctcacttcccagtaggggcggccgggcagaggcgcccctcacctcccggacggggcggctggccgggcggagggctgacccccccacctccctcccggacggggcggctggccaggcggggggcttacccccccacctccctcccggacggggcggctggccgggtgggggggctgacccccccatctccctcctggacggggtggctggcccggctgaggggctcctcacttcccagtaggggcggccgggcagaggcacccctcacctcccggacggggcggctggccgggcggggggctgacccccccacctccctcccggatggcacggctggccggtcgggggggctgaccccccacctccctcccggacggggcggctggccgggcggggggttgacccccccccacctccctcccggacggggtggctgccgggcggagatgctcctcacttcccagatggggtggctgccgggcggagaggctcctcacttctcagacggggcagctgccaggcggaggggctcctcacttctcagacggggtggttgccaggcagagggtctcctcacttctcagacggggcggccgggcagagacgctcctcacctcccagatggggtctcggccgggcagaggcactcctcacatcccagatggggcggcagggcagaggcgctccccacatctcagacgatgggcggccgggcagagacgctcctcacttcctagatgtgatggcggctgggaagaggcgctcctcacttcctagatgggatggcggccgggcggagacgctcctcactttccagactgggcagccaggcagaggggctcctcacatcccagacgatgggcggccaggcagagacggtcatcacttcccagacggggtggcggccgggcagaggctgcaatctcggcactttgggaggccaaggcaggcggctgggaggtgtaggttgtagtgagccgagatcacgccactgcactccagcctgggcaccattgagcactgagtgaacgagactccgtctgcaatcccggcacctcgggaggctgaggttggcgggatcactcgcggttaggggctggagaccggcccggccaacacagcgaaaccccgtctccaccaaaaccagtcaggcgtggcggcgcgtgcctgcaatggcaggcactcggcaggctgaggcaggagaatcaggcagggaggttgcagtgagccgagatggcagcagtacagtccagcttcggctccgcatgagagggagaccgtggggagagggagacagagggagagggctggagcagagattcttaacctctggtccatgtacagactttaagaattcttgaaatcttctcttccagttgcagcctta

SEQ ID NO: 7423 - DNA, 1139 bp, Artificial sequence
  DNA replication origin
ctgccccgcccctcctgtttccccgccccatcccgctcccccgcctcgccccgttccgctgctccgccccgtcccgctgctccgcccagtcctgctctccggccccgctccatcccgctggcccgccccgtcccgttccgttcctctgccccgccccgtcccgttccgttcctctgccccaccccgtcccgttccgttccgctgcccagtcctgctggtactcactaggtagtagcggcaacggacgccatggggaccgcctcgtcgctcgtgagccccgcgggcggggaagtgatcgaggacacgtacggggcgggcggcggcgaggcctgcgagatcccggtggaggtgaagcccaaggcccgcctgctgcgcaactcgttccgccgaggcgcgggggcggcagcaggggccgggcccgggtcgctgccccgcggggtgggcgcgggcgggctgctgggggccagcttcaagtccactggctcgtcggtgccagagctggagtacgcggcggccgagtacgagcggctcaggaaggagtacgagatctttcgcgtcagcaagaaccaggagttgttgtccatgggccgccgcgaggccaagctggacacggagaacaagcggctgcgggccgaactgcaggtaacgccgggctgggccgcgacgccgggagacccttgggaagcacggccgtcctgctccctctccaaaccaagcggctttgaaagttcggcggaaactgcccattttaatttgagaggccatattctcttcgagtctgaaatgattccttaaccctcccctttttctgtctctttttttggagacagggtctcgctgcggtggcacgatcgcggctcactgcaacctggaactcctgggctcaatgatcctcccgcctcggcctcctaaagttctgggattacaggagtgagccaccgcgcctggtccccgcttttctatttctggtttattcattgaggcacctagaagaaattagccggaaagtgtcctgaggaggcaaatgccaatctccagctccactgccgcccccgcgcccaccccctcagaaggctggtgacatctgttgaagcaactcagcaaactcttcctaggagtttcacccccctccccaccat

SEQ ID NO: 7424 - DNA, 1703 bp, Artificial sequence
  DNA replication origin
gatcacttccccgcccgcggggctcacgagcgacgaggcggtccccatggcgtccgttgccgctactacctagtgagtaccagcaggactgggcagcggaacggaacgggacggggtggggcagaggaacggaacgggacggggcggggcagaggaacggaacgggacggggcgggccagcgggatggagcggggccggagagcaggactgggcggagcagcgggacggggcggagcagcggaacggggcgaggcgggggagcgggatggggcggggaaacaggaggggcggggcagcagaactgggcggggcgggggtgcaggacggggcgggggagcaggacggggcggggcagcggaacggggcggggcggggccggagagccggacgaggcgaggcagcggaacggggcggggagggagagcggaagggggtggggcaactggaggggcggggcagcggaacgggacggggcagcggaactggggggatgggcgagggggacggggcggggcagcagggctaggcgggacaacaagaggggccgggcaagtggggcggggcatgtgggcggggcagggcaaacgggggtgggtcgagaaagcacacagggccaggcgggctagcaagaagggcggggctagcaggaaggatggggggagtggcgactgtgcaggaccagcagtggaccggacgctggtggaggggtgctccgaacgctggtggagtggtgctccgacatagggcttctctccgttgtctccgcccggctcgaggctccctggcgggcgtgcctcacagggagcacaggcctgggtcccagctgctctacaaacgctgcagctatttctttcgctgccgccgtgcctgaccggaaactcctttctggaagcagttgggaaatctgaaaaatttatggagtgcctgctatgtgcttcccgcgatatctctctctcagtatgcatgtagatagaatgaccagcaaggaataatgccagcaaagaaagagcttttagattttacagtctgaaaccaccagggacaatccttagacaaggttaagttttttaactcattgcggcatgggacattggagaccgcacaccagtctctccttcattccctccatcaaagtggctagtcatctcttctcttaccctttagattttcttcaggaagtagtcatactaggcctttgcattcttcaaaatccagagtgtatatactaatttcttcaggtggtctcctgagataaagggaaatatttccaccatcacagtaccttaagaactttctaccttttcaaatccgttctgatttctaacttcaaatttttgaattctccatgtggatcaggggtttaaggatcatccactaggtttctgactaaaccctttgaacatttttgcatcttagtacctcctttggaatgggcctcagctgaacacttccataactatgcttgagtaagaagataaaatagccatcacccattctctccaacaaataaccaaactcactatgctaacttcctacagcttggggagtacattcagattctacagtctggaactgagtgctctgaagcatgcatctctcctttccccacgtcatttctatccagtgacatgcctctaatccacatttctccaccctacttgcgtactgatcttagattactattggtcaatgccaaagtgac

SEQ ID NO: 7425 - DNA, 1057 bp, Artificial sequence
  DNA replication origin
ccggttgccttggtttcccttttcctatcctctcaggcaccttcccatcctccccactgcgtgacgggtctgcccgaggggagttgcccacctggcagccctgcctccgcctttgtttcccgcctggagggttgctggcatgaaccccctccccaggtggagggtgcgggtgatggggcgcgggcgtcaggagcgctggacctgggctggggccgaggaggaggtggctttaatgcagggggacctgtcacatggggaaacgaagaagaagaaatgtagtgtcactttggccagcccgagggactcgaactaatcctgcggccgcgagcggagccgaattcctagcgcagctgtgcgaagagccctcctgcctaggtgccggcggcctcgccggggacggagcctccgtgctgcccgggaggttgctctgccggctggacctggcggttttcaccccagagttgcagcgaaattgaacgctttgagcctgctggaggaatccagagattggttcaggggctatttttttttttaagcagttgggcaccggtggagccggtctaaatgaaagtctacaaaaaccaatttcagatgcagcgtaactgatgactggtaaatggtgaggagggaaatgcctgcagtgaactgcagaccaccacactgagattcttccttaagaagataggggtttttttcggaggaaaggttgtagtttctgcaaacaggtttttctgggggtacccaggaaggttattacttattttcagcatgttactgggttgtggggagagggaaggcagggtctaaactaaacctactcacacgtccttaattctttgaaaagtgtgtgctcgatgaagaccatttggctgccaaaagaggtttgtatgggagtccgggggagatggattgttgcctttaaatcatactttaaaaaggggaaggtatgtccaggaacttaagagcaggtcaagctatggaaagtattccctgcctctcctccatttccccagacagctcataggcaaacataaaaagtcccttcaattttccacgg

SEQ ID NO: 7426 - DNA, 5667 bp, Artificial sequence
  DNA replication origin
tcttacggaagtaaatgattttgttagggaaggaacatgattttgttaggaaaaacataggtatgttctcagtggtctttggctggtgggattgagcagggacatgcctcacagaagatgaacccagagaactcccagagtgcctgtgcccattccggggggtggctggatctgggccaactgcacccaggaattcaggggcctacccaaggctgtccctggagacgttcctggcctgggtgggctggatgctgccatgagcgcctcatttcccaggcaatctcctcagggacgctgggtacccacacccagtgaactcccgtgacctcccggggcttctcctccttgtcccagttactcctcatgtgagagcaatggtttcatcttcattgcgcagatgaacaaaacaaggcccgtgtttccctggtgggtgagtgataataaatctctccatcacctaacctttctcctcagagctggagaaaggttacctggggggtgggaatgaagatgatgaaaatgaagtaaagttgaaagctgggaatggtacctggaagtactctgggcagtagggctagcagtaggagctgaggaggtgggaagagaggggagagaacaggggtgagtagaggggagaggacaggggtgagtagaaggtagagggcaggggtgagttaaggcgagagggcatgggggactagaggggtgagtagaggggagaggatagggatgagtagaggggagaggacaggggtgagtagaatggagaggatagggtctagtagaggggtgaatagaggggagatgacagaggtgagtagaggggagaggacgggtgagtagaggggagatggcaggggtgagtagaggggagaggacagaggtgagtagaggggagaggacagaggtgagtagaggggagaggacgggtgagtagagaggagagggcaggggtgagtaaaatggagaggatagggtctagtagaggggtgaatagaggagaggtgacagaggtgagtagaggggagaggacgggtgagtagaggggagatggcaggggtgagtagagggaagaggacagggttgagtagagaggagagggcaggggtgagtagagggaagaggacaagggtgagtagacgggaaatggcaggagtgagtagaggagtgagtagaggggagatggcaggggtgagtagagaggagagtagaagggagagggaagggatgagtagaggggagatgggagcgagggaagggatgagtagaggggagagggcaggggtgagtagaggggagagggtaggggtgagtagagaggagaggatgagggtgagtagaagggagagggtggggtgagtagaggggagatggcaggggtacgtagaggggagagggcagggtgagtagaggggagagaacggggtgagtggaggggagatggcagggccgagtagaggggtgaggacaggggtgagcagaagggagagggcaagggtgagtagaggggagaggacacgggtaagtagaggggagaggacacgggtaagtagaggggagaggcggggtgactagaggggtggatagaggagagatggcaggggtgagtagagagatgagagaggggagagggcaggggtaagtagaggggagaaggcaggggtgagtagaggggagagggcagggctgagtagaagggagagggcagggatgagttgaggggagatggcaggaaggagtagaggggtgagtagaggagagagggcagaggtgagtagaggggagacagcagggtgcatagagggtgagtagaggggagaggacggggtgagtagagggcagaggacgggtgagtagaggggagagggcagggatgagtagagggatgagtagagcagagggggcggggtgagtaaaggggagagaacagggctgagtagaggggagaggacaggggtgaatagaagggagagggcaggggtgagtagaagggagagtgtaggggcaagtaaaggggtgagtagaggtgagagggcaagggtgagtagaggggagaggatggggagagtagaggggtcagtagaggggagagggcaagggtgagtagaggggagaggacagaggtgagtagaagggagaggacaggggtgagtagaggggagatggcaggggtgagtataggggagatggaaggggttagtagaggggagatggcagggtgtatagagggatgagtagaggggagagaacaggggtcagtagagggcagacacaggacagggatgagtagagtggtgagtagatgggagatagcaggcatgagtagaggggagacgacagggttgagtataggggagagtagaggggaaagggcaggggtgagtagaggggagagggcaggcatgagtagaggggacaggacaggggtgaggagaagggagaggacgggtgagtagaggggagaggacagagttgagtagagggcagaggacaggggtgagtagaggagagaggacaggggagagggcagggttgagtagaggggtgagtagagcggagggggcaggggtgagtaaaggggagagaacagggctgactagaggggagaggacagtggtgaagggggagggcaggggtgagtagagtgagagaacgggtgagtagatgggacatagcaggggtgagtagagggaagatggcagggtgtgtagagggatgagtagagaggagaggacaggggtgagtagaggggagaggacggggtgaatagaagggagagggcaggggtgagtagacgggtgagcagaggggagaggtcaggcgagtagaggggagatggcagggctgagtacagaggtgagtagaggggagagggcaagcgtgagtagagaagagggcgagggtgagtagaggggagagggcaggggtgagtagagggaagagggcaggggtgaatagaggggaggtggtaggagtcagtagaagggtaagtggaggggagatggcagggatgaatagaggggagatggcagggtgcatagagggatgagtagaggggagaggacaggggtgagtagaggggtgagtagaggggaaatggcaggtgtgagtagaggggagatgacgggtaagtagaggggagagggcagggatgagtagaggggtgagtagagcggagggggcaggggtgagtagagcggagggggcaggggtgagtagaggggagagaacatggctgagtagaggggagaggacggggtgaatagggagagggcaggggtgactataggggtgagtagaggggagaggacaggagtgagtagagaggagaggacagggttgagtagaggggagaggacaggggtgagtagaggggtttgtggaggggagagggcagggttgagtagaggggtgagtagaggggagaggacacgggtgagtagaggggaaaggacaggggcgagtagaggggagagggcaagggtgagtagaggggtgagtagagcagagggggcaggggtgagtagaggggagaggacagaggtgaggggagagggcaaaggtgagtagaggggagaggacagagttgagtagaggggagaggatggggagaggacgggggagagggcagggttgagtagaggggtaagtagaacagaggaggcagggctgagtagaggggagaggactggggcaagtagaggggagaggacaggagtgaatagaagggagagggcagggatgagtaggggggtgagtagaggagagaggacaagggtgagtagaggagagatggcaggggtgagtagaggggagatggcagggtgagtagaggggtgagcagaggggacagggcaggagtgagtagtggggagaggacagggatgagtagaggggagagggcaggtgtgagtagatggaagagggcaggggtgaatagagcagacgtggtaggagtgagtagaggggtaagcggggggggggtggcagggtgagtagaggggagagaataggggtgagtagaggggaaatggcaggggtaagtagaggggatagggcagtggtgagtagagcagagatggcagggtgagtagaggagtgagtagaggggagtgagacagcggtgagtagaggggtgagtagagacgagatggcaggtataagtagaggggagaggacagggctgagtagagaggagaggggagagggcaggggtgagtagaggggtgagtagaagggagagggcaggggcaggtagaggggtgagtagaggggagagagcaggggtgagtagaggagagagggcaggggtgagtagaggggagagggcaggggtgagtataggggtaagtagaggggagagggtaggggtgagtagagacggcaggggtaagtagaggggagaggacgggtgagtagaggggtttgtggaggggagagagcaggggtgagtagaggggtgagtaggggagagagggcaggggtgagtaaggtgagaggacggggtgagtaggggggacaggacaggggtgagtactgggttttgtggaggggagagggcaggggtgagtagagggatgagtaggggagagagggcaggggtgagtagaggggaaagggcaggggtgagtaaggtgagaggacggggtgagtagaggggagaggatggggggagtagaggggtttgtggaggggagagggcaggggtgagtagaggggtgagtaggggagagagggcaggggtgagtagacgggagcggacagggatgagtagggcgtgagtacaggggccaggcaggcgtgggcagttacattcagcaggggactttgtcttctgcataatttttcccagagcctgctgaaatgcgggggctttctaacttccacactgtagtgttatttagttagcgcttatttagatggttattcgttggtcctgcaataaacatgtaactaaaaaggacaagttgttttccagtggtggtcagtttggtggtggagatttccactcctgtgccctgcattcactccctcctgaggactgctgaaatcacttctcgtttctgctgaataatgcacttgtgacagccagctctactagctcgtttacaaccagatcaatgagtctttatgtgcttttccccagccagacgacaataaactaggttttatttgcctaaattgagtcctcaaattcggtggatcagcataaaccctctgggagagcgctggggaccctgagtaacattctgcttggttcagccattctttcactaattcccccgtaaaaagccaccacatttgtcctcagcacttgtgccagctgcctggattagttttaatttagctcttctggagagtgtagccctttagaacatctttcctattgctcttctgtacgcttgtttaatttggctgggtttgttttgagaggagctgtggagatgggtcttctctcccaccgggacacgtcagtagaaaggttctcttgcttccgtggagttctgaaggcttcccctgccccaagacctgataggaattactgcttcccccaccccaaaagccactgacaggacttttatttattactgcatattttatttaaggtaaaacctccaaacagtgtcaaagagtatataccccaaagtaagcctgctcctgccctgt

SEQ ID NO: 7427 - DNA, 1272 bp, Artificial sequence
  DNA replication origin
ttgtccctcttggcaaagaagttgtccaggctccgctcctccgtctcagccatggcctcggcctcctcgacccggatgggtggggccggcggcgggcgcggcccgcggggctccgagctcggggtcgaggccggctctgcgctcacgctgccgggcgcggcgacgcctcagccccgcggggtcgccgaggcgtgcgcggcgagacgggcggctccccctgcgtgctggcgagcggtggtacggtccgcccgggggctcgcgcgccgccgctgtcgcccgaggctgccggggctgccgctgctgctgcgacggcggagcaggattccgctctccccacaacctgaggggaaaaggcacgcgcgagccagaggttctggcgagagtgctcggctagcagcggcgcgtgccggaggaagaggcgcgcgcgcaggcctggagaggaggggaagggagtggggaggggagggagagggaggagggagggcgggccgctagaagagagaggaagcgcctgcgcctgcgtattttgctctgcctgccgctgtgggatcgccaaggggcgggcggcgggaggagatggaggcggagctggaaagagagccaatcaggtgccaggacgaagctcttaggtgacaatccctgacccagacggggcggagtccaagcatgggggcggggagaggagggcatatgcaaaataagtgacgtgccgggcgactccggtttcccgattggccgagggtttagtcttgagggcgggcatgttgagggctggttgatgacttggctaaagaggtccagcaggaggggcagtgggttccttttggacgcatgcgcaggatgcacgtgtgtttcctggcccagaacaaaccgtggccccatagtagtcgtttgaactgtcgcgaaacggacaggcactgcgttaagccaactgtgttaaagattgttcctctcctctgatcgcttctgtacttccaccccctctggagtggcaaccattacttttcttctttaccggttgattgtgaaagtgagaggagcagtgagcctgaagtttaggtcccatttactaaaagatctttcataggctggttggtaggtagaaagggattttgtctgaactccaccctctggattatgtttaccaaggtcaagttcaataaatcctatcgtcaagtccctaatctgtaaagtgggtatactatttcttacaagatagggggatggagggaagagagtcaacattattagctgctcagcacattgcttaac

SEQ ID NO: 7428 - DNA, 1197 bp, Artificial sequence
  DNA replication origin
gaggagcggagcctggacaacttctttgccaagagggacaagaagaagaagaaggagcggagcaaccgggcggcgagtgccgcgggcgcagcgggcagcgccggcggaagcagtggagccgcgggtgcggcgggcggcggggcgggcgcggggacccggccgggtgacggcgggaccgccagcgcgggggctgcgggcccaggggccgccaccaaggctgtgacgaaggtgaggggccgggaggccggcactcggggcccgggccgcgcgccggcgccccatgtgcccgcccccgcctgccggggaagcgtccgggaggggccgcggaggccgggcggacgggcgcgggccgccacgtgacgcaggctctccacctcgggctgggctcgccagggccgggaccccttccgatatccgcggtggagccgcccttcccaccccgcgtcgctcggcgttagccaaggcccgggcggcgccaccctccgggggcactaggtctggggccgcagtgcccagcacagagcagcgtttatcgggtgacgtctaggctgagtaattccgtgtgctgacctcagcccagtagtttgagctgaattttcgctttcagcagccgcatttgtagcagctcttttgtgatgacttagtctctaagcccgtgaaagaaaaagaaaactctcggtggcaaggttgaagtagaaatgtagttgtgaaattcctattgacttcttccttcggcttttcttagttgcttaaagtaacagctcccatgcaggaacccagcggaagtatagtgttagcctacgagcatgtttgtcctccatttagcctagtttgccccagaacgaagcaagggctttgaccagaagacaagtacatacttagtttaggttccagccacttgatccacttttcgtagtgtgttatttgcttagttatatgtctacaaatagctttaattgatcaaatggcgtttgttttacaggacgaagatgaatggaaagaattggagcaaaaagaggttgattacagcggcctcagggttcaggcaatgcaaataaggtatagtctggttacaaatgtgtttagataacctttgggatagatattggatacaagttaggttttcctttggccccaaagcagcatcatagtagccttgtgctctagatatgcttattaggactcaaatgggttctg

SEQ ID NO: 7429 - DNA, 981 bp, Artificial sequence
  DNA replication origin
tgtaacacccctttggatggcaattgaggctgtgggcatggatgtgagtgcttggggattccgttgagattgggaaaaagagtttcatttagcaacgcaaacgtttcttaactagattgggaaatggggaccttgtgagaatagaagaaaaacaaaccagtgtgttttcataaaagccaggagatattattttagggcgaaatgaggaaatgctgctgagaggtcatgggggaagcaacagaagcacatcgttccaactgagcagtatggaggccactggtggcttgaccagaatccttcctgaggagtgatgcagaggagccaggcggcagggagttgaagagtgagtggaaggggagtggttccaacaacactttgatcactctggccttaaagaggaggagggaaggaaggcaggagctgcaggagaatgttgtgggggggccaattttaaagatggaaaacattcggtgtgtttacatgttgagagaaattgttggacacaccagaaggagaagtaataactgagggttgagaccatggaagggaacatgggagtgacccgcacccaagtgcaggtagagggattggctgcggagggaggaggtggggaggtgcagcccccaggaggcccgcagttttggcagggggatgttaagagaaacttctctgatggtttctttgtctcctgcaggtgcaggtgaaatggtctgctaagaaaggtggtagatggtgtgggtttgaggtgtgtggacaattaggacattaggagaatcaccgggaaatgtggcatgtggagcagagaagtggtgggggcgcttgtaaatgttgggggcacaccaacgacagtgcctgaagcattccagtgacacaaactgctctgccgcgctgtgacgctctccagccacgttcagctgctcaggtaaaaaagagagcaggtaatagggttcagtcagggctgggattttcagagagttgggg

SEQ ID NO: 7430 - DNA, 935 bp, Artificial sequence
  DNA replication origin
cgcccctactgggaagtgaggagcccctctgcccggccagccgccccgtccgggagggaggtgggggggtcggccccccgcccgaccagccgccccatccgggagggaggtgggggggtcagccccccgcccggccagccgccctgtccgggagggaggtgggggtgtcagccccacgcccggccagccgcctcgtccgggagggaggtgggggggtcagccccccgcccggccagccgccccgtccgggagggaggtggggggggtcagcccccctgcccggccagtggccccgtccgggaggtgaggggcgcctctgcccggctgcccctactgggaagtgaggagcccctctgcccggccagccgcccgtccgggagggagagtggggggtcagcccccccccgcccggccagccgccctgtccgggaggtgaggggcgcctctgcccagccaccacccggtctgggaggtgtgcccaacagctcattgagaacgggccaggatgacaatggcggccttgtggaatagaaaggcgggaaaggcggggaaaagattgagaaatcggatggttgccgtgtctgtgtagaaagaagtagacatgggagacttttcattttgttctgcactaagaaaaattcctctgtcttgggatcctgttgatctgtgaccttacccccaaccctgtgctctctgaaacatgtgctgtgtccactcagggttaaatggattaagggcggtgcaagatgtgctttgttaaacagatgcttgaaggcagcatgctcgttaagagtcatcgccaatccctaatctcaagtaatcagggacacaaacactgcggaaggccgcagggtcctctgcctaggaaaaccagagacctttgttcacttgtttatctgctgaccttccctccactattgtcccatgaccctgcc

SEQ ID NO: 7431 - DNA, 1669 bp, Artificial sequence
  DNA replication origin
ccccggctgccagcaccatgtccgcagggggagattttgggaatccactgagaaaattcaagttggtgttcttgggggagcagagcggtaagtacccggcttaatctcttggcttgtcgccgagtcgacccccgccgcccaatcgcccaccccattgggacccccggcccaggctcggaaaggcccctccttgccagggtagaggagagggacagggatggggaggtcggggcggggtcgggctggggaggggccaagggtgaggacggaggaggcgctggagcctggggtggaggtgagggtgggctctgggtggggggcccggggtgtgggtgcaggtgcggcgctgcagggggcccggagggcggcggctggctccgcggcgctggccagggcgtgaaggaaccgggctcgctggctagctcacactgcggcaccggctgcgggcgaccgcgcaggtggctgggtgctggcgggggtggggagagcgacgggcgccccccttggagaacgaagcgaagctggggtctggccgggcctcactccgctgcactggaggggtgttccctgcggaccctgctgggaaccatgcgaaagggcacgtccagggcgtgggacaaacagccaccggggagaaaagagcgacacctgtctctgctcgaaagagcgagtgcaggccatgggggaacggggagcctacctcccctggctcacgtccgactgggcacagaaggttctagacccgctgcccttcgccggcgcttgttagtctccttgctgcccagggatctgggcaattgcagtgagggctaccccaactcgaggcgatttggggaatgatacaggggcacctcacaccgagaggctgtgaagtctggctctgggcagagaaaggcccaggcgacacgccctgcctagcttcccagcactcctccagagagcatcggtggattcttcccacccccacctcccagctcaccgcccttcttgggggaggggaggtcaccctggcagtcggccagagctgggggagggggagactgcttctccgctgcccggctccctccccaggaaaacatctctgaaaaccaggttagtccctagaggcgggaagcccagattgaagggcagggacccctctgccacctgtaggaaggagtggctttcagagcatccctccagaggcctctcgcatggggctgcagggagacaaactgagctctggtcagctctgctctgggagaaggctgtccttgcgggacaggaccccagctctgcctctgcagaccagtcctgttcacctgggttggtgcctctctgacaagggggcccaaaagaaaggcagctgtgggaggactgggtgggcccaggaacagtgctactgtgctgtgtgtacatgagggttatggaggtcacgtggctggctcttgtctgctgatactcattgcctaagatggatggttcagagaaggacgttagaaggtagtgtccaggcccagtatggagatgggtttgggggacaggctgggcatttcagaagaagatccactcagccagccagcgtttgccctggattctgattgcctgtttttaatagatcccagtttcatagagctgaccataccctgtgtctggaagggattttggtggtattcacatcccagtgcta

SEQ ID NO: 7432 - DNA, 808 bp, Artificial sequence
  DNA replication origin
tagagtggggaagacagacgcagcggggcagcgagacacggtcccccccggggggctctcaggggtacggcgaggaggttctctcctgcccgggtgcgggctcgggtgggcgggcgcacgccccccagccccgcagccccgcgggccccgcatgacatcagaggctggggagcgcacagagcgcaggcgccggcggaggaggcaggcgggagggggccgactggcgcggctctggagagcgctcctccgccccgcgcgccgtccctgcgccccgctccgcccgcgcctctctcccagcgccgcgcctcgggcgtaaagagcgcgcccctcgcaccgcagccagtgccgaccgcagcagcccagccccagccttcctccgcctccgcctctctctcctcctcctcctccgccgccggacacgcagccgcaggccgggaccgggacgcagctggggagtcagggacgcgcgcagccagcccttccccctccggctcccgcaccgccggccgcctcccctcgccctcctactctcccctccctgctccttcgctttttcctcctcctcctctcccggccccggctgccagcaccatgtccgcagggggagattttgggaatccactgagaaaattcaagttggtgttcttgggggagcagagcggtaagtacccggcttaatctcttggcttgtcgccgagtcgacccccgccgcccaatcgcccaccccattgggacccccggcccaggctcggaaaggcccctccttgccagggtagaggagagggacagggatggggaggtcggggcg

SEQ ID NO: 7433 - DNA, 2076 bp, Artificial sequence
  DNA replication origin
ggaggggagagtaggagggcgaggggaggcggccggcggtgcgggagccggagggggaagggctggctgcgcgcgtccctgactccccagctgcgtcccggtcccggcctgcggctgcgtgtccggcggcggaggaggaggaggagagagaggcggaggcggaggaaggctggggctgggctgctgcggtcggcactggctgcggtgcgaggggcgcgctctttacgcccgaggcgcggcgctgggagagaggcgcgggcggagcggggcgcagggacggcgcgcggggcggaggagcgctctccagagccgcgccagtcggccccctcccgcctgcctcctccgccggcgcctgcgctctgtgcgctccccagcctctgatgtcatgcggggcccgcggggctgcggggctggggggcgtgcgcccgcccacccgagcccgcacccgggcaggagagaacctcctcgccgtacccctgagagccccccgggggggaccgtgtctcgctgccccgctgcgtctgtcttccccactctacccctcttttgaatccagaaaatgacagaaattgtcaggggacatttgtttctggtcttttaaacctagatgccagtcccttcctccacctcgcgagacaccgatgcacagcgcagtcgtccgaccgacagggcggaaaggaacgaaggtgggggagagccagggtgtggcgaggcccgtcagggcggtcagacctagggaaacctggcgtacttggcgcagatggggctcgactcttgccccccgtggcttctagcccgcccttccctctcgaggcctagaccctttatttgggcggcctcttgtggagtctgtgggtgcccccgcagacctggccagcgagagaggagctgccaatatcaggcgcgcctacctcaaaccagctgctcatttggatcattttatgccaaatcctaacctgccccatgggagagaaggaacggtgacgctctgaatgccagtgccactatctccaggacagtgccctgcgtttcttgatcccggggtcgccaggctgacaatgccactccccaccctggcaattaggtgtatctggacaatgagctatctgaggacatgtgggcgacctctccttggcctctacttgcctggtccatcgaggcacacagaccaagttgtgagtgagtgagagcaaagagcagacgccaagtgctagaaacactcccaagacagcccgagcctaaggcatgctggttaattgaggttttacaaagctgtcccttactgttctgccacagcgtggtcttgttcatttatggctgttcagtgagcatttatttgagataataatctgcatgtcggtgaacacgatggtgtgtgcacgcatgtgttatagaaagagaaagaggagtgagacacaaccttcacctccagatttctcgtggacacttgttaccccctttttgacttatggggcttgcttgggcaagcctatctgtctccctggtgtgctcacctcgaatctctttcctatttcttgttagaaacctgaccacaagttccataaaagcagtagttgaagctccaccactgcatcccaaggacatagctcagagtttaagaaatagttgttgaatgtttgaatgaacatctagaactcaaatcaaaataactgtcctattctcataattacctttagtttggaaccccagggattgtaagtcatcacctagaatatctgccccgttgtggctggcaccaggctcagggtaaccctccagacacccacccacttctctggggctcctgctctcttaggagaccatatccagcttggggttgaagaaagctctgaaaggagaggagactcccaagtcacagcccttcccgtctctataagtgatccctccaaagaagggccagtgagctactggccaaggtacccagccatgcaacactcctccaacctgcaccttctcctaacatctagtgctgtctccctgtaccctctcatcctgacctgatgagatcatcggtggcaagacaaaacagctgaggtgtgccagaaaaggcaccat

SEQ ID NO: 7434 - DNA, 1732 bp, Artificial sequence
  DNA replication origin
tacatacatttgctccttgaatcttcacgacagccctgtgagatgcaataatcatgccattccacagacgaggaaacgggcccaggggactgcggtctcggctcctttcctctggctttctcagaaaaggcgcggaggcccccgccgggtgggcgaggcggggtgggcggccccttgcgccctggagtcgcattccgccaccagggggcgccgcccctccgccgcggcccggggaagccacccgcggaggcgccacgcccagcccgcccacgggacgcccccgcggccccacagccagccgggcgggactccaccacccggctcagcgcgcctccgatagcccgcttccccgccggggcgccctcgggcctgcggggctccccgcgcccaccgcacgcacgcacgcacgccttcccctactcggagggcccggcggctgagcccaccggcgcctgctcacgggacacagcctcgagaaaacttcctctctgactgcccgcgataaagcaccgtttagtctatttatgttttctgcacgaaagtgtattaaacacgttagagaacaagaggagtagagagtaaggtgccacgaggcaccgagagggcccgcgggaacacacggcttcctcaggctctctgaccggccgtgagcagggtggtccccggccgcattgtggggccattcgcacccagaagctgtcagcctccccactgcgtcactggcaccatctgggaaccattattcagccactgcagggggctaggtagcctctgcttcctccttccaattcccaaaaccttcaccacagcacctcctggggcctggccccgagataggcttgcatgtcggaaagaaactgttgtcagcattccaggcactgtccaccccgggaaaggggcaggtacccatcccgtcacagactcaggtacccgggcaagccgggcaccaggcctatagaggtgaacaagacaaacagaaggcagacagacaaccaagaaagcatccaaactgtggctgcaattggctgatcaattacaggtgcaatagtgccatgaaggagaagtgcaaacagacagacagatgcctgcatggaaatgcagggggaagccggtgtatgtggtggattaacaaaggtgaaagaggcccgttccctagggattggagatctggagcagagatgagctctaactgtgcctggaaggatagggtaagtttgttgacaggggccttagagaaggtgttctgggcggaggggactgcaggagtgaagactcagagatgagaaaactggaccatgtttgcctggagggcagggtgtaagtagcgcccccagttgcaaggtgcctcaggcagagcgtggtgagtggtggattctagagggagagagtgtatcatgtacatctcctttagtaactaacagggtgctgctggtggatgatggggcgtcgctgacagaattttaacagaggcaagatgcaaccagatttcagggtgtaaaaggccactggggctacatgtgtacttggaagagggaacctggctggcaaaggtccttaggagggaggcctacttgtcattatggccactgggatactagagtaggagacgtcagagccgagggcaggaccagcaagcagcaggagcatcccaggcacccacaggctcctggcagccaggatgagccagcgcagaatgcagggttagcaaaaggccatgcgggagcccatccca

SEQ ID NO: 7435 - DNA, 1092 bp, Artificial sequence
  DNA replication origin
tctctaacgtgtttaatacactttcgtgcagaaaacataaatagactaaacggtgctttatcgcgggcagtcagagaggaagttttctcgaggctgtgtcccgtgagcaggcgccggtgggctcagccgccgggccctccgagtaggggaaggcgtgcgtgcgtgcgtgcggtgggcgcggggagccccgcaggcccgagggcgccccggcggggaagcgggctatcggaggcgcgctgagccgggtggtggagtcccgcccggctggctgtggggccgcgggggcgtcccgtgggcgggctgggcgtggcgcctccgcgggtggcttccccgggccgcggcggaggggcggcgccccctggtggcggaatgcgactccagggcgcaaggggccgcccaccccgcctcgcccacccggcgggggcctccgcgccttttctgagaaagccagaggaaaggagccgagaccgcagtcccctgggcccgtttcctcgtctgtggaatggcatgattattgcatctcacagggctgtcgtgaagattcaaggagcaaatgtatgtaaagcgcttcggatgtctggtacattctgagccttcaacccacctgagctgttgaaactctgggattcaagcgattcgggtcaaagaggaacggtgtgacacctgcctctgtcctttccaaggtggactcagggattgcatacgtctcatccagaacccccagtctctcttttgtaagctggcggtcatgagatgtaatgaggaaaaggtttaaacaaatgttggtccctatctgggacctctgaagtcacttttaatggatttggggattttacagatttaaaaaggggtgcctactgtggcccatttatagacctgtggagcgaagagaaggagattagtcacactgggggccggagtagaagccgttttaaattagttgccccgctctgccttgagactgagactttctgactctcagtttcacccttgggttccagcacccagatgagaagagagagaaggtggaagaggaagagagggaggggatagagcagcggccaccacctctccctgagagggcgcagagtg

SEQ ID NO: 7436 - DNA, 1525 bp, Artificial sequence
  DNA replication origin
agaggttttcctctatgggaaactggccaacgtgagaccagtcctcccaggagataagagaaggggcttcggaaaccagtgtctggtaggactaggtgtaacctgtgaatgatccttcagccaagtccagagggaagtctgcccacatgcagacaatggatgccgcaggcaggaagcttcctggaggttaaggaggggcaggggagcactgtatttttggagcagacaagaaaaagaaagggaagagtcactttccagtcctttattcatgaagttgccatccccaacctgggcttgcatatcccaagggtgtccctgggaaagaaggcggtgggaaggcacagggccggggagcctcgggatcctgagtgaactggtgaggacagggagctcagcctttccacagtgaacacccacctatggtgtgagatgggtgtgctaggaagccctggaggaatgagaggggcacccgtggtttgggcagcctgagtttgtttgtgggtaattgtgtataggtgtgtatgtgagggaggcgtgtctatgagtaggaagctaagtaggtgaggaggtgtgtgggtgcggaggggaggtaggtgtatgtggagatgtggggggcatgtggggatgggaaggacttgggtaggaggcagaggagagtaaagtatgtggatgtgtgagtggagttgtggggtgagggttggggtgtatgtgaaggggaaggtgtgagggaagaggtggtgtgggggaaatgtgtggaggtggggtggggtgcctgtgatggggaagtgtgtgtgcatgtgttgggggggtgtggaggtgaggaggggtccatgtcgggggaagtgtgttcacatgtgtggggggtatggaggtggggtggggtacatgtcgggggaagtgtgtgggggtgtggaggtggggtggggtgcctgtgagggggaagcgtgtgttcatgtgtggggggtatggaggtggggtggggtgcctgtgaagggaagcatgtggggtggtaggtgattggagggtggggatgggcagatgtgcaaggaaggaggagaaagggtgtatgtattggtggagggcggggtggagcatcctagtgggagttgcacaacctggccagtggatctatttaactcaaaaagaaagagaaaataaacaacagagaaaatcacaaaacacatgggtgttattaatttgactgagagaaatagagccctgaacggatgagcagaacaaaacttaatgagatttgatgtggaacattttttaaatgcgtggtgtaggaaagaatagaaataaacatggagaaatgatagaaaacactagactgcggtagagaaggcccgggaaggagcgaagctggaaactggtgggagagctctgcgctccatggtgatggtgtgacagcctctctgagggcctgagcctgagccgtgacataaaagtagctgactctctgtcaggcttttctatcatctgtttttgtgggcaaggcacaactccccttggcttacctggaaac

SEQ ID NO: 7437 - DNA, 1611 bp, Artificial sequence
  DNA replication origin
gcagtcaagcctcgcgggtcgctgcggcgtcacacctgtctgagggggcggcggcggcggcggcggcggggcgggggctcgtagcgcctttgacacccgaggaaaagagggaggagggagagcgcgtttcatcatcggcggcggccacttataaaaacttctaggcgcgcactcgctggctcagtctccgctccgcgaatctcctccggccactgccgccgcggtcgcctctcacccgcccggccgctccagcccgaggcgccccgaccccgcgccactccgcgcccggccagccgcccgcagccatggggctcctgcccaagctcggcgcgtcccagggcagcgacacctctactagccgagccggccgctgtgcccgctcggtcttcggcaacattaaggtgagcggagtccgcggggtcttccgggccggagccgcgcctggcgcaccttcggctgggcacccgcttctgtctgccggagccaggaggctccgggagccccgggctccctcctgtgccgcgctccgatctcatccccgggcgacgcgtgctgggcgtgtgtgtgcgagtgtgtgtgtgagcgtgtgtgtgtgtgagcgtgtgtgtgtgcgtgcgagtgtgtgtgtgtgtgttcacacgccttcatcggactaagtaatgggacagtggaagtacctgcttaccgcttactcggacaactccaggcagagttataagcgagagaattgtcctcgatgattgaaaaagatcatctcgaggaacgctttttcggcctccagcgggcggttacttcgtcaatgggatgggcttggaggtgccagggggaccccccgcgctttgggggacagactgtgtctcgtccgagccccctcgtcctggggtgggtggcctaagggatgttctccttccccaggctttcttctcccgccaacgggggcggggggctctgctacctggctgtgccgctcgcagttatgtttagaattccctctcagcgggcggcttccccaggctggcaaccaacccgcgtgctcagattggcttccctggtctggaaatggccccaggaaggtcacagctctcacggttcagtaaggtctaagcaggtccactcaccaggcaagttatggggagcgggtgagaagatagggtgttggcagctgttaggatgagagcacctttcccatggggtcggaaatgctttccactccctcacaggtccaggaggacctggaatggttcaatccgcactcgggctcttttgcccgttctgcctaggcagaagtaacaatggaagatacctcctgagaggccaaagctgctgcggtgaggatgtgggagactgcagagactgcatcaaggccccttctggtcagggtgggatcatggtgtagagaggttgtttcccacaaacatacagtcagatgggactgagtaaagcctccggtggtgcaattaaggggaagccagattacacaaagggatgatgggggtgtccgtggactggttatatgtgtccaacagaaagggatctggaggtcagagtggatctcacctgcatacttactcagctgggatctccactcctgcttctgctctttccgcaccg

SEQ ID NO: 7438 - DNA, 2391 bp, Artificial sequence
  DNA replication origin
ctctcgcttataactctgcctggagttgtccgagtaagcggtaagcaggtacttccactgtcccattacttagtccgatgaaggcgtgtgaacacacacacacacactcgcacgcacacacacacgctcacacacacacacgctcacacacacactcgcacacacacgcccagcacgcgtcgcccggggatgagatcggagcgcggcacaggagggagcccggggctcccggagcctcctggctccggcagacagaagcgggtgcccagccgaaggtgcgccaggcgcggctccggcccggaagaccccgcggactccgctcaccttaatgttgccgaagaccgagcgggcacagcggccggctcggctagtagaggtgtcgctgccctgggacgcgccgagcttgggcaggagccccatggctgcgggcggctggccgggcgcggagtggcgcggggtcggggcgcctcgggctggagcggccgggcgggtgagaggcgaccgcggcggcagtggccggaggagattcgcggagcggagactgagccagcgagtgcgcgcctagaagtttttataagtggccgccgccgatgatgaaacgcgctctccctcctccctcttttcctcgggtgtcaaaggcgctacgagcccccgccccgccgccgccgccgccgccgccccctcagacaggtgtgacgccgcagcgacccgcgaggcttgactgccccgagaagatcccgcctgccgggaggcggagagggagggaaggaggtggcgggcccggggaggggaggtgagggctgtgcgggggcaggaggttgcaagggggtggaggttcctggggactggcgaagagagggtgggcgaagcgaaggtgggtgagtggaggggatggagaaagaggttggcagggctggggggcaggaaggctgggatatgagggtgcccgaggcgggcgctggaggggccaacgtgagccgggggtggaggggagccccagcacccctcccgacgttcttggggagatttacggagccagtctctgcttgtttgcactcgcagaaaacctgggccctcagttccggtgatggctctgagactcgctgcagctctgtttgtgttgaggactgatttatatttaaactgctctttgcgctggagagggggctgggtaacaaggtgaaaaggtgggggctgggcccgaagtctctggacctgagccaaggtaaactgcaggggctgtcaagtgtcagcatggctgggtctggcctggggtgctggggggaggggtagagggggtggggggggtgtggacaaacaggacgcaccccactgacctccttctcagtgctggaatgaatagtgggtttattttttccccaagattttctactaacaggattccaagcgccgagaagagacagtgaggcttctcaagggaaggataagaaggttcttccaaaagcagctgcagtgaggaatccagctctggaggcatttttccagctccctcacttctgtagtcccgtgcagagggaacctctccaagcccaccccaaacccaggaaaagatgccgtcaatatccaggaggctttggctaagacaaaggccacaggatagatagaccacataggcttcttattctacccaagacctgatacctttctgggcctggtctggcctggcctgggcttgggggcttctatccacctgcgacccaagttccctggacacggcagcattccaaagatgttgaacagtgggcagcctctggcctcttcactcagccacagagcgaggtacatcctgacaggctttccacagcactgtagcagccccagccccagccccagaggaggcatgaattccaggtcccatctgtccactgggagaacatggcacacaaggacaggtaccagcatggagcacttggtgtgtgctgggcataccaggccctctgctgagcacccacatgcatgatttcatgaagccccaacgttagccctacaggtataggtactgatggagtctggactccacaaacaaggatgctagagcagtcggctaagaaagctgtctgaaagccacacagctagcaagtggtggagctggaccctgaattcagccttgtctgactcctaagcccagacttgaagcactatgccttctgataagttgtctagtccaacagccccattttgcaagttgaaccaaacagggaccagaaaacccccaggccaaggtcacagacaccttagggctaccatgcctggagcttctttctcaaaccctgaggcctcactgtgatcctctggtagaacccctgggaggatcagcctctccagccctcacctagtcctgttccattaacctggccctctgcctcccgt

SEQ ID NO: 7439 - DNA, 1335 bp, Artificial sequence
  DNA replication origin
gctcggggctgtgagcggctcggggccgggggtgggcggcggtgcggcgggcggccgacgctcctcttcggcggcggcggcggcggccatgcgtggggcggcgcggctggggcggccgggccggagttgcctcccgggggcccgcggcctgagggccccgccgccgccgccgctgctgcttctgcttgcgctgttgccgctgctgcccgcgcctggcgctgccgccgcccccgccccgcggcccccggagctgcagtcggcttccgcggggcccagcgtgagtctctacctgagcgaggacgaggtgcgccggctgatcggtgagtggggccgccgaggccggggcgggcaggtcgggccggctggggcagcttccggccgccggcggatcagtctgcgagccgtggacctcgggcgagtaccctccccgccccccgcgcccggattcgcctcgcggcccggtctctgcctgccgtgctggctgggaggtgtggtccctgcccggtccccagctctgggtcagccttcgtgccgccctcgctgccccgccgcgatagacccagattcaccccatcccatcctcctcactgcctccttagcccttctccctagaagagtcagtcacccttacaactttttttccttgctgcacgaagtttttttgacgctttctatgtgtgtcactctagggccctcgattttgaatatctcgaaattcacgttttagactgaacttgcaaaccctttgctgtggttttgatgctccagtagaggccacgctctgtgcttacccttttacaaaaaaaaaaaaaaaaaaaaaaaaaacgagagagaaagaaggggaggttataagggcaccaaatgttcgtggcagcctccaactcttgggacgtagatttggagcatatgcttagattctaagcatatttttagtgaatgaatcgccaggtagcagacctttttagtttcaatacctttttggtttttgcattgggtgtgttgggagtttggactgactctgtacttctgggccactctcctacttttgagtatcttgaagggaaacaagaacttagtcttgggtcggtttgtggttccatttacttgcttagctttgttgtttggggaattaatttgaaaaattgctggggtcttatgttaggactttgtggattctggaaatgaccccttagaggaagatctgacaggaacgaccccccaaaaaggaagtccttggtacctagacgtttgcattcttttgttattatggcagtatctttatttcatctgaaggtggtgcttctgagtgtttgaggggaaaaattattctctatt

SEQ ID NO: 7440 - DNA, 1977 bp, Artificial sequence
  DNA replication origin
ggtttttacctgttttcattgggagcaaataacaaaactaaaagcgatggaggagtggggctgcagaaatggaagcagcagtgtggggaagccggacgcttcccggggaagagggagaggggacgctcagatccaaaaggcgggctgggagcggagtggggcagccgccggggggcgcccgcaagggctagggctcggggccgggtttgggggcgggtaggggcgggcaggggcggggcaggagccggggctgcgagctggccgcggcgcaaggaatgcggcctttggctggtcccgggccggcattccggccggcgcaggaatgtgagcagggtgttcactgcgcgctctgagcgcacaagtttgttctcctctccttggagaacgccggcccgctctgtgccaccctctccccaagcccccggtacgtccgtctgtccgggtggaggacagggccccgagggccgcgaccaggagggactcgcaggaggcaccggacaggggtgcggcgagaccagtcgcgctggaggaaaggagggaagcccgcagtggtccgctgaggcactgagaaagccaggccagtagctcaaagaggagataggacgtgcccctctccatcatcagcctcaaggggcacagggttcagatcccaaaatgtgcccatttagggggcacattgtgaagggcaagacctggggagagaagagggaaagcggacaatctagtttaggattaggtgctttctgatcggccagggagtgactgaatacctaacagcatttaactcattcaacaaatatttgctgagcctctgctccgtgccagttcctgagattaattctgggggcacagaggtgaagtcatcctgtccttgaggggctgacattctgatcctcaagacagtctctgaaacaccgagggagagttgggggaagcccagggtgtgggggaacaccgaggaataacacagattgggggtggagatccaggagggcttcctgggagaagctgcagagtgacacggaagatcagtaggagtcagcccaaaagatgggagaagagtattttagacagagggaaccttatgtgcagaggaagagcctgtgctgcgattggcccccaaacagagcataagtctgctcctggcctctccccatgcctgccaaaggcccagctgagtcacagtaagggtcagggtgtccatctcagtccactcatgatgttggttggtctatggagcccctcttctgcgagaggcacagcagtggcccgtgaagagtgagaagagaatcaggactcagcacgctgctgtgggagtattgtggggactgatagataatgcccataagcatctggtgtggggcctagcacctagtaggcgctctgtgtacattggctggtctctcagcaccttgcctgattgactgactcctcttccccttcgtagtactgatttctggttccgaaaaggcagctgtccagctcttcatccctgcggaggggccttcccaaggggaagaccatgtgggtctggtcatggaacttcctgctttttgtccttccctgatttgggggtggtagcatgcaggacatgagactggcatggaagagggcatcataaagatcctggaatacatccagggcacccaatgctgtgggcaaggaggaattggagcagagaaggaccttgcttgcaggtgcagcatgggagattggcccatgggctgagaacaggatgaatgaagcaaggagggtcagggccaggaaggctgaacttgggcagtatccagaaaaggactaatgggagctcggagggcagggacagaaagcagagctgggaggttgtcactggggtggtagaggagatcagacccttcagctgattagctgaaaggtggggccaggactgtaaatctcctactagatcctcactcggcttgggtcagtatggatctgagcacatgaggccacacggga

SEQ ID NO: 7441 - DNA, 1186 bp, Artificial sequence
  DNA replication origin
ctgtatcttttaagaagatcagctgacacaagagggaaagccagggagcagtgatttgctgagcttcggtgctgaccaccagtgcagtgcattgggcagtgcgggaggcaaggtagccctgaagacagatgaggtgaaggagaaggacaggtctgagagcttcccagggagttcctggcaacagaaaggtcgggagtgtgcaatgggaatgtgagaggtaggggggcatggtggagctgagccatagcaagccaagtggaggcatctgaggcagccaaaaatgggatcctagaccttaaccaacagatgcattctaaacggggcggtctaagcatccttgaagaatgggcaagttcattgactagtccatttattcattcattagcagatgtgttttaagcaactggcagatgttcaagagagaatgggagcaggcccaggaaggtaccatggcagggaggtcaggaaggaagtggtgagcttaagaaaggagcaggttcccacagatgcaaaagaacaacgggggtggccctagaaaccggtgattaggagccccggtggcctgagagaggggctctgtggggatggcaggggtggagagccagccagaggtgaaggagctattgggcagttcaagaggtacatggggtgggtggcaaagggagccctgagctcagcagcaggaggctctagcaatcagaagagactaagaacagttatttattgagctcctactaggagctttagtgctgttcaaggtgtttgcagagaagtggaatgggagtggttggtagctgggtaaacatggctttgagtcttcacaggaaccctactgtgaatggcacaaagggtagtgtggggtgcagaaatggaggagcagcttgaggacttagctctggctggcagcacccctatcttccttcaaagagggttcaaagactagggcagggaatgggggaacacagcactgaaggaattgacagggtggggcaggaggtaggctggtctcttctggctgggtggggtgagatggcagcggcttaaggtctctgggaaggagtcaaagggaaggagggagaaaggggagggggcagccctggggtttccctgaggagtctggggaggagaagctgcaagggcacggcagattagggtgcctgtggaggaaggcggacttctggagcct

SEQ ID NO: 7442 - DNA, 784 bp, Artificial sequence
  DNA replication origin
cgggcacactatggagcgcctggaatctgtcaggaaggctccgcattccttcctgccgctcccctgccttctctgtgggagtcggcccagagagtgattatcataggaaatgcccgcagataaaactccagggcgaactgaatcccatacgaattgaatcccatttgcttgctttgcctcgggtagctctggagtcttgcacatctacccctcgttgtgtgtggggggcgcatgactgggtgccaggaaggatgggtacagaggtgccctccagactcatcccccactccccagctctgggcagctggagtactggggtggggagagggaaaagatcgggaatggctgctctgccaacatgccatagcccaaactgaagcaggacactagggctagtttagtggcagaggaggggccacattcctcccacccacccccccaacccctgcccatacacacaggacctgtggcagtgtggattctgtttagttttccctggatcccagtttggagatttgtgttggaagaggctgtggaaaggaagctgggtgagagaggcaggcagatttccagtccatgaaccactgggagcccaggcttagaagggaactcctttctccgatataatctcccagcactttaggctcacagtcccctctcccctgccccaggtctctcaaccaacagcctccccttacttctccagttggcccaagtcaagatgggcttccttgacactgatgtcaagaaagatgctgagtgcccatcccttatgtgcctagag

SEQ ID NO: 7443 - DNA, 1032 bp, Artificial sequence
  DNA replication origin
tcgggttgcaggtcggcgggggtgggggtggcgggggacagggatggaggcgccgcttggagctcaagttgcagggtcctgcgggctgatttggttaggtgggggttacaggtgcctttgcccccaactagtccaagaattcctctttgtcttccttggaaaatcctctctggagccacgaattggccctcacttagaaagaatgcagcctgctgtccagcccggtgacgtcagcgttagagtatttggaaaacaaagagggctcgagagggagggaggcggacccgcgatgcttaaagacctctccgggcctcgggctaccctcaccggctcgccccaggcgtaccagcggccaccggtgctccaggtccgcccgggctcgtggtggggcgggagccctggctggggtgccagaacctcctagcttggagactgtctttggttccttaggcgagcaggagcccaggccaaggctggagacgcgcgctggcttagaaaggcggccttcagagagcgcagcgggcgagtgcagcagaggttcgcggccgggggcgcggaagcaggtttttgtaaaggcccaggcgtttgatgtctgaaaggacgtgaatctgaggggcttggccgggacaaattcgcgatgagaggccttggagatgttccttgctcccagtccgggcacactatggagcgcctggaatctgtcaggaaggctccgcattccttcctgccgctcccctgccttctctgtgggagtcggcccagagagtgattatcataggaaatgcccgcagataaaactccagggcgaactgaatcccatacgaattgaatcccatttgcttgctttgcctcgggtagctctggagtcttgcacatctacccctcgttgtgtgtggggggcgcatgactgggtgccaggaaggatgggtacagaggtgccctccagactcatcccccactccccagctctgggcagctggagtactggggtggggagagggaaaagatcgggaatggctgctctgccaacat

SEQ ID NO: 7444 - DNA, 867 bp, Artificial sequence
  DNA replication origin
ggcggtgcgctgagaggttatttgtggttcgctttgatcccgagggggaacctgaaactctcacattcctggcatagcagccgcctccggcgcgggccgaccctggggctgcgcgctggggcgcgaacagccagagcgtcggcgccacggccgagaacacatcttcgccgccgagctgagctgggccgagccggaggttgtggtgtctgactgcgctgggcaccctcgggccgcagcggtaaggaaggccgctcggcgctcgggagagcgcgcgaggccacagaaacgtgccccagccaaagctggagtctcggcgcaacccggccttttccgggagtcggagcctcgaggatcgagcgtcctcggggcgcagtgcgccctttcgaggcagccgcagtgcctggcaagggccgctctgcccagggagcgcagcgcgctgggctttgcggggctctagaaacgcgcgggtctcttggggctgggggagaggggagagggccgactccggagacaacagccacagtgtttcgggttgcaggtcggcgggggtgggggtggcgggggacagggatggaggcgccgcttggagctcaagttgcagggtcctgcgggctgatttggttaggtgggggttacaggtgcctttgcccccaactagtccaagaattcctctttgtcttccttggaaaatcctctctggagccacgaattggccctcacttagaaagaatgcagcctgctgtccagcccggtgacgtcagcgttagagtatttggaaaacaaagagggctcgagagggagggaggcggacccgcgatgcttaaagacctctccgggcctcgggctaccctcaccggctcgccccag

SEQ ID NO: 7445 - DNA, 1128 bp, Artificial sequence
  DNA replication origin
tttccctccagtgaatttgggacttgcaaactccatgctgatgggaggacccagccaggggtagaaatcagccctgactctctgggtggacaggggcctgactgcccccacctcaccccaactgacttgtagagagggcttgtgtgatggggaacggggacagcatgtgtcagagcgagctttctgaagaaggggtttccatctagcagtggaagtgtcctgggggcagaggagaggattccatgcaggagccacagaagtgggtacaggggaaagcccctggctggcaggggtgtagggggaggtaaagaagagactaaagcaaggacagggtaagtggagagaggagggctcccagtgtctgccctgtccatctagggagcctggattctgatagccagggaggggttttgagaatgagaaaccaagcagcccagtggttgattacctggttctcactgtgtgtgactctgggcacgctgcttaagctctctgagccctggtgtcctcatttacaacacagggatgataacagaactccgttggagggtgcttggcagggctgaatcggatgactgggcgaaaagccagcggtggcacaccttgcactctgcgtaaaggggcgcctattatcaccttggggaagaactggacagagcgcctggcggcgggtgattcagttgggtaggtgggtcaaattgaccggattttccaacccagattcacacttcctgtcgagacggtcgtaaaatagctggcgaaggtgtttgtaaacaaaagtgcattcaaaggttgccgctgggggtgaaaacagcgggggttaggggaaagaggctctgtggctggaagcattcacttagcccggggcactgtcccagcccagaggatatggatgtctttgcagtccctcctccctttcccacctcccccggtacacacacacgcacacacacacacacacacacacacagccggagtcccctcccgcagcaaccccaggacacgcgtggtacagcccttgctgtcgtcccgtcgatgggtttagggatgaagggtgagagcgggtcggcgactgggagtggaggcgataatgggcagagttggattaaattgtctccagcagctccg

SEQ ID NO: 7446 - DNA, 1147 bp, Artificial sequence
  DNA replication origin
gggctgcagctctcgctcccaactccgactcaggactctaagtgcctgccccgcttgggtctcccagacccgggtggcttatgatattgagctcatcagtcaacaccagacgccacttctttctaaagtctgctgtgtacccgatcgcacactcggttttggcccccgacacgggcccagggcccttgggggctccgcgcgcaacggaatgggccagcttcagcctgcgcagcacaatggtccgccctccccggctggcgcgtggcccagcccggggggtttcagtcgcttcggagaattcacttattgtttgcagggctcggcggccgccgcctgcagccggcgggctgcaaatctattcaccctgcagcctggcgtccggcgctgccgcggcgcgtctcccccgcgcacctgcccggcgccccctcccttcctgcccgccatctgtcgtctgagagccattgtaagcagccgcgcctggcgtcctggacgacacccaaggggacccggggcttaggcctggcgagaggcaaacaaggagggtttattccagtcccgtttggaggtgaccttaagcaaaatagccaagtctgagggcatccgcctgctccccggacctctggcttttagcgcagggtttaggggcccctcctggacgcagagtcccagggttcacaatctgagccggagcgtcctgcctgggcgttctgggatgtaatctggcctagaggagccctgcagcggccgctcgcctccttgaagagccccgggagcccgtttcaaatgcagatgttggttttgtctgcctgcacgtctgatcctccgaatttatacccattgtccgggcctcttgggatgctgggttgaaagaagagtttctcttttctgaaatggcaaatgcagccctttcaagtcctaccagccagcctgctgcccccagaagtctgtacccatatttgttgaatatcacacaccctcctttcatgtcagtggaaagttaaaaatgttttaatatatcccgaccgaaaagaaaataaaacaaagctatggtcattgtggagcttgcctttcaaactacaaccttgatccgcagattcgaatcctccctccttcctaggtatctatctccccagcctgtttgagaacc

SEQ ID NO: 7447 - DNA, 895 bp, Artificial sequence
  DNA replication origin
ccccaagggccctgggcccgtgtcgggggccaaaaccgagtgtgcgatcgggtacacagcagactttagaaagaagtggcgtctggtgttgactgatgagctcaatatcataagccacccgggtctgggagacccaagcggggcaggcacttagagtcctgagtcggagttgggagcgagagctgcagccctgccctgccactcggcaggaggggtggggtggggggcagtcggtgggctccctgagctgctatggagagggctcaccttcaccacgtccctctggttgtcaggcttttacaactactgtgatgggctgtatcccctctttgtgcttgatgttttattttaaacgaaatgagtcagaactggtaaggccggtggcctgaaagcaagccctttctgatcatccctctggcctgaagctttcctgaggccaggaaggcattcttgggagtcctcagttaagtgtagtgttgggcccttagggaaatcatctgcatcttctggagacattgagcaactgggcgagtccactgcagatggaggcaagacctcccggcacaaagtgccagactgtgtgttgctgaagagccaatggcagcccgagtgaccagggctgtgaatgttgaaggtctgtgtgtgtctgtggctttgagaagaataggtgtgctagatgggcctttaagaagtgccacagtgaccttcctcccctcacccacacattgttgtgtaaatactacacaacaaaggaaacaaacatgcggggctcttatttggggagtaataccctctagtaaaggcagattgggctccagaccctcgctcacccagatgcctttatggaggggttgcctcctgcaaggaatcccttatcgtggctgcaattcctgtc

SEQ ID NO: 7448 - DNA, 1602 bp, Artificial sequence
  DNA replication origin
ggcacctagataaggggctggaaagctgccaggctctaggagagtgccgtggaggggagaggggaggaggaggaggaagaggggactggaagagccgtggactcccatagaggtctgcaggggtggctagtcctttatttcaagtcttcccagtcattcaacacacctttggcaagaaccctctgggtgaggcaccacaaccaggcactaagacgtggcaggaaatgaaacaggctagccccttcaccacagagcccacaggccagcaaggagttcggacactacacaaaaatgatcacatgatgaattacagcagtggaacgttccctgaaggacagccagggctaggagagaagctgccagggaactcagcctcagctgaggggtccgggtgggctgctttgccacggggacattaccatgaagccttatccaggtttgggggaagtggtggggagggaggagagggtaggaggaacctgaggcatgaagggttgtggccttggaggatctgagagagtgcttgatactggcgaggcaggaagagacaggcttctccacgggtctccagcttgagggctctgccgtgagcccaggagtagccaggtggacgttttcaaaggagccctggggctgctgtgtggggtgctgggtggtgctccacaatcaaaggtgaatctcagggggatctgggcttcactgtgcagaaaagactcacagccagttgtgagatggaacaggaccaggggccgtgagcagtgaggagctgaggtagcttctgcccactgagctggttcagaagtgaggggagaggagggttttcaccaagaggggatagcaactctattgatcttggtcactttcctttggaggttaccatgggacagatgtggcatgcagtggctgaaggcagtagagaaagcatgtagacaaataaaatagcatgaaagcaccaagagtcacacaatttcagtgtaacagaaggggaagcaatggcattggagttaagcagtgctcagagagtgggatgagggccagtcctcaaagagtgggggtcgcaaagaggggagagtactcagaggaaggcgtggaggccagcagcctaggtcctccaaggtctgagaggcctcgttattaggaagtcactggagggtgggggcagagggaagtcactgcagtgccagagagctgaccggcagaggggaaatggaggcagtggggggatgtgtgggagtgtagggcaggtgcggagtgggcagtatgtgacagggttgggacagcttttgagctgggacagccacgaagaaggtagaggggctgtctaagcagcctccccatcatgctggcccatgtggtcttctcccattcctgaggtgggagttggcatggaatgcagattcaatgagaagtctattaaggcctttgtcctagagcccaggcacagtgttctgcctcccctaccaagagtccaagctaggggaaagttcctagggacatggatcagacagcctctctccttcctttgcactcaactgtgaacggggctggggaggttgctggggctgggagcagatgaccagcttctgagagaattaagaccag

SEQ ID NO: 7449 - DNA, 1792 bp, Artificial sequence
  DNA replication origin
ggaccgtggatgcagatggccaggaccattataatcacagctgtgctcacctctgaagtgcatgagctgccatgctctcatgcctctggccctgagcatgtctcaggtgcaggtgggaggagcagatgaagagctgaaacactagggacatatggaagtcattggagccaggcaggagcttcagcacagagagtctgataggaggaacaaggtgttgaacacttttgtgaagtcaggacattaagtggtcttaaaaaggccaccttataggtactcaggaaccttgtttgttgaaataatgagtggatggtgagtgcatggatcaagaaagccagatgagaagcaaagacataagttgaggacatccttctgtcctggcagaagacatgacctggattaagtggagacattgaggaaacagaggagtggaaaggccaatcctgagctaggggcagaggggaagaactctaacaccagtgggtgtggagtgggtgggaggtgggggagaggggctcccagatagctggattgactcctggagggtgcatcagtacctcctcacgaggagcaagggagaaggagcaagttttaggggatgagtgtgtttgggatatgaggggctctagtgtctgtggcacatccaggggaaatgccccctgggcagccaaatatacaagcttggaaaggtctgggctggagacactgattggtagtcatcagatttcgttaagagctgaagccataggacgggcatcatattgcaggggtggaggaagcccatagggcctggagccatcaaaggggctggggcaaggccaggaagggtcagagttctggaaggtccagggaggggctccctggggcagacgtggtcaacagcgtgagctgtgctatctgctcaagtgagatcaggacagacgccatgtcggctactgcagcatcaaagtgcaccttacctccagaggggcagtgcacaggggctggaggcctcagtcctcaggtgggtggaagagcaagcaggaggtgagtagtggggagtgaggagaagatcccacaggagcctgcagagacggggaggctagacatgagcagaactgaggagagtaggggggcatcctaaggtgggggaacaagggggcatggagcagccaggaaaggaagggaggaggtgaggacatacgagaaggaggccattgattgaagaagggaagtccctgtaaaggcagaagacctgagacatagagaaggctgaagcaggaggggaggatgagactcttagtgaggaagtcccacctggcctgccgtgaagtggaggccaggccattacctgtgaatgaggaaagtgggtggggtctggagtctgcaaagggcccagatttttgtaatggccatcggaagggatgggtcaggctgctggccatactcagagaacagtgccaggaagccagcggaggccagagacccagccacagagcagggagtggccagagcaagccaggcccaggtggggccaggaggtggggaccaaaggaccagaagccatggcactgaagtagaaggctaagtcaggactccaggctgcagtgcaggcctgcaatgctgagtaccattcggggccctgggagagggacaaggacaaagtctgcggtgttggagctggacgtagaagaaaatgaaacagaaagcagctgagagagtagaacaggggtccagaggtctccagaggtcagagtgccagtgtgctgggccagtggtcagcaggtgagtcctggaatctcttgtgagcagtgag

SEQ ID NO: 7450 - DNA, 983 bp, Artificial sequence
  DNA replication origin
tggagggattaaggggagggagggaagctggactgtcattcagagactctccagttgtccaggggaaggtagtatgggtttacactgggtcagatgcacaggcataggacaagggcataaggaggaggacatggcagagccggggctttgccagacatgcctaccaagtgactgtgatatagtgaaagggggagggaagagtgtgaaactcacccatccatccatccacctgtccatccatgaggggatggctgggggtaaaaaagcaagtgaagctgccaaggagttgcccatgtaccccaggaggacgaactccaaggatggagtttgggggatacctctcttgaaagctgaagaggtaacagagggaacagtaagaagtggcaagacgggtaggaggagaagcaggaccatggaaactggggccagagccccaaaagatctactggacaccaatgtcagcaggtgctgacggtgcaggaggatgacagctaactaggagcaggttgttgcccagggtgacatcaggtggctccagggacatcacgacacagctggtggtgtggaggcgtagagggcagctaacatggcattaaggtggatgatgagaaggtggaggttgatgacatcttcccttcaggcacagaggtggggtaggagggaggggaggggaggaggaaggcagcctgagtcagagccagggaaggaaagaattgtcaggattgggggacttgagtctggctgtggtggagaggaagaagtcccagcaaaggagagactagacacgcagaggtggggggtgtggggaactgatttagaaaagcccagaaaggagagtcatcccaaagggaaatatcgcatctgcccactgttagctcattaacagaccaggggaaaggattggtgcctccaaggtgagaggcgtaggaggaggggtggggaacctaacgggtcatccctgaccctgtaggaccagactatca

SEQ ID NO: 7451 - DNA, 877 bp, Artificial sequence
  DNA replication origin
gaccgaggctaccagggagtgccggggcgaggaagccgggggactcgcgagccagtttcgggcgctaagagccagccgggggcgctctggtgggtgccgcccaagccccgcgctcggcagcggccgaggctcccaaacctccttgccctcgggtcccgggatgcctgcaccgcaaagcagccagaggaaccccgcgaaccgcggagcacagcagtcccaaggcggccggcaccagcagccaacttgctccgtggagggtacgttaccttccatcgcagccactgcggatgccaggaggagcagtagtagataatccagggccatcgccggccgacggcccgcaggccgagaccaagccgaggcagcagcgccgggagagcgccgcgtcccagggcgccgctgcgctctccgcgggtggcttctcggtatcctttcgcgctctcgcccggaccggacttcccggagcgctgcgtgggcgtgggcaggagtgtgtgcgcgtggggcggtgcgggcgcgcgtgggtgtgggtgtgcatgtgtgtgtgtgtgtttatgggagaggtgggtgtgtgcgtgcgtgtgtgagagagagagggcgagggagaacgagcctgggagagcgcgcgagagcgagtgcgtcctggtgtcacattgctagctacagcggagcctacgggaggacggagccggccagactgacgcgggagggagcgggatcccccaccatcagctctctccccacccctaacacctcctgtccaatcaaggaatcaaacctgcaaaattcccccggccaatcaggcgcgagcacctccttacactggcattgttagtttaagaaaaacttttgcttgcaaggctgtgcgggagggctcgga

SEQ ID NO: 7452 - DNA, 973 bp, Artificial sequence
  DNA replication origin
cgcccgccggcggcggcccgcgcacttcctccccggccttcccctccgggttgaggactcccgcccgcctcgccacctcggggaactgcgggctgcaacccacggggcggagagccagggcgcagtctgggccccgcgtccgatatggagagcgcggcggcggcgtccgccagccgcaacatcaaccttcgtcgccgccgcggcgtcttgcactagatccgggaagccgctgcccgaccgtcgtccttgccgtcgccgccgcctccgcgccctgtactgggatggagtaagaggccctgcagcccgggagaagcgtgccgcgcctcagacggggccggggcctgctcccgcgcctgccagctcgacttgaggaggcgcctccgtgtccggagatggagctcgagtgcaggccgcctgccgagccgcggggctagactgagctccgagtcccgccccgagcgcccaagccgccgcgttctgcgctctgtggtcgctccggacgaactcgaacgctggtttctctctcatatttttggtctggaagtctcagggacggaggggcgccaaggccccatgtgtgggaggattgtttcagctccacaaacttgcacggattttggttacttgtttggccaatggttcggctctgatttcttccgaattgttgcaaattcgccatcgttccctggctgcttactaagttggatccggaatttcttttcaaccgggagccattggtgtcgaagtgtctgcaatgaaccccgtgaatgctactgctctctacatttccgcgagccgcctagtgctcaactacgaccccggagaccccaaggcgtttactgagattaacaggctcttgccttacttccgacagtccctttcgtgctgtgtttgcggtgagacgctttttattgttcccttttcaatgcttgtttttaaaagccttctgggcagtggtaacgtgagcgggttg

SEQ ID NO: 7453 - DNA, 1034 bp, Artificial sequence
  DNA replication origin
tcgttttgtttttaaaacaggactctgttccggtgagagctcggtgaagtcctgatcggcacccatgaaggtgaggccgcacgagtccaagggccagaggccgtgggaacagcgcgggtccgacgggtaggagggggcagtgggttcgagcctccacgcttacatacagcctgccagggccttagagccctctgactgcgaaccaccgcagagaggtgcggaacgcggccccgacccggcaaaagccgtccgcacgcctgctgggcgcgcagccacgttgactactgcagccttcccggctcggcgagagcctgccagccagccgaggctgcgccctttccgcggtcgggatgagcggttccaggagaaaggccgcgagggcggggcttggggcctggcgcggctatttcctcacaccgcggtcagtcaggacgagaggccgcgttcaggccagtgcagagcgccacatggcgctaccaagtcgggccccggcgttggcgggcacagaagcagtgtaatgcgggaagcctgcagcccacactggggaaggatgtgccagctaacgaatgtttcaccacagcccacatgcctgggagagggaatttgagagcacgtgggggaggggcgaagagagctgtcggctcgcagagagcatgctccattctgagagtcgaagtggagagccaggcatgcgcagtgagcccagggtgggttggcagcggtgagggactggcgcgagcaggctgatgtgtttatccggttttctgggtgggcggtcaaagcgcacgcggaagggcgaaaggcggcggagctaggtagcagcttgcgcatgcgtggagtgagccggtagctctgggaggctgtggagggggttgttagaggagaagcaagggaaaagggaagcgaagggagaggaaaggggggaggggtgagagtgtgctctgcgcatgcgtgcgagcgctagcgacgacggcggcgggggagtctcggggatgacagtggctttgcccgttggggtaacggtcgtcgtcgcc

SEQ ID NO: 7454 - DNA, 1278 bp, Artificial sequence
  DNA replication origin
tgtgcggggggctgacccccccacctccctcctggtcggggcggctggcctggcggggggctgacccccccacctcactcccagacggggcgactggccgggcggggggctgactcccccaccaccctcccggacggggcggctggccgggcggggggctgacccccccacctccctcccggacggggcggctggccgggcggggggctgacccccccacctccttcccggacggggcggctggccgggcagaggggctcctcacttccaagtaggtgcggccaggcagaggcgcccctcacctcccagacggggtggctggccgggcggggggctgacccccccacctccctcccggacggggcggctggccgggcagggggctgatccccccacctccctcctggacggggcggctggcctggcgggggctgacccccacttccctcccggatggggtggctgccgggcagagacgctcctcacttcccagatggggtggctgccgggcggaggggctcctcacttctcatatggggcggttgccaggcagagggtctcctcacttctcagacggggcggctgggcagagacgctcctcacctcccagacggggtcgcggccgggtagaggtgctcctcacatcccagacggggcggcggggcagaggcgctccccacatctcagacgatgggcggccgggcagagacgctcctcacttcctagatgggatggcggccgggaagaggcgctcctcatttcctagatgggatggcagccgggcagagacgctcctcactttccagactgggtagccaggcagaggggctcctcacgtcccagacgatgggcggccgggcagagatgctcctcacttcccagacggcgttgcggccgggcagaggctgcaatctcggcactttgggaggccaaggcaggcggctgggaggtggaggttgtagcgagcggagatcacgccactgcactccagcctgggcaccattgagcactgagtgaaccagactccgtctgcaatcccggcacctcgggaggccgaggctggcggatcactcacagttaggagctggagaccagcccggccaacacagcgaaaccccgtctccaccaaaaaaatacgaaaaccagtcaggcgtggtggcgcgcgcctgcaatcgcaggcactcggcaggctgaggcaggagaatcaggcagggaggctgcagtgagccgagatggcagcagtacagtccagcttcggctcggcatcagtgggagacc

SEQ ID NO: 7455 - DNA, 985 bp, Artificial sequence
  DNA replication origin
gcccccgccaggccagccgccccgtccaggagggaggtggggggatcagccccctgcccggccagccgccccgtccgggagggaggtgggggggtcagccccccgcccggccagccaccccgtctgggaggtgaggggcgcctctgcctggccgcacctacttggaagtgaggagcccctctgcccggccagccgccccgtccgggaaggaggtgggggggtcagccccccgcccggccagccgccccgtccgggagggaggtgggggggtcagccccccgcccggccagccgccccgtccgggagggtggtgggggagtcagccccccgcccggccagtcgccccgtctgggagtgaggtgggggggtcagccccccgccaggccagccgccccgaccaggagggaggtgggggggtcagccccccgcacagccagccgccccgtccgggaggtgaggggcgcctctgcccggccgcccctactgggaagtgaggagcccctctgcccggccaccaccccgtctgggaggtgtacccaacagctcattgagaacgggccatgatgacaatggcggttttgtggaatagaggaggggagaaaggcggggaaaggattgagaaatcggatggttgccatgtctgtgtagaaagaggtagacacgggagacttttcattttgttctgtactaagaaaaatttttctgccttgtgatcctgttgatcagtgaccctacccccaaccctgtgctctctgaaacatgtgctgtgtccactcagggttaaatggattaagggtggtgcaagatgcgctttgttaaacagatgcttgaaggcagcatgctcgttaagagtcatcaccactccctaatctcaagtacccagggacacaaacactgaggaaggccgcagggtcctctgcataggaaaaccagagacctttgttcacttgtttatctgctgaccctccctccactattgtcctat

SEQ ID NO: 7456 - DNA, 1642 bp, Artificial sequence
  DNA replication origin
gtgctagcaaagaaatcagaagaccagcaaactaggtaggtgtagatccggggaagtgtcttaaaagaaagggaaaaagggtttcaagtaggggatggggattggtgaaaaccgtaactgtttcttttgagaatgtgtcaatgaaaggaacgttgatagcatagcaactggagggagtaacatcactgaattaaaaaaaaaaaaaagacaaaagaaactttttttttttgagacagagtctcactcttatcgcccaagctggagtgcagtggcgtgatctcggctcactgcaaccttcacctcccgggttcgagagattctcctgcctcagcctcccgagtagctggcattacaggcgcacaccagcacgcctggctgtttgtatttttagtagagacagggtttcaccatgttggccagggtagtctcgaactcctgacctcatgttatctgcccgcctctgcctcacaacgtgctggtattacaggtgtgagccaccgcacccagccaagacaacagaaacttctgagaaacagaaaggaagaagacagtggataagaacatatttacattataaggcgctaggaaagtagtggtggaaggagaaggtgggaagggatggcatagtttcaggcagagggagtggctttggagagaagggttctgggttaatttggttagaagttttgggatcacgaacaggaggtggtcacagatattttataatggaggcaaggtcaaaccggaattggagtcccatagctctgagcccaggaaactggatgaatttatctattagtatggactgggactggcatctttaacaacatggaaagcttgaaacagtctttgtggaaaataggagatcagccagagattagaagaaaacgcaagaaaattataagtaggagtccagtcacgaattcatatccaatctggtcagttatgacttcctccagcgaaaagccacacatcttgcaaacccttgagagagaaaacacaaataggggtaacctactggagacaggcccttaagactataaagtagttgagcgattccatactgaaatagagttggctatagcgatagagaagttagtcatatatggggctaatgatccaggagagtaaggattcacttttgtggtgaaaagttgtaagcaggtgaaaggtagggatccatggccacggacgggcaggtggagatcagggaagaggcgacgttaaacataaatagtttgttaatgatttcaccttactgattatttctcttttggcatctagaaggctaagattctcatgtgtatttcagagctactgaaagtagtcctaggttgtggagggagaaatccactttcacagctgagtctatcttctcagtctagttatattctcctctcacaaactagccaatgctgccgccttatgcaaagccgacaccacggaaagatgtgctttacagaggcaggatgacgccaatcggcctagggccggcggtgtttcgtctagattaatggcgagggaagtccccaatagtccttttgaaaccttttcactcttgcctggtgaaagcgcttgtcagccgtaaatcgcgaatacaatgctaagctctgaggcccttgctaaatccaagtaggagcag

SEQ ID NO: 7457 - DNA, 1610 bp, Artificial sequence
  DNA replication origin
tttgtttattttgtttttgttttgtttttcaaggggatggggaaggaatcaaagtagtcaaatcagtttggttgtttttacaagcccgagaaatggtcaaattttggattcagaccaagcacaccatagtgtgctagaggcaatttaatgacttcctaccctcttgcctttttccccctctttgggaacattcttggattttctacagaaacagccagaggctctcaattgacaattgcctcactcagcagtttcttgttaagcacacttgtcagacactgtttccaggactctcttaagtgtcctaagaatattgactcattcaaaagcagcccagctgtagttgggagagcaccagcacttgctctataaagatctagattgtctctctacctcaagaggaatccaaaatcctgttatgctggactctgaaatgatccccagccctttggtgatcacactgtttatgagcagtctgaattccattcttgggtctacctaaactagcaccctcgggctatggggcccagtggggagaccacctagcatgctggctgcctggagcccagggaactgtcaagatggctctggaagacttctcgccttttaaaagccccgtatttcttttacatatatttttgtcctcatgaattttgccaaccgcaatggactaaaatctattatagcgtcctggaaaggtggggaaaagatgggatagttgaggagagtttaatgaagggactatttaaaaaggtgtggatggggttaaaggaaacctctgggcgtcattacccactccaggcctgaaggggcaagggtagttagtggtaaccagaacctggagaaaactgcaggagagggccacaggatgggagtaatggctttcagatgaagaacatagccactgctaacagggtggcccgctggggatgcaggggaggtcctgaatcacatcctgccttctgatctgcaggtgcctcccacttgccaaaaccaattgaaagccagattatagttgacgtagcccataaaggtcagtcctgagtcacagagcagagtggagagtgggtctgaagggacagaggaaaaaccagcaagcacctcctgttttttcccacagccagcaccttggttcagcccttaccctttcttgcctgtcccctggacccatcaaatccactgcttttaatgaccagtctgtttccaagaggctatattcattccacttgggactggggcatatgcacttgggtagaagaaccagctgtgcagtgtcaagacccttccctcagagaccttatcagtaaaatggcgggtggactcggggatgcccgaagacttttccggaccacgattttccgatgctggacacatatttaaacatgaaggaatagacttgcgacttttaagcgcaaacaatgggtggaaatggacagaaactgcctccgtgcccacttgcagcggactacgtagccctggcagacaggcaattgcttcaaacaagcgccctccaagggcgtaagctagaggggcccgggcgggcgctttcccgtggaccctcccacctcgcgggtagaggaagtccttcagttcaggcacaaccctgagcg

SEQ ID NO: 7458 - DNA, 1418 bp, Artificial sequence
  DNA replication origin
caggagagacttaacagcaaaaatgactgtgtcctgagttcagcccccactgctctgggagcttccccctggtttctgcacctgaagaatgtcatcccagccgaaggttcttaggagcggggagcgacaaagaaaaacaaagaaaagcagacctgaaaattgggacctgggagaaatgtaagacatgtgcttaatttgaggcacagaccaaaagaagctgagtctgagggccctctaaaagtgtcctcgtgcttgggcagcttacattcttggcggcagtagtgttatgaagaggaccttcggagccaggtctgtccattcttagggctccagccactggctgaggcatcagtaagttggttcttcccctcgccggtgctgcaggcccccttccccgcccccgcgccgtaacctgcctcttttttttttttttttgaaacgagtttcgctctgtcgccagggtggagtgcagtggcacgatctcggctcactgcaacctccgcctccgggttcaagctattctcctgcctcagcctcccgagtagctgggattacaggcatgtaccaccacgcccagctaatgtttttgtatttttagcagtgacggggtttcaccaggatggtctcgatctcttgacctcgtgattcgccagcctcggcctcccaaagtgctgggattacaggcgtgagccaccacgcccagccgcctcatctcttcttaaccatctttgtggcacagtttaggatcgctcctcagggaagcttgctcagttaggtaccttccttggagcacaggtgttttctccatccgagctattgaaatggtttgcctgtatgtctacctagattgtaaactccgttgaatcagtaaccatgtctgttcagtttctccctagggccttgcagtagggtagatggtcagtaaatactgtttaaggcattaatactttttattttaatcctggccctggatatcagcctcaaaagtttgcagttttctgcatttaacttcaaaattatttacgtgattggtaatgcatgcatgtggttggcctgtgctgtaatttagatgtttgttcccctaaacctcctgttgaaatttgatccccaatgttggaggtggggactaatgggcagtgttgggtcatggaggtggttccttcaggaatagattaatgtcctccctggggagagggtaaatgagttctctttatttccaccagagctggttaaaaagaacgtcgcacttcctttcttcttttgcgtcctctctggccatgtaatctctgcacacaccagctctcctttgccttctggcatgagtagaagcagtcttaggctaccatcagatgcagatgctcagtcttgaacttttccagacatcagaaccataagccgaaaaaccttttctatttcta

SEQ ID NO: 7459 - DNA, 908 bp, Artificial sequence
  DNA replication origin
cataggggaggatgttttcctgaagatgtatctgtggtgttcattggctacagcatttggcatttatttatttatttttatttttatttatttttttgaaatggagtctcgctctcttgccaggctgaagtgcagtggtgcaatcttggctcactgcaacctctgccttccgggttcaagcaattctcctgcctcagcctcccgagtagctgggactacaggcacacaccaccatgcccagctaatttttgtatttttagtagagatggggtttcaccatgttagccaggatggtcttgatctcttgacctcatgatccacctgcctctgcctcccaaagtgctgggattacaggcatgagccgctgcacctggcccatttttgcttttattctgggtactttggctgcagcgttagtagtatatgtgatttcatcagtgggttagggtacagttattggagtctgtggtgaagttgtgctgtgggatgccagatgggctggtctacaggccccaattgtggcagtggtggtctgagtatgcctgtccgtgtttcccagggttatgtatgcgggcactggtgttggtggttaccagaatgctgatcattgggcctccacatggcttgcttggatgctggcagtggtagtggtggactgggcaaggaggtgggttcttggggccctggacagctagcatggcacaagtgatggcagtagcagtggcaggataattatctgggttccgagagttgtccttttatgatggcagtgggtgtgacagagtgtgtaggacagtctccaggactgcaggtggtacttgcaagtaggtgccagttgaggtgatggcagctgagagtttaggcccaacctcaggaccccagaaggagtactaaggtgcccaaggtgc

SEQ ID NO: 7460 - DNA, 1191 bp, Artificial sequence
  DNA replication origin
ggagctgcgtgccagtcctgcgccctgcgtccgcactcctcagcccttgggtggtcgatgggactgggcgccgtggagcagggggtggcgctcatcggggaggctcgggccgcacaggagcccatggagggggtgggaggctcaggcatggcgggctgcaggtcccgagccacgccccacgggaaggcagctaaggcccggtgagaaatctagcacggcgccggtgggctggcactgctggaggacccagtacaccctccgcagccgctggcccgggtgctaagcccctcattgccggggccggcagggccggccggctgctccgagtgcggggcccaccaagcccacgcccacccggaactccagctggcccgcaagcgccgcgtgcagccccggttccagctcgcgcctctccctccacacctccctgcaagctgagggagccggctccagtcttggccagcccagaaaggggctcccgcagtgcagcggtgggctgaagggctcctcaagtgcggccaaagtgggagcccaggcagaggacgcgcccagagtgagcgagggctgtgaggactgccagcatgctgtcacctctcacactgaccccagggaaggcagatttagcccagaacatgccccacccctttccaatccaagaccagtgatcagggtggcccttctggtcctgcagtatctgggtctgaaaggcaagtataactccatcaccagtaaccagggtgtagagactatctgtgtgggcccttctgttcttggtctgctgatgggaaggtatccacaagggctgtgggcctctctgctggggaccttgcaatatggaagatgatgtttgtacttatgctgtaatttctagagttgattattggaatctgtaaaaagcctgtgggctgggcacattggctcactcctgtaatcccagcactttgggagctcgaggtgggcgaactgcttgagtctaggaattagagaccagcctgggcaatgtggtgaagtcccatctctacaaaaaatacaaaaaacattagctgagtgcggtgatgtgtgcctgtagttccagctacttgggaggctaaggtgggaggattacctgagactgagagttcgaggctgcagtgagccatgatagtgccactatacactccagcttgggtgacagagtgagaccctgtctga

SEQ ID NO: 7461 - DNA, 884 bp, Artificial sequence
  DNA replication origin
agtgaggagcatctctgcccggccgccatcccatctaggaagtgaggagcgtctctgcccggccgcccatcgtctgagatgtggggagcgcctctgccccgccgccccgtctgggaggtgaagagcgtctctgcctggccaccccgtctgagaagtgaggagaccctccgcccggcagccgccccgtctgggaagtgaggagcgtctctgcccagcagccaccccgtccgggagggaggtgggggtcagccccgcgcccagccagccgccccgtccgggagggaggtggggggtcagccccccgcccggccagccagcccgtctgggaggtggggggcgcctctgcccggccgcccctactgggaagtgaggcgcccctctgcccggccaccaccccatctgggaggtgtacccaacagctcattgagaacaggccatgatgacaatggcggttttgtggaatagaaaagggggaaaggtggggaaaagattgagaaatcggatggttgctgtgtctgcgtagaaagaagtagacatgggagacttttcattttgttctgtactaagaaaatttcttctgccttgggatcctgttaatctatgaccttatccccaaccctgtgctctctgaaacatgtgctgtgtccactcagggttaaatggattaagggcggtgcaagatgtgctttgttaaacagatgcttgaaggcagcatgctcgttaagagtcatcaccactccctaatctcaagtacccagggacacaaacactgcggaaggccgcagggtcctctacctaggaaaaccagagacctttgttcacttgtttatctgctgaccttccctccactattgtcctatgaccctgccaaatccccctctgca

SEQ ID NO: 7462 - DNA, 1791 bp, Artificial sequence
  DNA replication origin
cagagagcacagggttggggataaggtcatagattaacaggatcccaaggcagaagaaattttcttagtacagaacaaaatgaaaagtctcccatgtctacttctttctacgcagacacagcaaccatccgatttctcaatcttttccccacctttcccccttttctattccacaaaaccgccattgtcatcatggcctgttctcaatgagctgttgggtacacctcccagatggggtggtggccgggcagaggggcgcctcacttcccagtaggggcggccgggcagaggcgccccccacctcccagacgggctggctggccgggcggggggctgaccccccacctccctcccggacggggcggctggctgggcgcggggctgacccccacctccctcccggacggggtggctgctgggcagagacgctcctcacttcccagacggggcggctgccgggcggagggtctcctcacttctcagacggggtggccaggcagagacgctcttcacctcccagacggggcggcggggcagaggcgctccccacatctcagacgatgggcggccgggcagagacgctcctcacttcctagatgggatggcggccgggcagagatgctcctcactttccagactgggcagccaggcagaggggctcctcatatcccagatgatgggcggccaggcagagacgctcctcacttcccagacggggtggcggccgggcagaggctgtaatctcggcactttgggaggccaaggcaggcggctgggaggtggaggttgtagcgagccgagatcatgccactgcactccagcctgggcaccattgagcactgagtgaacgagactccgtctgcaatcccggcacctcgggaggccgaggctggctgatcactcgcggttaggagctggagaccagcccggccaacacagcgaaaccccgtctccactaaaaaaatacgaaaaccagtcaggcgtggcggcgtgcgcctgcaatcgcaggcactcggcaggctgaggcaggagaatcaggcagggaggttgcagtgagccgagatggcagcagtacagtccagcttcggctcggcatcagagggagaccgtggaaagagagggagtggaaagagagggagagggagaccgtggggagatgggcgacgggagatgggagacgggagagggagagggagaccatgggtagacgggagacgggagacgggagacgggagagggagagggtaattgaccagttttattggcctgtttcccacctgtagaattttgggcatgtaaaaactttcatttatttcatcctctctcagtcctttcagtccaaactggcagtatttttgctgatgtaacattctcaaaagccttgtggctctcttgtgtgaattgtcatgttacagcagttctccctagtagaccaagtgttcctccacagatcatttctggttaatctcaactctatttctggctcctaatgaaatggctgagggggtccatgattcacattctgaatttcatcaaagattcctcttatagttactttttgtttgtttgggggtgtgagaaaaggattgtctagcctcaccattggcttttcctccagagcatactttcctgatagtgaatctcataattgtcttgcaaactgtacaggctaagaatttccccaatagtcaagtcctagtttctttttctaaacagttcttccctcaatttttctcttttctctcacacttcactataggaaacaagaagaaactaggtcatactttcaat

SEQ ID NO: 7463 - DNA, 1785 bp, Artificial sequence
  DNA replication origin
aggccggggctaggctcagaggacagggtgcagacccggctttcagaccacgcctcaggtccgggccgggctgggggttacatggccgtagcgtgggctgacgaataagggtctatgccagtcttggtcatgcctgggaagaggatgtaggcgacggggggctgcagggtggaggcagaccaggcggtacagttacagggcaccacgtagccagggttggtgggggacgggtgcgtgtgcgtgtgctggctggggcagctgaggctgccgaaggcgccgttctggtagcccagggtggacgcgtagggcagagcgccggtagccaaggtgtggggcacttcgcccatcttctggatggcgctcgagctaaactgcgcggggtccagcagggagtagggcgccgaggccggcggcaagaaggcccgggctttctcgggcgcgctcaggaggccgtcggaggcccccacgggcaggccagccgccttgagcgggtccgtgtcgcccaggtagggcaaggggaagacatacctgtccttcttgagcaggttcttgggcttgcgccgaggtcggtacttgtagtcagggtgctccttcatgtgctgggcgcgtagccgcttggcttcatcgatgtatggccgcttctctgcctcggacagaagcttccattcggcacctaggcgtttgctgatctccgagttgtgcatcttggggttttcctgggccatcttgcgccgctggccccgggaccataccatgaaggcgttcatgggccgcttgatgtggtctgaaggtttggacatggtcccggcggctaggtgggtgggggtagggagtgcaagggttctgcagacgagcctgggcgcggctggccgtctgtctgtccgtcctgagccggggttctgcgctcccctcgccttggcgccgctgaggggaagccagagagaagcgctgaccccacaaagttcagctgatcatgccagtcccagcgcccaggcagccccgggggagcgagtgggggcagaaagggcgggggaggagagggcgatcggccggggggcttcaggcaccaggggctgggacccaagtatcggagtctccgggattaagtggccaggtaattttttagccagggcaagaagctcctccttctccccctctccacctttgccttctctagttcccttctctcctcttgcgtttccagtcgtggctcccccttcccgtggctttcccggagctgccgcgcctagcgctgcacctggctgagaatgcggggaggctggtgaacgagagccaaaagcggcgaagttcaaaggcgaggtgggccgggactgcacgcactctgacataagcgcggggcggcgactccccaacctgggcgccaatcagcagcagagaagccgagggggcgcacctgccaacacgccggtgcaagaaacagagagcgcgactggtgggggcggggagaggtgtgagggacagaggcagagagagggctagagcagagaggctagctctagactggggacttcggttccacattgtctcgggcactgtcaacaaataaaactcttccgcgtctcctgtttcctttcccggttgtgaaagagaattagggcttgaaatacaaaggccggggaagggacagcaaagggagcgaggcgagagcttgtgttgataaataggacagctttgccgcgaaatgcaaggacagcactttgccctcttgtcaaatatccttggaagagaaaaataacatatagcaggctcagggtaaaagcgaaa

SEQ ID NO: 7464 - DNA, 1126 bp, Artificial sequence
  DNA replication origin
acaaagcacatcttgcaccacccttaatccatttaaccctgagtggacacagcacatgtttcagagagcaccgggttgggggtaaggtcataaatcaacaggatcccaaggcagaatttttcttagtacagaacaaaatggagtctcctatgtctacttctttctacacagacacagcaacaatctgatttctctatcttttccccacatttcccccttttctatttgacaaaaccgccatcgtcatcatggcccattctcaatgagctgttgggtacacctcccagacggggtggcagccaggcagaggggctcctcacttcccagaaggggcagccgggcagaggcaccccccacctcccggacggggtggctggccggccgggggctgccccccacctccctcccggacgggtcagctggccgggcgggggctgcccccccacctcccggacggggcggctgccaggcagagacgctcctcacttcccagatggggcggctgccaggcagaggggctcctcacttctcagacggggtggctgccgggcagaggggctcctcacttctcagacggggcggccgggcagagacgctcctcacttcctagatgggatggcggccaggaagaggcactcctcacttcccagactgggcagccgggcagaggggctcctcacaacccagacgatgggcggccaggcagagacgctcctcacttcccagacagggtggcggctgggcagaggctgcaatctcggcactttgggaggccaaggcaggtggctcggaggtggaggttgtagtgagccgagatcacgccactgcactccagcctgggcaacattgagcactgagtgaatgagactccatctgcaatcccagcacctcgggaggccgaggctggcagatcactcctggttaggagctggagaccagcccggccaatacagcgaaaccccatctccaccaaaaaaatacgaaaaccagtcaggcgtggcggcgcatgcctgcaatcgcaggcactcggcaggttgaggcaggagaatcaggcagggaggttgcagtgagcagagctggcggcagtacagtctagcttcggcacagcatcagagggagaccgtgg

SEQ ID NO: 7465 - DNA, 878 bp, Artificial sequence
  DNA replication origin
ctgtctgggaagtgaggagcgtctctgcctggccgcccatcgtctgggttgtgaggagcccctctgcccggctgcccagtctgggaagtgaggagtgcctcttcctggccgccatcccatctaggaagtgaggagcgtctctgcccggccgccccgtctgagaagtgaggagcccctctgcccggcagccaccccgtctgagaagtgaggagcccctctgcctggcagccgccccatctgggaagtgaggagcgtctctgcctggcagccgccccgtccgggaggtgggggggcagcccccgcccggccagctgacccgtccgggagggaggtggggggcagcccccggccggccagccaccccgtccgggaggtggggggtgcctctgcccggctgccccttctgggaagtgaggagcccctctgcctggctgccaccccgtctgggaggtgtacccaacagctcattgagaatgggccatgatgacgatggcggttttgtcaaatagaaaagggggaaatgtggggaaaagatagagaaatcagattgttgctgtgtctgtgtagaaagaagtagacataggagactccattttgttctgtactaagaaaaattctgccttgggatcctgttgatttatgaccttacccccaacccggtgctctctgaaacatgtgctgtgtccactcagggttaaatggattaagggtggtgcaagatgtgctttgttaaacagatgcttgaaggcaacatgctcattaagagtcatcaccactccctaatctcaagtacccagggacacaaacactgcagaaggccccaaggtcctctgcttaggaaaaccagagacctttgttcatttgtttatctgctgacc

SEQ ID NO: 7466 - DNA, 1121 bp, Artificial sequence
  DNA replication origin
cgcaggttggcggcactggagtgggccgggcaggctctgcctccgccgcagagagcgcccggactgcgtggggctggggaagcatcccgggaacggcgggcggtgagcattccgggaaccatctctgggctgtctggggcggtggagcaagtctggaggcgggacgtggggcgagtatgggagccgccacctcgagacgtcttcccgccgtccccggctccaggagaccccacggtgagcgggccgcgcgggaaaactatgccaggaattcgtcccgggagcggggcgggtgggtagcttggctgcagtccgagggatcagcgattcgggaggttaaacattagcgggggcgaactccctgccggggtgcagcggggcgcgggaggagccggctgcgtgcgtccgcgctgcccagggcgcgcccttctggcccggcgcggccctgcagcccggccccctcggcctgctccgaactgcggcgcccagggagggaaggacccgtgcgcgggggacgaatgacgggatgccccaagactcggcttcactgggaagacggccttgggtttttactttttgaaaaaagaaaagtgatttgggagggcttgatgatctgagtgccgtaggtaaaggaggattcttttagtaatgaggtgatttaaaagcaatcgcattggcatctttcgttccccttcttcctttcctgggctggacctcagcaggaggcagacgtggtattttcatcctgaggtggctgcgcataaagtccaccgaagacctgctcagtgcaggacagggatcaggaggcagggcagaggagggggtccgaggctgcctgggcagggcctagttcacggagcacttcctaggggcccagggcctaggctgcccctgcctggtctcctggaattcgatttctaacaggactttggagagaggcctgggaagtatggggtgttctgacttggcttctcacaccctcatctgcagatagggtgggtgatctctcccttctcagttgcagcccctagcacctctcctccccctcccggatgtgaggactggccagtgagaacaatcctgcttagggaaggctgatcctccagtctagtggctgataaggg

SEQ ID NO: 7467 - DNA, 1328 bp, Artificial sequence
  DNA replication origin
atactgacatgtcctatcttcccagatgcagaattgtaaaacaaacataactgcttttcacatgtgaaagaaaactggcttagaacatactagcgttttctttgccatgaaggagttcaccttcagtgactaagccagaactactagagttgccgggcctagggacaggagacattgccagtgcttagccaggctggccaggactaaccatctctgcaaggagtccacaagaagcctcagggcagcctttccctgctcctatcaatttgagttgagcaacaaacattttgaccaaatatcagctctatggcacaactcacagttacggtgcccacaaaacggaatctcagcaaagcaactactactatgggaagagatcagggactaatatcaggagaaaaaataagtttttcagtcctgggtttccaagttggcatccccagggcaaaccagcaggttgggagggtagggggtggtgggtgggggctgcggagggaaggtggctgctgtctgtctgatcagacctggggcacacccaaagaactctcctagcttgggatccggtcaggaagaaaccaggacggtccctttaggagggtgggcagggctatctgcccggggggtgcggccgcccctgcacagcaggctatcgattgtaccggaggcagggtgtggggaaaccggggcaagtccagcctctcagcaaggccaggaagccattcacttggatcctggattttactaacggattaaacgtggcattcccgccttcccccatccgttacagacctaaaaatagctcgtccgagaggggccgggagaggctccacctcttcttgaggtggggcggggcggctgtagtaggagctggaggcaccagagaccccaagccacgagctgaccgacgcaccgaggagctctctgtccgcggtcccgcaggttggcggcactggagtgggccgggcaggctctgcctccgccgcagagagcgcccggactgcgtggggctggggaagcatcccgggaacggcgggcggtgagcattccgggaaccatctctgggctgtctggggcggtggagcaagtctggaggcgggacgtggggcgagtatgggagccgccacctcgagacgtcttcccgccgtccccggctccaggagaccccacggtgagcgggccgcgcgggaaaactatgccaggaattcgtcccgggagcggggcgggtgggtagcttggctgcagtccgagggatcagcgattcgggaggttaaacattagcgggggcgaactccctgccggggtgcagcggggcgcgggaggagccggct

SEQ ID NO: 7468 - DNA, 1481 bp, Artificial sequence
  DNA replication origin
acgcgggggcgacagggtcgaggcacccggcccgggctccccactggcgcgcccgcagcggcgctctatttttagcaggcgctgtggcaatataaggaatgcgcggcgcgctaggcgctcggggcgcacgctggcggcgcggtcgctttaaggaggcgccggggcggggacggaccggagtggccggctggcggggagccgtcagtccggcggccgcggggcccggcgggcgcgacgctgcctcctcaccggcgcaggctaggagggggcggcctgagtgccgtagccgagccggggctggagcgcgcggtgagtggtcgggcggccttggaggggagggggcccggccgcgccgcctctcgccccggccgtcgctttgttccggggcgggaggtgtggccgccctccgggctcggccgcgctctccgcttgcggggtgcgccctgggaccggctgtgcgtggcgttttgcccccatcgcgggctcccgcgtaacggtgtgcgttcgtgaaatcggccacgaccaagaccccagtggggagggcctgcgcgccgctcagagagaccctttcatggtaattacagttccttggctgcctgggcgagaacccggtggatagatgggcggcaggacggggcggcgggggatgggtgggtgggtgggggactctttacccccccgccttaagatggcgttaacgaggggagggatccgccagggagttgacaaattcatctgaataataaaacgcagcctgcttcataaacaacccttcactgcccccggaggtttggggagctggagctgtggtcacaactagggcctgggctcatgcattgaactgatctggctgaggcatcagacacggtgccagtcctgccctgcggggaagacaagagcacaaagtgacaagccagtgtggtaagtgctgagattcggtaagcccaggggttgtgggagcccctaggggtccctactgcagagtgggaggtgagagaaggccgcctagaggagttaatgtctggctggccgcagcgtatacactggacacccagttagactctggctagagctgaggtctgttctggcctggggcaaagtggagtctggagaggtggacagagtccatcaaggccactggggccttgatcatagagctctgccattgcccctactccccaatggcccctgatggtgtggaacctccctggccttgctcctctaggactcactctgtcctggacctgaccagagagggtggctgacaaggctcggaatcgtggcctccagaggtttgtctggcagcagaagtaagatggagatatgactttaagagctctgaaactccactgtaataacagcaaccaacagggcttccaaagaccaggcacttgaagtggatttgctcatcatttgacaagacacctcttgacaagacacctccagaaggattttgtttattgtaaaggatggaggaactg

SEQ ID NO: 7469 - DNA, 1168 bp, Artificial sequence
  DNA replication origin
gcgccctgggagcccagcgcacgccgggccccgagctgcgcctgtccagccagctgctgcccgagctctgtaccttcgtggtgcgcgtgctgttctacctggggcctgtctacctagctggctacctggggctcagcataacctggttgctgctcggcgccctgctgtggatgtggtggcgcaggaaccgccgcgggaagcttgggcgcctggccgccgccttcgaattccttgacaatgaacgcgagttcatcagccgcgagctgcggggccagcacctgccagcctgggtgagccaagccgggtgggagtgggaggtggggagatgcctttcgaggttcggaggaacttgcggtcagcggggagctggtgcgcgcaaacccgaggcagggcgggagcccggcgacctgcacaccccgttccccaccgctcccggggcgcagaccctggggacggtgaccgcccctcccgcggcgcgcagcaccctcacgtccacctctggtccgactgcggtgggagtggggaacttgggtttcatttaaggccccagagctcgagagaagagtcacgggcagaccacacccgggagaaaaacaagggcgtctgggacttcgcagacttactcgggttggaatcagaaggcatttcttccacccgcctgttgattcagagaacgaacgccggacgcaaaacgtagatgggcaaataccgcagtgacagaaacggcgggcccagttgctttcggccgaggcctggactgcggtagggggagggctccgcggggctggaggtggagtggcgggtacggctgggagaccgacggcgccgggccccgggcctccttccctccctccctccgccggatagggatgccggcacacgcacactgccccgacaaacccatctcctggggcggcatgggcggcactacgattcctcaaacgcttctggtcctggcttacctaacaaaacccaagttctgggccccattgcataactcccagggtggcacagaggtatcctgggtgattcttatgattaggtgagcttgggaaacaccggcaagaggggtgttccgtccaatggttggtctgcggcaaacccttactgtctctccggtgctggggctcttcgttttcagatttcttccagttactctcaggcccac

SEQ ID NO: 7470 - DNA, 1077 bp, Artificial sequence
  DNA replication origin
gccgccggcgcagcagggccgagagcgtggggacgccggggggctgagtgcaggggtttccagggtgcggagcgggcgggcccgaggcgtccgggcgggcgcaggcgcgacaccgaccccacccggtctgctgcctcacctgtgctctgtgggccgcgggaggctctggggtaggtttcaccaaacaaccggttggttccgactcggctgcgtaggccgcgtggccttgctcccctggccgagaaacaggcgcagccggcgcggaggttgaaagctctgcaggcgcgagtaccaaacgcgccgactgtttgtcgcgcctctcaggtcccctggggcgaccagcgcaggaggccacccctcccgccgccacggacccaaccctggtcctctgccttagccgaaggccgcaccctccgcgcataggccttcctcagccccaacccaggacatcaccatgtcccgcagtgcgtccagtcttcctgccagcaagtgtgggtaggagccggccgctggccccgctctgggctagacggtggggacatactggcgggcaaaaacagccctgtgcctgctctgcagctatggggaaggaatatctgttcatggcagcaatagcattcgctccttaaaacctctttatgagtctcattccttttttaaagacccaaactacttaaggtgggcatgaagcccccatgtgtgatctagcctctgcctgcttggcttcatttaggtccttaaaggatgcaggtttcttctcgcccagggcctctgcaaatgctcttctctctgcctggacactcctcacctcttccctattgtgagagttcttcatatatcatttcttagattacactatcctggcccataagacttgcagcattgctgggtgtggtggctcatacctgtaatcacggcattttgggaggcagagtggcggatctcttgagtccaggagttcaagaccagcctgggcaacatggtaaaaaaaaaaaaaaagagagagagagaatgagaaagaagaaaagaaaataattagcggctcaggcctgtaatcctagctacttgggacgctga

SEQ ID NO: 7471 - DNA, 1062 bp, Artificial sequence
  DNA replication origin
ctcctatgtctacttctttctacagagacacagtaacaatctgatctctttcttttccccacatttcccccttttctattcgacaaaactgccatcgtcatcatggcccgttctcaatgagctgttgggtacacctcccagacagggcggcggcctggcagaggcgcccccccacctcctggagggggcggctgccgggcgggagcttccccccgcctccctccgggacagggcggctggccgggcgggggctgccccccacctccctcccggacggggcggctgaccgggcgggggctgccccccatctccctcccggacggggcggctggccgagcgggggctgccccccacctcccggacagggcggctgctgggcagagatgctcttcacttcccagacggggcggctgcggggcggaggggctcctcacttcccagacggggcggctgccgggtggaggggctcctcacttctcagacggggtggccgggcagagacgctcctcacctcccagacggggtggcggccgggcagaggggctcctcacatcccagaccatgggtggccagggagacgctcctcacttcccagacggggtggcggccgggcagaggctgcaatctcagcactttgggaggccaaggcaggcggctgggaggtggaggttatagcgagctgagatcacgccactgcattccagcctgggcaagattgagcactgagtgagcgagactccgtctgcaatcccagcacctcgggaggcccatgcgggcagatcactcgcggtcaggagctggagaccagcccagccaacagggcgaaaccccgtctccaccaaaaaatacaaaaaccagtcaggcgtggcggcgcgcgcctgcaatcccaggcactcctcaggctgaggcaggagaatcaggcagggaggttgcagtgagccgagatggtggtagtacagtccagcctccgctcggcatcagagggagaccgtgcaaagtgggagacggagacggagacgagagggagagggggagggggagggagagggagagccttttttt

SEQ ID NO: 7472 - DNA, 924 bp, Artificial sequence
  DNA replication origin
aggagcgtctccctggccacccatggtctgggatgtgaggagcccctctgcccggccgccaccccgtctgggaggtgaggagcgtctctgcccggccaccccgtctgagaagtgaggagcccctccacccggcagccgccccgtctgggaagtgaggagcccctccgccccgcagccgccccgtctgggaagtgaagagcatctctgcccagcagccgccctgtccgggaggtggggggcagcccccgctcggccagccgccccgtccgggagggagatggggggcagcccccgcccggtcagccgccccgtccgggagggaggtggggggcagcccccgcccggccagccgccctgtcccggagggaggcggggggaagctcccgcccggcagccgccccctccaggaggtgggggggcgcctctgccaggccgccgccctgtctgggaggtgtacccaacagctcattgagaacgggccatgatgacgatggcagttttgtcgaatagaaaagggggaaatgtggggaaaagaaagagatcagattgttactgtgtctctgtagaaagaagtagacataggagactccattttgttctgtactaagaaaaattcttctgccttgggatgctgttaatctataaccttacccccaaccccatgctctctgaaacatgtgctgtgtccactcagggttaaatggattaaggacggtgtaagatgtgctttgttaaacagatgcttgaaggcagcatgctccttaagagtcatcaccactccctaatctcaagtacccagggacgcaaacgctgcggaaggaagcaggcagggccctctgcctaggaaaaccagagacccttgttcacatgtttatctgctgaccttccctccactattgtcctatgaccctgccaaatcccccg

SEQ ID NO: 7473 - DNA, 1080 bp, Artificial sequence
  DNA replication origin
cgcgcacacgggcgcgggttcggcggcggcgcgcgcgtgctctgtcggcctgtgcggcgctgcggcggagcgggccatggcagtggggagggggcgagtgtagtgctgcgcggggcaggcgggaggtgatcgagagaggcagggatgggggcgccggagtggagcggttgcggcggcctgggctgctgactgcgcacttggaatagtagcaggcggcggcggcggaacgccaggcaggtgagtgcggcggccgggacccggatgcggcgcggctgaggggcggctgggtcgcggcgccggctgcggtgcccccgggcgtgctggcggtgcgttctagcttgccgctacctgcggcgctggcgactcttgtggttgcaccgcgcttcctgccagcttggaggataaccgcctaccggccggtgggggcgtctggcttggttgcggcccgccctgggctctccaaggtgagtggcgccccccggcccctgggcggcagagacgctgccgggcgtcccgggtcactgtcgctttgggtcccgttcctgaggggcgtttctgtggagagacggcgtactcgcgccccgcgtctatgcggacacctccggaacttcccgaccctcaggtgcctttttgcgcagaagtgtatttcagaggcgtggacccagggttattaggttatggacatgttttcgaatcccaacgccgctgctgaccagtcctggggccttgggccaaaatatcctgatgtgttaaatggaaataataatacatacaccataaggttgttgtgaggttaggcataactgaacaagtgctaagtaaatgatacccctgctgcagcatctcgtgttagctattgctaattcctggctgctggcgtgcgtttgggggcacatttatttccgatctgctctggtgttgcagtaaccgatactggagttgcttaatattggagcctgttaacctcgcagtggccaaaatagaatcctatagtcccttactagaatcctgcagtctcttcccgcagggctgaattggaaccctgtctcaggtactgagtgggaattactgctgaaatga

SEQ ID NO: 7474 - DNA, 991 bp, Artificial sequence
  DNA replication origin
gtggggtcttcgcccttgaaaaagcgggtcttccagatgacgccgtggcagaaagcgccagagccccagccttcctgccccgccctgcgctgcgccctcccccagccctcctcctcttcccgccccgggcgaaagcagaagtgtccgaaagttgggaggaaatggccccggagctcccggggtttccagctcgcctgcggagcgcggggctccagtgcggcgcgctcggggccgccagggggcgctgtggggcgggcctgccgccgggggcgcggctgttgcgcccaagggagagccgtcgctgccagccttagatttctttaggaagggacaaagtgatctggagcccagggctgggagaggctcttcgggctcccaccttcaggcaggattaatgtcgagccctgaaggcggggtctctgtcccgcccgccgctgcactcccagctcctggaacagtgaataacaggggccatattcaccaaatactgactgagcgacaacagcaggaaatgtcctaagtcccggtgatgaatcagtgaacaaacaaagcctctgccctagtgaggttcctattctcccctgcggggatggggaaaacgataagcaaaacagaagtgtaaatgcatgtacggtgaggatagatgctgtggagaaaaactaagcgggataaggagggtgaggaatgcatggtgcggtggagacaggaaggtcagggaaggctctgatcggagagggacgcttcagcagatccctccaggaaggggcgagtcagctaggaaccgaaaaataaggaacacttcaacgtgttaaatgaatgagttttagaggcaagatgccacactgagcaatggcccctctggtgtgacctgtcctccctctctccacacctgtctgctccccttcatccatccattcatccatccagccgtcccacaggcacctacctgctccatgctggaccttatgtggggtatatttcatttccatat

SEQ ID NO: 7475 - DNA, 855 bp, Artificial sequence
  DNA replication origin
tctgaacacagctttttgaaggcccaacaaaaactctaacgcaaatcttccagaagagaagatgaggaatactaaagcttttgattttcatatttggatttagcaaactccaaggccacaatacttccccggttgcccggtgaattttttttcctttttttttttttaaatactctcttaaaaagttccaccgatctttcaaacaaaacattagccagccgccggggcccggaggtgcccgaagcgacgggactgatagcggaggaaacgcagcctccctccgcgcccgcccgcggtgtaaaccgagtacaggccgtggagccaggctgccccggctcccgctgggtcccaacccccgccccgcctagtgggccccgcggcaagcggcttctgaacagcttcaagagggttcgcggagcaaacacacgtattggtccgtccctttctcgggcagcgcggtcccgccatcagtcctgtccggcgcgtctagccatggactgcacggcagtcgggcggggaacgcggagagcgagcgcaccgacctgtgagagaaggccaagaggtctgcgctgccgacgcccggtcgcacctccgccccgggccctttccgcggtgaatttgggcaggagacgctggggctccggaaagagacgagcccagtagaaagcgcgcagagaggcagcttcaggccaggggagtgcaaggtcacagaggtcagggaggtgagcacaggaggacataaactgaggggacaaagaggagcgacaggagcttaggaaagcgaaaaagcacagagggaccctgggcgctggctccagaggcgggcccagagggtgtgaggtcaggctggcggcg

SEQ ID NO: 7476 - DNA, 1130 bp, Artificial sequence
  DNA replication origin
tcttcccctccccccgccccccggtttcccgaagcacgacccgcgtctctggcggagctgcctcctggagtccctagtgcgccaggagcctcgctctgttctgattcgtatgggctccaccgagttccgcttgcgtcaggcgccttcgcccctatagcggggcggccagccgcgcacgggcgagttcatctccaagtcactttttgtaaacgccccgcacagcctggaccggcctgcccccgcccagcgagcctcaggggcccagccgacagccaggctcacgcgcccttgaaatctgccggtactcgctctgcgggctgggctgggagatgacgaggaccccggtggggtctgcccgcacccggccaaagcccaggaagctcgggccccagcgaggaaaggcgctccaagcctcctcgcggctttcaggtgaaagaaaacgactcctttgctctgccgtttgctgccgtcttgaggctgaacttctagctcggggctggggaggggcgagacggcgagggggctggacggggtagggtggggagagctgctctgaggctttgggaaagtcagcccagaaacgggtgtgactgtacgaagaagcctcggcctggcctgtccctcgcgctctcagagtgactgggctggaatggggcaggggagaggatctctggaaatagtcgtcaggggcgccgcctgaatcacctctgcctctccctgcgttaccagtggatctaggaaccaggaatccgtgtactaatcctacggggttggagtgaaggttggatgtgtgctttaacagcaccaagtagatgcccctcagctattgcactaacacaggcggggctgttgcccgggactttgcgggactgtgtatgtgtgtgcacaggggtcacatatggaagtcatggagaggagctgtccttgagatgggtgagataccaggtgcatgtgtgctgctcagaaacacaggtatgcacatgtacaaggtgtgagatttgtatttacgaggtaaaacacacttatactgatagttatgtaatatgttcatcaagtattagagtaaatgtagctggtggatatagcatcttctctttttctcctttcttacttctttccttccccccttt

SEQ ID NO: 7477 - DNA, 1449 bp, Artificial sequence
  DNA replication origin
ccagcctcagcttccgggatagttgagactacaggcatgcaccattacacctggctaattttttgtattttttttgtagagactgggttttgccatgttgctcaggctggtcgcgaactcctaggctcaagggatccacccactttggccccccaacatgcctgggaggggatttctgttaggatcccactagattttttttttttttttttttttttttttttttttttagctctgagggctttgtagcaggatgcttgcaaactttaaactatatctgccttctgggaggaggaagcttctacaacgtaagtgggtttacttgagattgactatctcccaaggactgcctttagcgccaccccctggttggtagaagttgtcattcatgcatttgagtgaacgtgtgtatccagggcacctcctctttatacgccccgtgctgggcgtgaggatttggagaaggggaaggtcttgttcttgcccttggggaggtacagtttagtggggagttggataagtaaacagacaaaagcagtttactttgataaatactgtgatgggggaaggttgaggctgtggaaacatgggaagtcttcctggaggaggtgatactggggctgcgtcctgagggatgcgtaggagccaaagaaggtgtggggaaggcattccagtaagaggaagcatgtgtgtgaaggcccagacctgaggttccttccctcacagggagagcacctgtggctggggttggcagtacccagtgtaggagaggtgtgtcaggcagcgggtcatgagctcggacaggctgacaaggtctatatcactgagggcctagggtgcctccttgaggggcttggactttaccttgagaacatgaggggtgtaaaatgggagtgaaagagaggttttatatgttaagaagatgaaggtggctgcagtgtggaggatggagggagggtgctaaacctgaagcagagtccaggtgagagaagatgggcctgcagtaaggaaggggcaggcagatggagacaagggtccacctggagagacatttaggagatgggatctatgagtcttgacggctgattaggtgtgagggtgagggaggattgagcacctcccagttttctgacttggtctactaggcataggttgtggctaccctgagacgaggaaggctcgaggcacaggtttcttgggaacatgatgatctctgtgtggaacacattgcatttgagtgcctgagggacatccagggggaaatgtcttggaggcagttggacatgcgggtctggactcaggagggaggtttgggagttcttagtctacagatgagacaagatgaagtcactcaaggagggtgtggagagacagagaggaggagaacattaaagaaaagagatacgtagagttgggggaaactaaaatgatggagcaggagtagctgaa

SEQ ID NO: 7478 - DNA, 1301 bp, Artificial sequence
  DNA replication origin
tcccctccaaggagatttggatggagaggaatgggatggtgtaatggaaagggtcagaacaaccaacaaccaagatttgaactggggccctgggcaactagagcacacccctctcagagcctcagtttcctccccaagattatcttgaggacacagaagtgttttaagttttgtaagcctgtgtcctaaggtggagtgggggtggagcaccctgcactcctacagttcagaggtcagtaaattagtctgggaaaaggggagtggggctctcctcttgggacaagggaggggccctctctgagtccctttagttaaactgtgaactcccctcagagcaggtatgatccgttatgagagcctggttggaagacccaggagtggcaggacccaggatggatcagagtgagctgtgggggcacacgctgtgggactggcccctgctgggtgaaagaccctcagagctctgggtagaacctgcaagcaaaagggtatcccagtgatgtaaatcagaccagtgtgcaaaagtagatatcatcaacgtgcatattgagcaactactgtgtgcatctggggagaatgttggtacactgacaggctgtaagcacatgtgaaaagctatgaactgtatcagatagttggcgggtgtggggatgtgcaggaggattccaaggggaggggtggtatgtgggtggaaggggccatagcttagtggtgctctgcagaagctgatttcggtgggggaatcatggaggggcagaaagagtgtgcaaggtcaggagggtgcttgctgtgacccaggaaccagatgtggggagttgggtcaggccagcagcagtgggaaagagaaggtgcgaggaaggaaaggaatttgagaggagcaggaaaccagtcatggttgcctgagcagagggagcaagggtgaggaccaaaaggaaattcccacatgttatgtcaggtgcagggagagaggtagagctgacaggactaggtatgctggcccccaagtgagaggtgggattggagttgctgggagagcttgcttatgggccagaggatgtctggctcatctcagtactgctcatggggcggaatgaatgcgaagtccccccagatggggacaccatgtggcagagtgggaccactctggctttgatgcagtctcgccatacctctctcagctgtgtgacttcaggagcaatccttaacctttctgagcctatatcagctataccatctccctccacctgaccttgagatggcaattacagtggctgtagtccagtttatcaatagaaaggagc

SEQ ID NO: 7479 - DNA, 1496 bp, Artificial sequence
  DNA replication origin
aatggatcctcccgcaggctttgtgcgcgctgggaatccagctgtcgccgccccgcagagccccctgtccccggagggcgctcatttccgggccgcccaccacccgcgtagcaccggcagccgctgtcccggcagtctccagccgtcccgcccgcttgtggccaactggctccagtcactccccgaaatgccagtcgacttcactgggtactggaagatgttggtcaacgagaatttcgaggagtacctgcgcgccctcggtaagcgctgcccgctgcgccctgggcgccccgccgagcagctccgggccgctccctagagccctcccgagacgctgcctgcctgcctccatcccggcgagccgcggtccggtgcccccggacgccagaaagggcgtcctcggccaccgctcccagggcagcccccaggctgcagattggagaattcggggttgttaggttaaccggtggcaaatgtctgctcgttggccctggaggtgggtaatttcattagtaaatctggggcttggtttgctactttttgtttttaaacggttaacataagagcagaaaactttgttgggggcggcaggggaggcacaggcaggctgtgcgcagagacaacgcaaagccagcgggaaccctaacagtgttcgcgggcggagagggctcctggggccccgctaccttgggaacggttctctgagtttccctgccaactctctggcgctctctctctccccgttcaacccccaccgcagacgtcaatgtggccttgcgcaaaatcgccaacttgctgaagccagacaaagagatcgtgcaggacggtgaccatatgatcatccgcacgctgagcacttttaggaactacatcatggacttccaggttgggaaggagtttgaggaggatctgacaggcatagatgaccgcaagtgcatggtgaggattcgcgtccacctggtgtctcctgcccagggggcctgaccaagggctgggctagttcatccgagagggggcaagggcctgagggactgaaaactcttcccactctcagcccccatggtgggcagcaccaactcatgaagcatcctgctctatctacactggaaggtgatggttatgaaggctgccatgtgctgtgtctccactgcgttcaggcactctgcccggtgctttatgcacatgacttcacctaagcctcacacagcctttgagggagatatgaatatgcccattttacagatgaagaaacagtctcaaagagatgaagtaacatgtccagagtagcacagctagggagggtctggagttcaaagcatgtctgttgatgccgttctctggctgactgggctggtggagggtaaaagaaaagaaaggaggaaagaaaaaagaaacacaggtaacccctttgaagtgtaaactttcagtatgacttagtgtgaagtcactccaggaagctgggggccccttgatctctgctggaagccccctgatct

SEQ ID NO: 7480 - DNA, 941 bp, Artificial sequence
  DNA replication origin
caccggttaacctaacaaccccgaattctccaatctgcagcctgggggctgccctgggagcggtggccgaggacgccctttctggcgtccgggggcaccggaccgcggctcgccgggatggaggcaggcaggcagcgtctcgggagggctctagggagcggcccggagctgctcggcggggcgcccagggcgcagcgggcagcgcttaccgagggcgcgcaggtactcctcgaaattctcgttgaccaacatcttccagtacccagtgaagtcgactggcatttcggggagtgactggagccagttggccacaagcgggcgggacggctggagactgccgggacagcggctgccggtgctacgcgggtggtgggcggcccggaaatgagcgccctccggggacagggggctctgcggggcggcgacagctggattcccagcgcgcacaaagcctgcgggaggatccattgtagcggtcgctcctccccgcttagcgagggcgggcgcaggggcgggggatgtcgaagggtcaggtttgtccaggccgcgccaccttcgtttcagacgttcagttcgtttcccctacaaaggaagaggagaccggagacgggacgtttgctttgttggccgaactcttcggctgctggggatttccttcaaacgccattaacttctcacactcagcagccactcgggagttgggaaacaatctcctggggtttgtgctggcgtgattaaggaaagaggccacttacaggcctttgtctaaagcctcgcgccggtggtggctggggtcaggaaagctgggaggttcaactacgggcgagaaaattggggcactttccacgtctctcccgaaaataaaagaaaggatgccgggcacggcggctcacgcctgtaatcccagcactttgggaggccgaggcgggcggatcacctga

SEQ ID NO: 7481 - DNA, 1276 bp, Artificial sequence
  DNA replication origin
gcacagccgcccaggcagcatcctcgcagcagccgccaacgagctgcagccgccgcctactgtccgcgccggctctcgcctcccggtgcctgccgcaccgtgggccgcctcgccgtgcccgatgggtgcgcttctagcgctgccgccgcggcgctcggcctcgggttcccgccgctgcgccgctagctcgccggcagcagccgcgctcactggcgcggacccggagcggctcaggcgctcaccccgggacggcccgtgacgtcacggagggagggaggtggctcgtgcatattcatgaacgcgggcatcggcgccgggttccgcgctccccgccccaaggccccgacccccaactttcctcagccgtctccacgctccggggccctgtccaggtccccctgcccagtcgggaccgggcccccagaggaccctggtgggcggctccggagagccctccagccccgcgcctccactccgactctcggaaaagctgccgcaagggatggagggctcccccagaaagtggccacccgaggcctgagggtcatctggggtggcgcgagggaccctgacctgccatgccctttgaactgatatctgggcggagaggactgacgggcgtcgctaagggtcttgcccttggctgggtctctgggcgttctgcgtcgactggtctggggagggcgccaggcgcacactagagcagcgcctagtggtgctaggggttgtcgggcagagtagatagccttggacctggatggcaatggcagggctccgcgtcatctccgagaagcaggggcagccgcggctcttagaggctgatagaacagctagatcagaaaacttggggtgctgggcctgctgaggctgcagtggcgggggcggggtgtcaaacttaaaattccctgcggtatggtgccatgcaagaagttgccacctttatgttgtcactccgcatctctaagaacaggctacttgacgtcatgcattgtaaaatctcgtgccgttgagtattgtcagttccctgagtgcaggagccagtgcatatctttgcatcctcaaccatctctaggccgtgaaaaaattacaaaggtactcaaaaaaaaaaaaaaaaaaaacagtaaggactcagaataaatccttgaccatatttacctaaatgaaatgccaacatcacacacaatgcagggtttatgaggaatagtttggaaataaagtagatatggaaatacagaaacaaacaatattatttatttagtcattgattcaagacgtt

SEQ ID NO: 7482 - DNA, 1813 bp, Artificial sequence
  DNA replication origin
gggtcctctgggggcccggtcccgactgggcagggggacctggacagggccccggagcgtggagacggctgaggaaagttgggggtcggggccttggggcggggagcgcggaacccggcgccgatgcccgcgttcatgaatatgcacgagccacctccctccctccgtgacgtcacgggccgtcccggggtgagcgcctgagccgctccgggtccgcgccagtgagcgcggctgctgccggcgagctagcggcgcagcggcgggaacccgaggccgagcgccgcggcggcagcgctagaagcgcacccatcgggcacggcgaggcggcccacggtgcggcaggcaccgggaggcgagagccggcgcggacagtaggcggcggctgcagctcgttggcggctgctgcgaggatgctgcctgggcggctgtgctgggtgccgctcctgctggcgctgggcgtggggagcggcagcggcggtggcggggacagccggcagcgccgcctcctcgcggctaaaggtgggtgctggggaagtttgctcttctcccaggagggaggcagggcaggcttgagggtgaaagcggcaaggacctaggctcaagctggatttgcccaccctcccttgccgcagcttctttggcctctgtgcgccctggattcccgaagtcagttccctgcgcagcggaccagagaggtccacccgcggacgtcaactcaacccctgggcggggtccgggggctgagcagaaggcgaggtctggggagtacggacaactttgagggctgtctgtgccggggtgggagcgcagtgggtgagtttcgagctctggcccagggacggctagagcagggcgctggcgcgccgtggggacaagcaggtgtctgctcctgcctgggggaaggatcagcggcggtgctttcaaggagggagccgagctgtgacttgtctcccagctcggggatggagtggaaacttgtaggctccagggaaggccccgctgacactcctcaagctcccccagggcgtctctgactccccggggaacgtgtaccctccgggtaggcggcggggtccggaagaagcgcgggatgtgaggctccccgctgcctttcctactccgctctgactaccgaggaccgaggagcctaacctggcaccactcccctgcccaccctgttcctttgaagagcttgacctccccgcgcctcccgcccggaaggaagctagatccaagcgaacgcctggctctgtcaggcgagcctggaagccggcgaaccccggactttgacagctgcctgggagcgtcgggagctctggggtggggggccgggtctgaaacaggaggtcacgtgcttgcagggggtggggaggcgagggaagagcagagctggtggggaacagtggtgggctcaggggaggctgtggcagatcctagctggggcgcacagcttagtgataacttgttgattctctgcgctgttcataagtagggcttgcgtttggtttgtggactgtggccaaatccgccaggtgacaatgaggggtacttggtccccaaatcctgcctggcaatcatcagagggcggaggggtttgcgcctgtcagaaaatagattccctgttagagacagcctgattcggacgcttgctttgagctacacttgaccactagcttaggggaggaaatgcctatcaggctgcattactcttggaggttggggagagctggaggcaggcagttcgccttgtctgggctttagaaactggccctccaataacttaggagtgatatatttgagaagaacatgggag

SEQ ID NO: 7483 - DNA, 934 bp, Artificial sequence
  DNA replication origin
ctgtggccaaatccgccaggtgacaatgaggggtacttggtccccaaatcctgcctggcaatcatcagagggcggaggggtttgcgcctgtcagaaaatagattccctgttagagacagcctgattcggacgcttgctttgagctacacttgaccactagcttaggggaggaaatgcctatcaggctgcattactcttggaggttggggagagctggaggcaggcagttcgccttgtctgggctttagaaactggccctccaataacttaggagtgatatatttgagaagaacatgggagattatgtttatctgtaatttttaaattttttggtgtcatcgttttgaaaatattttataagcaggcattctgtttcttttcagcattttttttcttggtgtatctttgacaggcagtttctatttttagaaatgagaaatttcatgagagaaaaactcgttatgaaaatatctcagagtgcggtaaagaagtggctgatatgaagggatcaagctgagagactgttgttttggtgaagacaagaataaaaaacaatgaacttccaaacatctcccccctgctttcccaatatagacactttgttaaacaggcaaattacttttttggggggtgggggggaggagatttcccatcactttgtagcacagtaattgatataagcagatgtctgcaaacgggagtttgaaggagggtgagaagcacacagcaagtgcagaacagggaagaaatcatttgggaagaggatctggtgtgagtagtaataatgcacggctgagttctcaggtcagaatgggaagcttcatagaggtaagcgagaaagagaaggagagagataaaaaaggaaaataaaaaccccaggctttcaatgattcactttatgtggataattatgtgcattttaaccaacatccga

SEQ ID NO: 7484 - DNA, 1652 bp, Artificial sequence
  DNA replication origin
cgctgcgctgcgtcgctttcagcctctggtgaagggcggcgcgcttaggcaggcggtggcgcggctggagtgccgcggggagggctgtgccggttgctttctgcagccgcatctcggccagctctcctcgccgtccccggggcgctgtgcgtctccagtccgggaccgaagccgcctgccgtagcgggcggccagatccgcgtcccgcctcagcggccggaggacatgcgggagagagaatgagccagagggacacgctggtgcatctgtttgccggagggtaaggtcctggcggggcgtgcgcactggggctgagggtgctggggccgaagacgcaggcgaggggggcgaggggggccgaggggggtgggggggtgggggggcgggagtgaggcctgggcggggagctgccacgggcctgcgggtgaggggagcgacccagcccgtgggtggtgaggggggctccggttcggggaagcaagggggtgaggcccgggcccgagggcgagagagtgaggcccgggcaaagagggttgaggcatgaaacccgggccgggagtgaggttttgggcccgcggggccggggtgaggcggaggccgaatccatgcgtctgaggagacgcgggcaagagctggggtcggcgcttgattacccggacgccgctggacctggccgcacgccgcaatctagcaggcgtcggggatccagggccgctttgaggagcctggcttcggatttcgcgtaggttgcatggcccaaggggacggggcggaaagtgcggaggctgaggacaaaatgggcgccggagactcctttagccctcgctccttgcagcgctcgcttgggcctctgcacgtcactcacgccccacctcggacctcgggccgctcatttccgggctcggctttgcaaggtgggtggtaagggggctacgggatcgagcggggaaggctttggtattctcccgtggttgctgtagggtgtttctagcccttggaaaatttcttgcccgaggttttccaggtggtgaatggggtgcaaagctttccagtacctttggggtcagattcctttcgagaaaaccacccctcttgaacaccgcttgcttttctgctgcttaggagaaagtaggagtggagagaggtcagattttttgaagatagtgttaatagttactatgtgtgtgcaagattaggactaagcctaaagtcttagttccctgattgccaaaatgagtgttagagcttccagtttagcctcctgtttagatttgctccttctaaatcatttggagaatcatagcaattttaagagttacttatttggaggattataaagagttttcttatcaaaaatgccttcggtgaattatgctgagactcttaccggcatcttcttaaatcctgcagtttttagatcgacttttaagaatatgaaagaaatacacacgcagttctattcacggtgccttgctttgagttggacatatggactctattgagccagtgatggcaatactttctttaggttggcacactttcatcaacaaatatttgttgtacaccaattatgggccggccactgttctggcataaaaacaatatttttctattgatctgtgagacccagtttaggcagtttgctttccata

SEQ ID NO: 7485 - DNA, 1623 bp, Artificial sequence
  DNA replication origin
tggcccccggcgcgccgggcgtcttccccagcgccctgagcgcacgcagcggtagcagcagctggggcccgggcccgggatgtggtgtgttcatcgccctcccctggggctgggtgcttttgtgcgcggggcgcgccggccgccacggccagctctggatgctgcagccgccgccgcctccccctcctccgccgccgccgcccgctccccgccttcccggccggcccggaggctgcagctgaaagccgatctggctgagctcatccctgaaggccactaatccaatagccgcggaaggcgcggtcgccgggaacgccccttcccccaccatcccgcgccccggccgtcccagctcgggccgctgccggcgccgccaccttctcgaggccaccagctggcgggagagggaagtggagcccgcgcccgcgcccctgtgccaaggcggcggcgcggtcgccattcactcacccgcccactcgcccgctcactccctagctctcgcattcattcctgcgcgcgggtcctcccggattcattcaagcgctcctggagcgccagggtgggtgcccctgacggggaggagacacccagtcactaggcagctttggtgcctttactcaacgcacgtgggaaatagcagccaggaggaaaaaagggtggtttattatcccccttcctcagacacacacgtccacactttatttttgagatcaggctccaactcatctcttaaagtccaatttcataccgcacctgctcaaggagcgttccccgcccacccgaggcgcaggaagtcggtctctttgctctaccagcgctgatggtgggccgcctcattgggagcctgaactgagcgatggggtaaagggcgtggccaaaacagaagcctcgagggtgcttctggtatctgcgcttccttggggaaattgaaagttcttggtttggtggccctcgtctgtgctcccagaattgactttaggtccattacgcagtcatttgctaacccaatccctctctgtgccaggtaccaggcagagtctagatgcagacagagtctagatgcagacagagtctagatgcagagtgcgcatttcatcaaggacatggaaaacaagtaaagacaatccaactctatgaaggaaacgttttgagagaggttctggggcgaatttgtcagactggaaagggcaactgggaatgtttcctagtaaatgtgtctacatgaattagctcctggaggcaggggtacaacatggtcacctggagagctacctatcacagcacagagcctgtgctatgagcagagggggtatgacggaactggagggatggacggtgtctagggtcttgggtggagactgtatcaagagcttgaccttccccatcactttgggaggcctttaaccagggtagtgaccttgtcggatttgcattccagaaagacctcttagcagccaactggatggatggatggaggaaaccaggttggcagctactgtaatagtctaagcataagatgatgctttatgaaccaagataaccatgatgaggtgacaaaagtgtgtattgacacgtatttattgtacttattctaacgtttcatcactgtctgtttgcatgtct

SEQ ID NO: 7486 - DNA, 1255 bp, Artificial sequence
  DNA replication origin
taccgctgcgtgcgctcagggcgctggggaagacgcccggcgcgccgggggccagcggccgaggcgcggcccgtgcgccctgagcgcgggactcgtcgccctccgggtcaggcgccaagcttccaagcggctagagcgcgggccttggagcgcccccaggatcgcttcagtaaggcgcttccccactccaggcccgacccccggcgcctgagcgccaacttcgccaagaacgctcctaactccaggccatcctgcagcgcagagggggcgctgctgccgggcatcagccgtgaggacgcgcccctggccgtgcggagagagccggcatttgcgggtcactcgggcgcccctgagtgggcggcggcggcagcagacccctctccagggagtccaggacctgccagcgctggggattcttcccgaacaggcgcttgccctctcttttatggtaagtactctccagctcctggtgaggggcgcgcgggggccgggagccgagatccggctgcacggactttgtgcgggccagcactcgacacagctggcgctcctgacgtcccagtccctgagaattcctctctgcaggttgtggcagttcgagatggttgatttgcgcgcagccctggggcgtttggggcccggcctttggtatcatgggttctaagccctttgcttctctgcgtagcggacaacgcacaaaaaactgccatccgattcacccgctttggtttggatccaggatccgtcactcactggctgagtgaccttggacagggcgccaaacctgtttcctcatccgtaggatgggaatgataattgtgcacattttataggggtattggaaagatctatgggatggtgttcgtaggtagacatgtgctgggcacacaggaaacactcaatcatatgttagctagtattattattagctttgcgagcccaagcttgttatccaactttccgaagctgcagcagttccgtcgtccgtgtaatggggacaataattcctgggggtctgttcgtccggggtattcggagaggtggaagtaaagcacgggtcacgcaataggcaccggtggctgttgttaccgtttattcctgactctggggcagtgaggctggtcgcctggcccgagagcgactcagggaccagtcctggccttgcttgaatacaaacttgtctatgctcgggaagggagggggttgggagctcaggaaaccctaggcgcagggctctgggaaggagggagggggt

SEQ ID NO: 7487 - DNA, 1055 bp, Artificial sequence
  DNA replication origin
cagaggctgagagcacagcatggacatgtggcccaatcctgcaaacaaagccaggtccaaggctagttgcaatggctggcagagaagctgattttctgctagaactagagctgtgaggctgtgagcctggatctgccagggtctcatgtgcgcatgaaagcgtagttcatgtggaagacagcaaaactgagacggggagtccctgagaccctgggactaaagccaggcctgaagcagacaggctcttcatgtacacagcggatcaaccctttgtgatttaagttagtgtgaattgggttgtcttttacagcagaaagcaccttgactaacccatgtagagaagagggtgacagtgtgagctaagcagtagagcctgcaatccgtgagaggacaatcagaaggggcagaggagacattgttgggcgggctgcggtgggcttctgtgggggccaggtgggagagttgggggtgatgccaaaggggacagtgaaaagattttgtgctcatggattgggagaggctgtcagtattcagggcagaaaaaaggcccgggatagcgctgcatcgggggaataccagaggcggacaggcagcaaagtccggtactgacgagccattaaggcacctgatgaagaaggcatgacaggtggctgagagaatggcgagaccacggggataaatggagttgggagcttggaagaggtaaaatttagtgccagacgtggtaacttgaggaggaaagttctaagaaaaaaaccggagggtagggggaaatatggctaacatatctgagccaagtgtgtggatttgagagccatcaatcaaggagagaaagcagaagtcaagggatgagatcctcccaaaggtgcacctcaaaggtatatagtagcaaattcgaatccgtatctattttgcctgaggctagttgtgctaggacacacagggttgctgtagacctcgagctgacagcaaagacctctctgataatcgctgttggtcgtttcatctcccacagagaaatctggtggaaatctccaccagctggaacctaacat

SEQ ID NO: 7488 - DNA, 1213 bp, Artificial sequence
  DNA replication origin
gctcgcccctgagcctaggacttgcgccctctttcctgccactccccccgtgcgcccggtgtcccagccccggcgcccgccccatagcccccttctcccagagctggcgccgtctcacgcccgctgcgaacccccggctctgtctccaagccctcgccccccgcagccccgcactctcccgcggagcccgcctccacctcgcccccgcccttccagccctctcccgcacggcccccgcactcccgccgctggattccagccgagattcaagctcccgggatcccccttcccgggcggtcctgagccggctagtctccaggtaaggaggcggccgcaacttcgcggcctttcccggagacggggctggctcctcttggcagccacctgcagcctgacgcctccgggagtcccgggcctggccacggggccgcccgagcgcaggttaacattcctggatgcgcaggttaggaccgtgtggtgtagacccacgacgttgcttttgctggtgaacttgcctatgtcctgatcttttaaataagctgggtttgtcacacacacacacacagagagagagagaatggatttgcttagggtaggttgcctgctttgcagccgcagctgccttttaaattgtacctgtggatggtaaaggattcacggtgcaggacgtggagccatattttcccgcttcggctgtgagttcagcgattgcgagggggctctgtagtgagtgaggttatcaccgcctggctagccagtgtctttgtggaaaggcaaggatcctttgtaagcattcaacaagtaaaatcaggagagatggggaatcagatcgagctgtgaatggggaagtgtaggggggtggatgggggatcggagagtgctccacaaatggagccgtttgttgatatttgcagaaggcccgtgggtgtgaagctggcagtgcggagcccaccctttcaaacgggatgcgactgcggtcgggcttggcagtaacttaccctcctcagaggtgttggtgcccaatcgggacatctgtgggaaggggatttatagcagatggatcaaaaggcctcgggcgcggtggctcacgcctgtaatcccagcactttgggaggccgaggcgggcggatcaccagaggtcgggagttcgagactagcctgaccaacataaaaaccccgtctctactaaaaatacaaaattagccaggcgtgg

SEQ ID NO: 7489 - DNA, 661 bp, Artificial sequence
  DNA replication origin
tcgacctgtggtctctctggcttctggtcgggtggggaaggtttatggggtggaacgtgagagacaggcttgggcacttttgcgtctggcagttaggcagcaggtggtagtttccatgatggggacgcaggggcagcgccaaagggccccagagaacgaggcatccaagggggaaggggtgtgggatacgagccgactgaggggagacgcgcccaaagccggggacctcactaccccagagtcgaccttgaaagagccctcgagtcagactgaggagatgggcagtatcctccgacaatggaaagccgttgttcgcttcaggggagacgcgctgtgacccaaaagtcattttaccgtcatcactattgctgcagttcattcagaagggttttgggggaggccattgaaggctgagcagcagcccagggagagttgatgggggctgatggtgggagtggcagcatggattcagtggatgatgagggatcagggagtggggcgagttgaggattcccagttttctggtgtgggctgtaggcctgtctgcagatactctcacctagtggaattcttttccgtaacctgtcttaacttaatgagaggcttgatgggtaaatggttaaagatgcacgtgcacatcccttcaccaaaccattcagat

SEQ ID NO: 7490 - DNA, 890 bp, Artificial sequence
  DNA replication origin
cttgttcgctgttgtatttgtagtattcagactagccaattattggatgaaagaatgagagcaatggcagagctatgcacgactgggggacggggagacaggtaggggaggagcacctatgggagcactcaggaggaggcctggagggctcagggaatgctcccaaagagagcttgggttgaattttgaagaccaagtaggagtaggacatgggaaaaattgggaaagggaatccccagtagtttggtgggagcagaaggtgcgtttgggaacatgaaaggagatgaggagggaatgacaagaggggaaagaagggccttgtgtgccaggcagagaagcctggctgcattccaggggtgacagagcgccttggagggttgtcagcacaggagtggtgtggttgggctgtgttttagagacgctctgtgtggggagtgtgggggttacccaggggctggaggagtccaggtaggggctctgtgatgagacatgataagaagctggctaaggtgctgaggttggagggaagggcctagacccaggaaacatttaggaggtagagtgtgcacagtttggtagctgaggggatttctgggatggacaagaagttcaggttgagtttctgatttgagtaaatgagggggtggtgacatcattcacagaaagagagattaagaaaagagtagtggcttcaacaagttttgaggaggtgctaagtgccattgcagatgtgctgtgcatgtgggatattcaaatggggatggctgtagacaagtggatctatctctagatctgagagtcattggcaaataagtggtagatgaggctgaggacagaaaaatgtcgggtattatgcacatgaaattgtatgaaaaacaccacctttaagc

SEQ ID NO: 7491 - DNA, 1176 bp, Artificial sequence
  DNA replication origin
ctgcgggtcgggccgacctcctcccggacgggctgcgtcctctgccccgcgccgggggcgggccgggccggcagagccgagccgccggcgtccattttctgggcggtgctgtgcagcgctgcggccggactcacgggtccggaagcaccatggacccccggggaaacgcgccggcggcgaaggagccgagccccgtaagtgcccctcgcagggtcttcgcggggccgggggcggggcggggcgaggcgcggcctgcgggcgcggcgcccgtggcgccgccagcccgatcgctcctcgcttctggagggagccgggaagccgggctggggaaaccctcgcaagggttgagctctgcaaacgcagcagaaccgagctgcccgcggggaggaagcgcccgcaggtgcccggactccggggcccgcgcccggagcggggcggggcggggtgggttcggctggagagtgcgggcaggttgcgccgcatcccgtggcccaactgcgcggctgtgctagagggcgggggccgaggaggaatgcgctcccggggctggggacgtggtgggctcgagtccagcgggctcgggcactgctttgacagtcacacctcccgtctcctggattgggaatcggaccctagtcctgaccctatgggaacttgatgatttccttgatgcaacaccaagcccctggaattgaaagggacgtgcaaaggcagggacctgcccccaggggtttgcagtctcagccgcctacttctgcagtagtaaggtctgctctgttggtacaacatacaacacaaccgcccgccgttagccactttttttatagggtacatcataaatcacctgagattttagtctgtccgcggttccactttataactcctgcactgcggtaggtaagtgcctaattccattctggacgttggccctaattgagtatcccttctaaggatcgattataggtgatatgtgttatggtgccttatacatattttaaaggttaaagacttttcttctgtgaagctcaactacttggtcagattctcatggttacaaaatgtggaagagttttgtcctggtttcagagaagcagctagtgagtcgctatatctaagtgtagcgtttttcaagagtgggggacccattctaagattgtgggatcagtttagcgggtt

SEQ ID NO: 7492 - DNA, 1083 bp, Artificial sequence
  DNA replication origin
agtagctgggattacaggcgcctgctaatattttgtatttttagtagagacggggtttcaccatgttggtcaggcttgtctcaaactcctgacctcagatgatcctcctgcctcggcctcccaaagtgctgggattacagacgtgagccaaggcgcccggccagtatttccattttttatgtgccggcctccacaggattgtggaagtgattaaattaattaatatgcaaagtgctttgcaacttgaaatttatctgataaaagcaattttattcaatattggggaattcagacagatgaaaattgtaattggcaatatttatggtgaccatcctcatgtaatgttgatttataaacatatatctttttatagtatagattgttccttttgtaaatgaatactgagggcctgttctgtgtcaggcactgttccaggtgcttaagatatgtcagtgaagaaaatcaaagattggtactcttatggggcttacatttttgcaagcagacagacaataagtaagtccattttgtatgcagtatattggaatgttgagggccgtggaaaagtcaaaaagcagagcagggcaagggggatcgtgagtacaggggaaggcggcaggttgccttttgggggatggtgagtgcagaggacagaggcatattgctttttgcggggattgtgagtgcgggggacggcggcaggttgccttttgggggatcgtgagtgcaggggatggcggcaggttgccttttgggggatcgtgagtgcagggaatggtggcagcttgcttttttggggatcgtgagtgcaggagacagcagcaggttgctttttttagtcggggtgagcctggtttgtgtttcaaatgcatggtcatgtcacttactcgccagacatttactgcgtgctcctgccatgtgctgcggcctggagatacagcagtgaacagtgagcagcctagagaagcagctcctcctggagcttactttctggcgggcagagtggacagtaaacaagcaggcaacgacgggtgataattgcaggttgaggtaagcagtatgaagaaataaacaaggtgatgt

SEQ ID NO: 7493 - DNA, 998 bp, Artificial sequence
  DNA replication origin
gccgccccgtcgaggcgacgccgccccccaacacacccccttccagcctcaaccgcgcccggcccaggccccctcccgggcccgcgatcccagcgcagctcggcgccgccaccgccgcgaacccgccgccccctcagcctcgcgcccagcgccgccagggcgtcccctcagcccagcccccgcttacagatcttgccccgcaggctctgcaacactcgaacctcgcgactgtcctggtccccggcctcgggctctgcagtcgcactcgccgctggcgcctcggaagaagccgccgcagcagcaggcgccgccgccgccatggtgccgcccggcccgtgccgcagccctgccgcctgcgtagccgggcgaggcggagcccagcagcggcctaggcccaggccagccgcgcgcctggccccgcccccgggcctcggcccgactcgccccgccccgccccgcccgccgcggccccgcccccgccccccccgggtctccattcaccgccttcgccacccccgagccgggctaccctgcagagaaccgtactcccggcttggggcgctggctaagggtagctcccagtcgtggctctgagcggccttaaaatccccaccaggagaacgccccggccctcccgtgatccctaaatcctcccgggaattgggctcccccaatgaatagacctgcacatctcctaacgctcgcgggaaatacaggcccttcccaatcagggaaactccctgtgggaagaaaatagaatggaatttggcaggtgggtggacctcaaaagtatcttattcaaaaggaggcaagagatgcatttgaggctcttccagtattatccaaatactccccgccagcaagccaaactcctcccacacaaatactctttactaggaccaattctctgcaaaacctggttcaagaaaaggaccagccacccccaactccagcgtgagtgcagtgcctgagaccctctcatagagaaattctgaagc

SEQ ID NO: 7494 - DNA, 942 bp, Artificial sequence
  DNA replication origin
gagtgcgactgcagagcccgaggccggggaccaggacagtcgcgaggttcgagtgttgcagagcctgcggggcaagatctgtaagcgggggctgggctgaggggacgccctggcggcgctgggcgcgaggctgagggggcggcgggttcgcggcggtggcggcgccgagctgcgctgggatcgcgggcccgggagggggcctgggccgggcgcggttgaggctggaagggggtgtgttggggggcggcgtcgcctcgacggggcggcgtgggccggggctgctgctctccggagggagtgggagctggagatgggcctggggtgggagagcccgggctgcgccggcgtgaggggctcggtcgtggggagcggcctggacgcggggacgctggagtccggggcgcggccgggggcgcggtccgggggcgtgaggagcttccggccgccctcagactcaggccttcgcgcggctgcgggcgctggggagtggccccgcggtgggagccgagcagtaattatacggaggcgcggcccgaggaggtggcgggctgggaagtggggctggcccgaggggagggggctgttcgtttcctgggctcggcgagcctgggagaggttgaaaaaggcgccctgagctgcaggaaacgggccgccctggggcccgagtggctaccgcgcggtctgttcgcgggtgagcgccccgggaggagctcggcgggacacctgtacttgccccacctcgctgcggccgggacttgaatcgagggacggcgtgacaggcgggactaaaggcaggatgtagtggcttcctgtgagcaggtctcaaaacacaatcacccagcccgcactcagcccgcttaattcccttccttctcatgcgtgtaattgctactttagtgagcgagcctaccagttgactaaatacgaaattttgctcagagt

SEQ ID NO: 7495 - DNA, 1433 bp, Artificial sequence
  DNA replication origin
gagtaagtttaagcctctgtggttttgaagaactaccactgctaaagaatctatttgtgattggagagttgtaatggatttggctatgtctgccaagttatttgtgaggtctttggagagggattggtaatagaaaacggaggtggctaatctcgcaatcacagttccaacttctgtagttattccaagggctactaacagaggtgtgagttatatagcatggcggtgtcagataggggtattaactgggattggtaggggctggtctcctggggcagtgttgatttttggactgaggaaaaccagggtgcaggtgcctctccagttagaggagaggcaaatataagttgaggtaccacagaggaaaagtctgccttggcttggtagacagaacttgttgcatatgctgaaaagatgtactgttttgttattttcatgcatccatacttctagggtcccggctagggctgctgctgtaagtggttgtaaaggggtgtttggtttgggctgggaggcttttgggctgttttttcccagtgtgagaggaagcgttttgtgtttactaagattcatgtgggagtgtggctggatgttgggataaggagacagttgcgggtggtgggtgcagggatggtgcatggagaggggagccaagggaagagggataaacaggggagacattggccattgcactactctgaagttttgttaatgaggtgggaggtgttaagggctggggggctggagaaaggaagcctgtctttattgttggcagctttgagagtagtatgtttgctggaaggtttgagttgtaaggtatagtttcacagtttggaatttaggtgactgaggggactgccagagggtagatgtcattggtcgcacagtgatgctggataagataagattgagtgggttgttatggctcctaatacgggttttattacggctgtggcagggggataggttggggataggtcgcgtaagtagggatgtaaagttgtaaccaccggaccaaactcgctagctaacttgggggagatttttgttaatgcctgtatgttgagtttgagggggctgttaatgaggattttaggatggtaggttacttgggtggaagttcagttataggctgaggcagggattatattgtatgttgtggagtggagggatacgcagaaccagaagtctcttgccagggaggaactggagttttttagtttctgtataggtgtttaggggttgtaggtattggttgggccgaaagaagggttggagtattaattatgggacaggttagaaaggcagaaagtgagcagaaaagtaaatagtttgattttgtccggagtgaagccgtagagagagccttggaggaaaagttcggttatccactcgaaaaaggcttccagagtgttgttccatgggtggaacca

SEQ ID NO: 7496 - DNA, 2014 bp, Artificial sequence
  DNA replication origin
ggaagggatgggggcggtccttgtgggggttgctcacagtccaacttccagtggggtccttcacagagggggcacagcctggtgggcttacctgggttagggcattgtctggactagcggccttcactgccacacttgaaacaggtgccaggtggaggtggattgctaggaggtttccgtgtggagctgcggccccatgggcctgcagggccccagatgacagaggtaagcatttgaaactctgcctgtttttgcctttttttcctcatcatgattgttaaagactttgaaggctaaattaagaaggtggggtttgagggccattgtcaaccttctgaatcttgtgctgaatattggtggttttggctggggactgcctttgcaccagtaggctgggcaggagcctggtgatatggtatcagcatgtgcctgagctagggtccagatacagtccaggtcttctggggtgggggtggaagagaggataacatagaggtcatgccaggttagttcataagactgggtaaggtactgaaactccctaatataagaggcagagtcctctggaaatgaactcctttgttaattagagagagatcagtgagggaaaagggagcatgaattttatcaataccttcagctcttgctacttcccagagaggaagcaagggagctggttgccgagcatgttgggcctgagaacgggtgaggggcggagacggagaggactcagagtcagaagcggggtggttagagagagggggagagagggggagagctggagcggggacttacggtggagggttatgatgctgttggggagggggaatatcggtggggtcaaaggaagaggaatcatcggctggggctgtgggagtgggggcaggaggcgagtcaggtttggagagggcaaggagaatttggaaagcagaacaggactgacgagggaagggcagctatggagggtgaagaaatcctgaacataaggaatttcagaccatttcccattgcaatggcaaaagttgtctaagtttttgagcacgtcggaatagaaagtgccattttcgggacattaggagccacggtccaatttgtattgaggccatgcagtattacagtaaaaaataagccttttagggcggatttctgaacggaggccaagagctttgagactgcggaggagacacctaagaagggtagtcttggaaggggtagactgagaggctctcacagtgaatggaagggggctggggtagaggaaaaagagactgctggtgacaaggatggcaggagagggcatcccctttcccgtggaacttgtctggaatagaggagataatcgccaagtcaggcgtccctgaaacggaggaaccagaggcccggaggccagaggaaacccttggcccagcgctgggtcttttggaaacggagagacggacggtcaagggttccggggaatggtaacagtctctttttcactcaccctggcggaggctttgatggtggatgaggttgccagcaatgggagattctaggagagtctctgggtcttcggcaggttcaggaaaggggaagttggcttggagaggggtgataggggagagagagagagaaagggagaaagagagtcccagccagcatctatccccttcccgggttttggcaccagaatgtaaggtcagccgagagaaaggacaagagagagagacccaagttcaggcgagtaagtttattgaacctgctggctgcttcattacagacagaggaggcagccctgagcttacaaaatgaaggatttatatgggggagagagaccctggggttgtttgttggtcaactctgccacatatcaccttgtgacgtttatgatactaagggtgtaggtaaagtttgtttgtgctttccgtgacctccccttgtgcagtctggatggtttgtaattggggtttgctttatagcagtaaggcctgataggtaaagtctgctggcttcaccgtgctgcctagataagggc

SEQ ID NO: 7497 - DNA, 1054 bp, Artificial sequence
  DNA replication origin
ccacggtggctggcggcctgcgggcggcgctgtggcccgtcgggcggctccacagagccgccctagccttccgccttccccaagccaacgtctccgccgtcggctccgcggcgccgccatggccgacgtggaagacggagaggaaacctgcgccctggcctctcactccgggagctcaggctccaagtcgggaggcgacaagatgttctccctcaagaagtggaacgcggtggccatgtggagctgggacgtggagtgcgatacgtgcgccatctgcagggtccaggtgatgggtaagcgctgcacgcgagtccagggccgccctgcggcctccgggagccgacctcggggttgggaagggacgggcgtccgtcagaagcctcggaaagtgccctgcctgggagagtgggtggaggtcgccctgccccggcgccggaggaacgcggagccacgctcctgctgcggctcctgagggctgcggccgccgcctggggctgcggggttgtgcaacaggcgccctgcgccgggtggttggtgttctagggagagagacgggcaataaacggagttaaacaaggtaatttcaggtagtgatgggtgtgaccaagaaagtaaaaccgggtgattgttgggaactagcaggaaacacttcggtttgtgtgtccagccccagccccacctctaaaagctcaacacaaggtggtcagggtaaaggccgtgattcagcagtgaactttaatagtcttggtcaccaccaaagtgatgctccagagtcatcttccacaaaacgacacccttagttctcctcgagggacgcaggaaagtgttcatagccattgcatttccggattagcttaccgccgctcttcgaatggcttttaaatctggattgatttaagacgggtcagatagcactagcgtggcttgaagggaacagtgtggttcaagaatatctaagtttcatggaagctgaagaattgtaagcccttttttcagaaacgtaaaacttcacctccatcacacccccctctccatattggatgccatttcctgg

SEQ ID NO: 7498 - DNA, 1082 bp, Artificial sequence
  DNA replication origin
cccacaggagagggctgggctggagatactcactgggagtcaccccagatataaatggcctttagagccacaggactgggtgtgatcactctggggtgagggcagagaaatctaaggactgagccctagagtttgaggaggtgagggcagtggggtattaggagagacagaatgtggatcctggatatcaagggaagaaagagtgtcaaggagaaaacagtgattactacggcaaatgctgctgagaggtcagtgggataaggactgagaattggtcagtgaatttaacaacttggaggtcacgcagatgcttgacaagagcagtttctatgaagtagtgggatgaaaaccttatgagagtcagttcaacagagaatcaatgaattggaggcagctagtgtaagctactcttgaggagtcttgcttaagggtgtgaccactggagtgagtggcagtcaaggcaggggtggagagcacatcactggaagagatgagatcaggggatggagaggccagggtatgagaagcatcagccatgtgggtattgaaatcaccaagaattatcaagagtagtgatggagagctgggagctagcaactcagcgagtgatttgtggggctgcaagaagacacagtgactgctggagtccagtcacatgagactcaaagctgggtgtttttagggaaggaaggagagcagcaatgaagagaaatgaagacgtcttgcatgttgccaggtccagttggatgaggggagcagaagtgttgcagaagaaacagtgtccttgggggagaaccaggttttagggaaaacaaaatggagggaatttgtagggaagggaagaggacggaggaaattttgttggtgtaaatattggagggcacagaggacaagtttcagaagtcaggaaggggtgggagttgcaggaataaaagggaatgtaaagaactacttggaattagagttaggagaatgtgagttgagctggaaaactgggtttcttgtgttgaggtatctaactaggataaagggcaggatgagattgctggactcaaagcagatggtggtggacagtgttgggg

SEQ ID NO: 7499 - DNA, 1292 bp, Artificial sequence
  DNA replication origin
aggcgctggtcacgaaatccttaaagggctgctcttgcaagaaagccatggcctcagccttggccagcgtcactgcagccactcgctcttcctcagtggtggctgcttggcacttggtggccacggcctggctgaggaagggttgcgggttccccggggcaggggcactcgcacaagtggccaccagcccctgcagcgcgctgtctttggtgggtccctcctcggccagctcccagttctgcacgtcctctaggaaggttgccgccttgcggaacgtgggcactgtggctaggaagtcacggaagaggcggcgaccgatgggctgctgctcacacaggctgtggaagttcagggacagcttctggcggagctccgcgcagccctgcagcccgggcagggccaggctacgccgccgccgctgcagctctttgctgtcgcagtccgagggcttccgggcctgcaggtaggcggtgttggcgatcaggttgtccagggcccccatgtccaccatggctgagcacggggcgcactcccagggaaagcacaagagggctggagggctgctggctgctttcccttcccgggtgagacaacgtccaagggatttacagtgagtcctgtggcctgtgggtgggacccgtggagggtgtgaaagaggtttctcttgtaagaagctttgactggctatgtatagcccgccaggaactgcacacgataggtcatgctcccacctgccaaggcgaaagctgctgggacacctgccggggccacctcccccactggtcccttcatcttagggtctttctccacatagccctgtaccctgaatatctagctagaactgtgttccaaggaagtgatcataccgttgtcatctaatttgttgctgatgcagtagtttaatctgtttctaattttacttgtttcctatcagcctcaagctatgtaaactcctaggaatagcaggtcaggcagaggaactgtgagaagtcagagcagtttcctcccaggttctagcagcctgacacgaagagcaggttacagaggggatgttgtgagctttgagtcccgagatgtgttcccagaggccctaaggactccagtgttggccagggcagatgcaccctgaatagcttgcagaaatcctgcagctgtcttagctctgaggagtctgtgacctggagtaccttgggttaaaagaggggccatctccgggcggatcacgaggtcaggagatcgagaccatcctggctaacacggtgaaaccccgtctctactaaaaaaaatacaaa

SEQ ID NO: 7500 - DNA, 1447 bp, Artificial sequence
  DNA replication origin
gcgccccaggaattctccggtggtcgggttgtagatgaagagcttccactcggccaggctctggttgagggacttcttctcgttcttcgtcatggtgtgcgcgcggacggcgagaggagctgcggccgcggggatggaggcggcgagggctgcggaggcgcgtcccggctccggcggcgcagcccggagacggcagtgaagggtgggacggccgagaacacctcctcgttacggggagtactcgagccgactgcgccgcgccgcgccgggcggccgcttgggccgcgggagcctgacgtctccgcccgccgcagccaatccccgcgccgctcggcccgcgccgctgccgcctcccgccagcggccggggcgctgcctgaggcggcgagggcgccccaccccgccccggccccgccccgcagtagcctcgggggctccctcagcctgggtcagaggaagcgagaagaaagtctaaaaatccgaaggtttagtcgcacgcacgtttataataatagcaaaaggcgggcgtccccgcgccgcaggttgcttaggaggaggactgggtttcctgggcgttcctgggcgccggggcgctgagaagatgctacccgcggcgggcgggtgcggagagcacgaaaacgactccagtcggcccgcggcttcctctctgagggaacttaatcgtcccctccccgaactgcctccccgaccgtccccaggcgttctctgggctctgtgacgttcctacaggacgctctctgggctctgtgacgttcctacaggacgctctctgggctctgtgacgttcctacaggacgctctctgggctctgtgacgttcctacaggacgctctgcgggggatcgcgcggggctcccacaatgtacacggtgcactgctgttctgagaacgtcctcgcttggctcccttgaagggttcaaccgggagcctcgggtcaatgggaattccgttctaaatatgccagtgaatggagtataatttttctcgggattcagttgaatttatcaatgaaatctaaatacgtgctttcccaagggtcctggcaactgaaagctcccagcttttgcccagacgctcctactcttaacccacaggaaaggaacactcgttggagggtccacgcctgtgtagtgtcgccggcttttcatctcccctgtagagatcgcggcccttgggcggagctgagggtgccggtagcgttttcctccgcgagatggagctgacgagtacgggagggggggtgccctcagactcagcgacaggataaaagactttataggaatttgcacagaaggtgcggggtgggggaggttgttgttgttgttgtttatttatttatttttagaaaaaagctctgcctccgttttattagcaaataaaaattatggagaaatgtaatagccatcttattgtttggagtgatgaatt

SEQ ID NO: 7501 - DNA, 1375 bp, Artificial sequence
  DNA replication origin
gcgcgcactgtgctgctccgccgccaaagctcgcgcgggggaagcggggctgtagctgggcagggagagggcggacgaaatcggtagcgatctcggctgcggcgctgccgcagctgcccggcccgcggggcgcgccctgacccttcatctttgggcaggctcgagggcgcgcgcacggttggcgttctggggcctcaaactcctgggccttgaccgggcaggccgcgtctccccgggtgtgagtccaccgggacccggccgccgcctaagcgcgggcgccacagaagcggcggcgcccgaagacgcgctcctggctcggcccgacagcctcgcttggccgccagttcttctgcagccgaaggcggtaaggtctggggcgagggcgcgggcccgcgcgcggagggcctttggacccggccgggcgcgttcctgggtaggtttccctccctgcgcacaggggcccccttgttcccccacgagtcccatctgtttagacctgggttctccaggcctggccgggtaacccgtgagtgtctgggccagagtcgaaagcagaggagggtcaccctcttagtgcatagagcaaatcgggggaggtaacgtccctgagtcacgcctcgtggaagaggggaagggctgctttctactttctcgttctcttcaaagaaggatggcttctaaatctggttttccgatttttcccttctcctttcatgactcacaggcctctgtgtccaccaggtgttttgtttgtttttaaagagtttctaagctttgtgtgcttggaagaacctcatatgccccataaaggaacttttctctgaagtagaggatcgctttttgggcccagactcctttgagaaaatctggaaagccaaggtctgtcttcacaaagaagtgtaagggttttcctaggatctcgctgagagacagtacaacgaagtggatgagcgccccagtctctcttaccagcctgtgctatctcccattgtgtgatctcggtttcttcatctgtaaattagatgcatccacctattcggtgtgtttcggggagtgaatggactaatgtatggaatgcaatcgtaagaaaatcctccacgtattaaatgccttgcattagttaggcacttttattattgactgccatggatgctggtttagaaaaagaccctatattatttcccttttagtgttgagacagtgaacgggctcattccttttccatattcactgctgaagctgcctttgagcccatgaatacttttatcttttcctcattccatctcagagggcacagactccctctcacttatttgctttctttcagtaaggctctcttttagctcagccttctccttcccctgtctccccgaga

SEQ ID NO: 7502 - DNA, 813 bp, Artificial sequence
  DNA replication origin
ctgcggcagcgccgcagccgagatcgctaccgatttcgtccgccctctccctgcccagctacagccccgcttcccccgcgcgagctttggcggcggagcagcacagtgcgcgccgattggccctcagaatgtgcgacgcctggcgccgctccccacggattggccgggccggcagtgcgtgcacggagtaaacaaaccccgcccccaggcttccctttgagagtagggggccaacagatggaggggcgggactcgtgcactcagccaccgccccttggttccccctgtggcctccctgggagccctccgcaggacccgaccaccccgcttccccgccgcctccagggacagctgcgggcctgaggcctagaattttagacacacttccttcatcactcctatctcatcccccctactcccaccctgcgacttgggtgggaatctcttttccaactgaccccgaagccagaaaaccccagctctcttggaaggagggggactggggcagttccattcggtccccaggcctttgcggggtcgccctgggggagcatcaataagggacaggggggcgagtgatcgtgattgaggctatgcgtggggccaactgtgggacaccttgaaattattcagacaatgagttagagaccactgggaatgtggaggttcttcaatatcaaggcaagttaatacccaaaccaggacaggtcattctgtcccgcggaaactgcacacaccccaaatacccgtacacttggttccatatgaaaagattttgttcattcgttcgtgccgaagttaaaaaccccgtgt

SEQ ID NO: 7503 - DNA, 1340 bp, Artificial sequence
  DNA replication origin
cgcaccgcgcgatgcccagtcaccgctgccgcgctgccgccgcagtcagccgcgccgccgccgctgccgcagcgcgggcggccgcgcgccggtagcaggggcttggcgaggaagccgctgagcctcgcgcgctccgcgctcctggcggtcgcagcgctgcctattaattgattctcttattgatttatttaatttttaggagcggctgctcggaggcacgggtcttctcctaaacctgcagcgacgcccccggcgtgggcacaaaggctccgacggcggccggcgggggctgcccagcgcccgggagccggcgccagaggtcgcctgcgcgcgccctagccgagccccgggcaccatgccgcggcgcctgcagccccggggcgcgggcacaaaaggccctccggccccggccccggcagcttcgggggccgcccggaactcccactctgccgcctcccgggaccccccagcgtctgccaagccgctgctgcgctgggacgaggtgcccgacgacttcgtggagtgcttcatcctgtcgggctaccggcgtctgccgtgcacggcccaggagtgcctagcctcggtgctgaagcctaccaacgagacgctcaacttctggacgcacttcatcccgctgctgctgttcctgagcaagttctgccgtctgttcttcctgagcggcggcgacgtgcccttccaccacccgtggctgctaccgttgtggtgctacgcgtcgggagtgctgctgaccttcgccatgagctgcacggcgcacgtgttcagctgcctgtcgctgcgtctgcgcgccgccttcttctacctggactacgcgtccatcagctactacggcttcggcagcacggtggcctactactactacctgttgccaggcctcagcttgctggatgccagagtcatgactccatacttgcagcagcgcctgggctggcacgtggactgcacgcgccttatcgccgcctaccgcgccctggtgctgcctgtggccttcgtgctggcggtggcttgcactgtggcctgctgcaagagccgtaccgactggtgtacctacccgttcgcgctgcgcaccttcgtcttcgtcatgccgctcagcatggcctgccccattatgctcgagagctggctcttcgacctgcgtggggagaaccccacactcttcgtgcacttctaccgccgctacttctggctggtggtggccgccttcttcaacgtgagcaagatccccgagcgcatccagccgggtcttttcgacattatcggccacagccaccagctcttccacatcttcaccttcctcagcatctacgaccaggtgtactacg

SEQ ID NO: 7504 - DNA, 763 bp, Artificial sequence
  DNA replication origin
gcggcggcggcgcggctgactgcggcggcagcgcggcagcggtgactgggcatcgcgcggtgcgggtgcctccgccgccgccgcccccggagcgggaggtggggatgtgcgagccgaggcgcggagggagggacgggcgcaccgaggaagggcgggggcctcccaggctagggtttcgcggccgcttcgggggatagagttgtcccctgtctcgagttccgtaccatccccctcctcgggccgccgcagcccgggccgccccgttaatgattgatgcgggggccgcaggctggtcggcgacgcggcggcgcgcgcgccgagtactagagtcggccctggggttcgaaacccgacagccacgcgggcgttctggaggacactggggagccgcgttcgcggggggcggggagctgcggctgcggggggaggggagggcgccggagccgggcagggcggagagatgcgccagcggtaatctccggaggtcgccggggaggggggcactccggaagtcggggggctttaagcccgcgtccggatcggggccgtgtcattgtcagctacctggggatgcgcctctcgctccctcactgtctttgcgtgtgtgttagtgtgtgtgtgtgtgtgtgtgtgtgtgtgtcggcctgtctacgcactacacgaaggcttagttggtcttctttcgtctagtgggcgcactcaggtgcgtcaccattctgccgtttccctcgcccttgtcctgtccgaaagaaccgtccgcaag

SEQ ID NO: 7505 - DNA, 754 bp, Artificial sequence
  DNA replication origin
ccgtgtcattgtcagctacctggggatgcgcctctcgctccctcactgtctttgcgtgtgtgttagtgtgtgtgtgtgtgtgtgtgtgtgtgtgtcggcctgtctacgcactacacgaaggcttagttggtcttctttcgtctagtgggcgcactcaggtgcgtcaccattctgccgtttccctcgcccttgtcctgtccgaaagaaccgtccgcaagctgccctgtggtcgcgctcaccagctcttcgagccgcagctaacccatcttcttgtttttgtgtctttaactaggacttctatttggaactgagtccgacagctcaggactggctgctcaaactccacaatttaatgaaaaatctcagatgatgactcagaaaacctctaatgatctgaggaatatattaagggattccagagtcaaaggctgatcatggagggcattgatgagggaagacttcaggtaggaggtgcattctagcaggaactgaagagaatgaagtccagttggtagaaacggagggggtggcttggataaatcttatatgtaattaatcagaagtacctggcaggtggctggagaccagaagaaaggaacactggaagaatgaaaacggttgtgatgcactgcagtgtgaaaatatgcccttgagccttaaagaaaggggcttaaggccgggcgcggtggctcacgcctgtactcccagcacacagatcacgaggtcaagagatttgagaccatcctggccaaca

SEQ ID NO: 7506 - DNA, 922 bp, Artificial sequence
  DNA replication origin
ggggggtcagccccctgcccggccagccgccccgtccgggagggaggtgggggggtcagccccccgccaggccggccgccccgtccgggagggaggtggggggatcagccccccgcctggccggccgccccgtccgggagggaggtggggggatcagccccccgcctggccagccgccccgtccgggaggtgaggggcgcctctgcccggccgcccctactgggaagtgaggagcccctctgcccggccagccgccccgtcagggagggaggtgggggggtcagtcccccgcctggccagccgccccatccaggagggaggtgggggggtcagccccccgcccggccagccgccccgtccgggagggaggtgggggaggtcagccccctgcccggccagccgccccgtccgggaggtgagcggcgcctctgcccggccgcccctactgggaagtgaggagcccctctacccggccaccaccccgtctgggaggtgtacccaacagctcattgagaacgggccatgatgacaatggcggttttgtggaatagaagggggggaaaggtggggaaaagattgagaaatcggatggttgccgtgtctgtgtagaaagaagtagacatgggagacttcattttgttctgtactaagaaaaattcttttgccttgggatcctgttgatctgtgaccttacccccaaccctgtgctctctgaaacatgtgctgtgtccactcagggttaaatggattaagggcggtgcaagatgtgctttgttaaacagatgcttgaaggcagcatgctcgttaagagtcatcaccactccctaatctcaagtacccagggacacaaacatggcggaaggccgcagggtcctctgcctaggaaaaccagagacctttgttcacttgtttatctgctgac

SEQ ID NO: 7507 - DNA, 1070 bp, Artificial sequence
  DNA replication origin
ccggactgggcggctgaccgggcggggggctgacccccccacctccctcctggacggggcgactggccgggcagaggggctcctcacttcccagtaggggcggccgggcagaggagcccctcacctcccggacggggcggctggctgggcggggggctgaccccccccacctccctcccggacggggcggctggccgggcagggggctgaccccccctcccgcctcccggacggggcggctggccgggcagaggggctcctcacttcccagtaggggcggccgggcagaggcgcccctcacctcccggactgggcggctggccgggcggggggctgaccctcccacctccctcctgaacggggcgactggccgggcagaggggctcctcacttcccagtaggggcggccgggcagaggagcccctcacctcccggacggggcggctggccgggcggggggctgaccccccccaacctccctcccggacggggtcagaagccagttcttaatctttcacataccactgagagcagtgcctaggctggagtttccttttcttattctactattgtccccatttctaccaacaaggttggaagagtagaatagtgggtggggaaccaagtggagggtcttctgtcttgttggaagagagagatcactttctgtcctggtccctgaggaaagagtgaacagttgagttggaaggtgatacctgtctgttgcctgaaggcaataagggctggatagttaagaagccattgcatgggccacttccttttgtgttgagacccttgatcatctgttttctgtgtgtcttggacttgtgcttgagcctcagttagactgtatcagcaggaactataagtagggattgtatagtgatttttaaaatgattatcttaggaatcccttctctcccctaagtaacatttgggtctgttgtttgactctttctaacgcaaactgatttactacaaatacattctgtggaagagtcatcttggtcacgagaggcttcacacagcgatgaacttagctatttatgttgcccaccccacccccttgc

SEQ ID NO: 7508 - DNA, 964 bp, Artificial sequence
  DNA replication origin
ggccagccgccccgtccaggaggtgaggggcacctctgcccggccgcccctactgggaagtgaggagcccctctgcccggccagccgccccgtccgggagggaggtgggggggtcagccccccgcccagccagccgccccgtctgggaggtgaggagcccctctgcccggccgctcctactgggaagtgaggagcccctctgcccggccagccgccccgtccgggagggaggtgggggggtcagccccccgcccagccagccgccccgtctgggaggtgaggggcgcctctgcccggccgctcctactgggaagtgaggagcccctctgcccggccagccgccccgtcagggagggaggtggggggggtcagcccaccgcccggccagccgccccgtccgggagggaggtggggggggtcagccccctgcccggccagccgccccgtccgggaggtgagcggcgcctctgcccggccgcccctactgggaagtgaggagcccctctacccggccaccaccccgtctgggaggtgtacccaacagctcattgagaacgggccatgatgacaatggcggttttgtggaatagaagggggggaaaggtggggaaaagattgagaaatcggatggttgccgtgtctgtgtagaaagaagtagacatgggagacttcattttgttctgtactaagaaaaattcttttgccttgggatcctgttgatctgtgaccttacccccaaccctgtgctctctgaaacatgtgctgtgtccactcagggttaaatggattaagggcggtgcaagatgtgctttgttaaacagatgcttgaaggcagcatgctcgttaagagtcatcaccactccctaatctcaagtacccagggacacaaacacagcggaaggccgcagggtcctctgcctaggaaaaccagagacctttgttcacttgtttatctgctgacctt

SEQ ID NO: 7509 - DNA, 1265 bp, Artificial sequence
  DNA replication origin
ctccctccctgacggggcggctggccgggcagaggggctcctcacttcccagtaggagcggccgggcagaggcgcccctcacctcccagacggggcggctggctgggcggggggctgacccccccacctccctcccggacggggcggctggccgggcagaggggctcctcacttcccagtaggagcggccgggcagaggggctcctcacctcccagacggggcggctggctgggcggggggctgacccccccacctccctcccggacggggcggctggccgggcagaggggctcctcacttcccagtaggggcggccgggcagaggtgcccctcacctcctggacggggcggctggccgggcggggggctggcgcccccacctccctcccggacggggcagctggctgggcagggggctgacccccccacctccctcccggacggggtggctgcggggcggagacgctcctcacttcccagacggggtggctgctgggcggaggggctcctcacttctcggacggggcggctgccgggtggaggggctcctcacttctcagacggggcggctgccgggtggaggggctcctcacttctcagatggggcggccgggcagagacgctcctcacctcccagatggggcggtggagcagaggcgctccccacatctcagacgatgggtggctgggcagagacgctcctcacttcctagatgggatggcggccgggaagaggcgctcctcacttcctagatgggatggcggccgggcagagacgctcctcactttccagactgggcagccaggcagaggggctcctcacgtcccagacgatggatggccaggcagagacgctcctcacttcccagacggggtggcggcctggcagaggctgcactctcggcactttgggaggccaaggcaggcggctgggaggtggaggttgtagcgagccaagatcacaccactgcactccagcctgggcaccattgagcactgagtgaaccagactccgtctgcaatcccggcacctcgggaggccgaggctggcggatccctcgcggttaggagctggagaccagcccggccaacacagcgaaaccccgtctccaccaaaaaaatacgaaaaccagtcaggtgtggcagcgcgcgcctgcaatcgcaggcactcagcaggctgaggcaggagaatcaggcagggaggttgcagtgagccgagatggcagcagtacagtccagccttggctgggcatcagagggagac

SEQ ID NO: 7510 - DNA, 1192 bp, Artificial sequence
  DNA replication origin
tgcccgggcggacagcgcaggcaacccccgccgctccgcagcctccgactggaccaaaggaccccgaacacacagctctaggcaaggaaacccaggtgtgcagcactgcccgacccgacccaacccgcccccggtaccagcgcttctggccaacgaggtatttaagcaaagaaagaccccgccgcagccgccgccgccgcgcgaaagcggcgcccaggaggatgctgctacccgactccccttacgccgggcgcccgcaacgcgctcggaccagcctctgcgcggctcctgccagccggcgcccggttggtgcgcgccgccgtctgtcgccgcggctcctcccctccgccgcgcagccctcccccttcgccggccccgcccccgcccccaacgccgagccggctcccaccgtcgctgcgcctcgggggctggagacgcgacccgctttaccgcgacgcgcgggggctgcagtccacgggtccgaaggcttagctctgcgcgcaaagcgccgggatgcgaacgcgggatctggagctcgtcggtgccgagagctgccagagagttggattctgcgtgcagctgccggactcggccccatgtttttgctctcagaaagagttggtgatgaagtttgggcagaaatcccctgtcggccgtccgctccacgcttccctcggggccgacactgccaacctctccgggcactgaggacacctctgcgccctggagcggtgggaggacgcggagcgccgttctctggcttccgacaccctgcccgccctctctagtgggtctgtggctgcgccctctcgaaggaagtaataaatctttctgaccttgggggtcagaggagacgcttcagttttccggaggggtgtgcgggcgggaccgtctttccgctttactggacctctggccggggctgctcttgtttcattgtgccccacatgcggagccccgatgctctccgcatttccgctcgcggtgctgcgtccactgtgattgacgtcctctggaattggggtgatgggggaggggaacgccccgttctaatttgcagaaaaatacttgtcccgcttcttggttttgtagatgagatcaaagaacttgaccccaaaggaaacaccgttgttgaaagaaaatcatttttcagttgctttaggtttaagtacttttgtttaaggttatgagg

SEQ ID NO: 7511 - DNA, 1036 bp, Artificial sequence
  DNA replication origin
ggctgcctccgccgcgccgccggcccggattgtgcctgtgatgagccgcagcccgcagcgagctctgcccccgggcgcgctccctcggctgctccaggctgcgcctgcagccgcgccgcgtgccctgctcccgcagtggccccggcgcccaggacgccgctggcccgcgtcccctctcggaatgaaggtgttccgtaggaaggcgctggtgttgtgcgcgggctatgcactgctgctggtgctcactatgctcaacctcctggactacaagtggcacaaggagccgctgcagcagtgcaaccccgatgggccgctgggtgccgcagcgggggcagccggaggcagctgggggcgcccagggccgcctccggccgggccgccccgtgctcatgcccgtttggacctccgcactccttaccgccctcccgctgccgccgtcggggcggctcctgcagccgcggcagggatggcgggggttgcggcccctccaggcaatggcactcggggcaccgggggcgtcggggacaagcggcagctggtgtacgtgttcaccacgtggcgctctggctcgtcgttcttcggcgagctattcaaccagaatcccgaggtgttctttctctacgagccagtgtggcatgtatggcaaaaactgtatccgggggacgccgtttccctgcagggggcagcgcgggacatgctgagcgctctttaccgctgcgacctctctgtcttccagttgtatagccccgcgggcagcggggggcgcaacctcaccacgctgggcatcttcggcgcagccaccaacaaggtggtgtgctcgtcaccactctgccccgcctaccgcaaggaggtcgtggggttggtggacgaccgcgtgtgcaagaagtgcccgccacagcgcctggcgcgtttcgaggaggagtgccgcaagtaccgcacactagtcataaagggtgtgcgcgtcttcgacgtggcggtcttggcgccactgctgcgagacccggccctggacctcaaggtcatccacttggtgcgt

SEQ ID NO: 7512 - DNA, 1439 bp, Artificial sequence
  DNA replication origin
agcgcgggacatgctgagcgctctttaccgctgcgacctctctgtcttccagttgtatagccccgcgggcagcggggggcgcaacctcaccacgctgggcatcttcggcgcagccaccaacaaggtggtgtgctcgtcaccactctgccccgcctaccgcaaggaggtcgtggggttggtggacgaccgcgtgtgcaagaagtgcccgccacagcgcctggcgcgtttcgaggaggagtgccgcaagtaccgcacactagtcataaagggtgtgcgcgtcttcgacgtggcggtcttggcgccactgctgcgagacccggccctggacctcaaggtcatccacttggtgcgtgatccccgcgcggtggcgagttcacggatccgctcgcgccacggcctcatccgtgagagcctacaggtggtgcgcagccgagacccgcgagctcaccgcatgcccttcttggaggccgcgggccacaagcttggcgccaagaaggagggcgtgggcggccccgcagactaccacgctctgggcgctatggaggtcatctgcaatagtatggctaagacgctgcagacagccctgcagccccctgactggctgcagggccactacctggtggtgcggtacgaggacctggtgggagaccccgtcaagacactacggagagtgtacgattttgtgggactgttggtgagccccgaaatggagcagtttgccctgaacatgaccagtggctcgggctcctcctccaagcctttcgtggtatctgcacgcaatgccacgcaggccgccaatgcctggcggaccgccctcaccttccagcagatcaaacaggtggaggagttttgctaccagcccatggccgtcctgggctatgagcgggtcaacagccctgaggaggtcaaagacctcagcaagaccctgcttcggaagccccgtctctaaaaggggttcccaggagacctgattccctgtggtgatacctataaagaggatcgtagtgtgtttaaataaacacagtccagactcaaacggaggaagcccacatattctattatagatatataaataatcacacacacacttgctgtcaatgttttgagtcagtgcatttcaaggaacagccacaaaatacacacccctaagaaaaggcaagacttgaacgttctgaccaggtgcccctcttcttctttgccttctcttgtcctctttctcctatttcttaccctgtcctccacctgccttccattttgaagtgggatgttaatgaaatcaagttccagtaacccaaatcttgtttacaaaatattcgtggtatctgtgaacatgttaagagtaatttggatgtgggggtgggggtggagaaaggggaagtggtccagaaacaaaaagccccattgggcatgataagccgaggaggcattcttctaaagca

SEQ ID NO: 7513 - DNA, 812 bp, Artificial sequence
  DNA replication origin
ttttcaattcagcaatttaaaatagcaaaatcttgaaattttattgcccaggatatacaaaagtactcatacacacttgtctgcatacccaccaacacaaaatgtcaatgtggacacacactcccgcttgggcctcctctctctctccggctccattttctccgccgccgggggccggggtctcctgtggggggcccagccggtatcccaggtctcccttcagtgccggggtgaacccccgggggagccgagagccgggggcagacgggcgggggttggggcggagggagcagcggccccagcgagtttgtggggagaagtaaccaagcggggggaggggctgagcagggagggggcctcagggcccccccccagctatggactaacggctactggggccgcctcctccaggcggggcccggggggggcctgggattggtgagtggggagcctgggggccctggcgagcctcctggtggcggagaccccggtgggggtagcggggggttcccgggaggccgagggaagcaagacatcggggacattctgcagcagataatgaccatcaccgaccagagcctggacgaggcccaggccaagaaacacgccctaaactgccaccgaatgaagcctgctctctttagcgtcctgtgtgaaatcaaggagaaaaccggcctcagcattcggagctcccaggaggaggagccggtggacccacagctgatgcgcttggacaacatgcttctggcagagggtgtggctgggcccgagaaagggggcggctcagcagcagcagctgcagccgctgcagc

SEQ ID NO: 7514 - DNA, 1103 bp, Artificial sequence
  DNA replication origin
cgggctggggcggagggcggagtaggtgtgtgagagaggaagacggggagcgggaaggcgcgggcctgagcgggctgcgacttctcccagtcactagtctccacaactctcgagctccctcctcctagctccccgccctccgactccggcggcgcctcctccacgccagccaagttatagaggagcgggagggggagggagcgcggggacccgacggtcgcgcgcccgtgcccgcgcgcacgcgcactgctggcttcgcacaagagctgcggcggcagccagccacgacaagtggggtctgcgaggaaaggagggactcacggaaggggaagaggagctaggatgtctcacacccacaagcagcaacgcacgtctcagagccgcacacccttgcttgtgcgcgctggctctcctgagaccaagaaggggagccgggggcggggccagaggggcggagcgagcgcgtcgcgcgccgcccggaaagcgtaagcgggagctcgcgggagcgggtgtgggggcggttcagagagggggaagctcgggctcttgaggtgggggcatgaactcgcggtttctggtttcagaaagagtcttaattacagtcatcttttatgattattgtggtttactggtgcgttcctttcactattgtggaaacggccctttaagggaggagggaataagaagaaatgaactgaggaagtctattgcaaatccttccctctggacggcgcgcgaggcggaggcagagctggcgcgattgcctcccctcgccttatatgggttgggtgcgcgcctggggggtggggcgaggccggggagtgcccgacgggggcttgtgttcccctcagctcgtgctcctcgcggtagggggtggggcctgtgaggaagacggtgagaaaggctcgagtagtggcgggtttgttggagcttcatctttggggttgtatctgtaaaatcatttaaaattttcttgagtgagcacaaaataaagttctcaagccaccgtgttaaagggaaaataggatgaaggggaaccgacgcggcctggtgtcgccaggacgtctgccccaagcgccgcgaagaagccgggaagagtttgc

SEQ ID NO: 7515 - DNA, 1319 bp, Artificial sequence
  DNA replication origin
gcagcgcgagctggcgcagctcgaccagagcatctgcaagcgggccaccggccggccccgctgcgacctgctgcaggccatgccccggaccgagttcgcgcgcctcaacggcgacgtgcgtctgctcacgcccgaggcggtggagggctggtcggacctggtgcactgcccctcgcagcgccttctcgaccgcctggtgcgccgctacgcggagaccaaggactcgggcagcttcctgcttcgcaacctcaaggactcggagcgcatgcagctgctgctgaccctggccttcaaccccgagccgctggtgctacaggtaggcgcggagccagggcagggggcgtcctgggaggggccgcgcgtgggaatcagagtcgggagaagtggctcagccagcgcttgccgccagttcggactcggccgggctgggccaggctgcaggcgtgggaaggggcgtctccgggggagccccggggctgtgcagggaggccgagggcgaccccgctgatggagagtctgctcttgttacctagattcgggcgcatttcggatttgactgtggatctttcaacgccagagggagtgcgtctcttaacactccccaaaatgtctctactgcgagtttccttccgctctctaccctgcctttctgcttttatctgccggggcttgcaggtccgcggcgcagactgttcacgagcccttggacctttcctagttcttctgaagtgttctacaccgcgttcgctcttccttttctggcgctggtggctggcctaacttcggtctcagagtctttgttttcgctcatttacctggcagtcatttggacacctaattcgaggacaagttggggaggatgaagtcggagaacgggacagtggtcggggtgggtttaatctgtgagccgagctttgggtgggattagaatcagaaacaggaaaagtaaggcagcgttggacttggggctgggagggcttaaggccagacagacgttttcatcctgatcctgtgacctgccctattcatctggtaatctagttgaagggagatgaaatattaggccagggcgagtatcagggaaggagattcttgcctttcgccagttgcgttgtttgctctcgtctgactgttttgaaaagtaatgtgccttttaggggaataggatggaatctttactggtgacatcaaaaagagaacaaaaaacaaaaacactgtttactttcggagtatttgcttgtttctgcacattcccacccagcttcagtgcggtgtccttgaacagtgattacaactgtggggttgtggtttctccttct

SEQ ID NO: 7516 - DNA, 1607 bp, Artificial sequence
  DNA replication origin
atttagttaaagcatctcggcctaataagggaactgggcaggtggggataactataaaggagtgctgaaaagagtattgtttaagttggcaccagagttggggagttttaagaggtttagaagcctggccgtcaatatgaacaacagttatggaagcaagggaaacaggcctttgaaaagaaggtaatgtggagtgggtagcctccatattgattaagaaggggacggacttactttccactgtgagagttactcaaagcttggtgtccgtgatggtctagggggcttcccaggtgatcaggcagtgtcagtcttcagccactaagtcgagaagatctgggaaggagtcagtcagagagccttgggccagagttccaggggctctgggagtggctgccaggtgagttgaacagtctgattttcagtggggtcccacacagatgggataaggcttaggaggaatcctgggctgtgggcatcccttggcccagtggccagatttccggcacttgtagcaagctcctgggggaggaggttctggaggaaccactgggagctgtggttcaggcatttggagttcttgtgtgctggagatgtggctggggtttgtctcacagtggaggcaaggaattgcaactcagaaatacattgctacttggctgcttctactctattattgtacaccttgaaggtgaggttaattaagtcctgttgtggggtttgagggctggaatttaatttttgtagttttatttaatgtcaggagcagattgggtaataaaatgtatattgagaataagacggccttttgaccttttagggtctagggctgtaaagcgtctcagggttgctgcggaatgagccatgaactgggctgggtttttcatatttgatgaaagagcctaaatgctcactgatttgggagaggtctgataaagaaaaaggagcattaaccttgactatgcctttagcttcagccatctttttaagaggaaattgctgggcaggtaggggagggctactcacagaatgaaactgtaaactggaccaggtgtaaggaggggaggtgataaaaagattacccggtggaggagtggaggctgaggaagaattcggccctagcttggcctggcaaggagcagcctggggaggaggggagaggtcagatgggtctgtagaaaaggaagattagaaagactcagcgatgcttggggttgggactgagggtacaggcgggagggaaagaaggaagatttgggacgagttgcactgggcacagagactagggagggaccgatgtgtaaaagaatgcctggacatcaggcacctcaggccatttgcctattttatgacaagaattatttagatcttgcaggatggaaaaattgaaagtgtcattttctggctatttggaaccactgtcaagtttgtattgaggtcaagcagcattgcagaagaaaataaggcatttaggttttaggtcaggtgtgagttgaagaggttttaagttcttgagaccacaggctaagggagatggaggaatggagggtggaaggttgcctatagtgaaggaggcaagcccagagaaaagagagagtagagacacg

SEQ ID NO: 7517 - DNA, 1433 bp, Artificial sequence
  DNA replication origin
acgtttggaagttcttgtgtgctggaggtgtggctggggtttgtctcacagtggaggcaaggaattgcaacttttttctattattgtacaccttgaaggcgaggttaattaaatcctgttgtggggtttgagggctggaatttaatttttggagttttatttaatgtcaggagcagattggttaataaaatgtgttttgagaataagatgggcttttgaccttttagggtctagggctgtaaagtgtctcagggttgctgccaaacaagtcatgaactgggctggatttttatattgatgaaaaagagcctaaatgctatctgatttaggataaagaaaaaggagcattaaccttgactatgcctttagctccagccacctttttaagagtaaattgctgggcaggtgggggagggctagtcagggaacgaaactgtaagcgggaccgggtgtgaggaggggaggtgataaaaggattatagggtggaggagtgaaggctgaggaagaattgggacctagctcagcctggcgaggatcaggctggggaggaggggagaggtcagatgggtctgtagaaaaggaagattagaaagactcagggacccttggggttgcgactgaggggacaggcgggagggaaagaaggaagatttgggatgagttgcaccgggcacagagactagggagggaccgatgtgtaaaagaatgcctggacatcaggcacctcagaccgtttgcccattttgcaacaagaattatttagatcttgtaggatggaaaaattgaaagtgccattttctggctatttggaacaactgtcgagtttgtattggggtcaagtggcattgcagaagaaaataagatgcttagattttaggtcaggtgagaattgaagaggttttaagttcttaagaacacaggctaagggagaagatggaggaatggagggtggaaggttgcccatagtgaaagaggcaagtccagagaaaagagagagtagagaaatggagggaaggggttcgggggttcttaccctccagaaaagcaggaaaggggttggggcacagagatatgaagttggggcatggaaataagggattggggcacagagatataagaggttggggtgcggaaataagggattgggttacagagatgtaaggggttggggtgcggaaataagggatcggggtgcagagatataagtggttggggtacttgcccctcccctagaaaagcaggacttgccactaagggtgaaggagaaggggttgggggtttcttgccccccagaaaggtgaagaaggggtagagacatggagagaaggggttggggtacttgccccttccccagaaaagcgggacttgccgctaagggtgaaggaccaaggaaggcgtccctgcatggtctgacacctctgaaatgttgatg

SEQ ID NO: 7518 - DNA, 1320 bp, Artificial sequence
  DNA replication origin
cacttcccagtaggggcggcccggcagaagcgcccctcacctcccggatggggcggctggccgggcggggggctgaccccccacctccctcccggactgggcggctggccgggcggggggctgacccccccacctccctcctggacagggcgactggccgggcagaggggctcctcacttcccagtaggggcggccgggcagaggagcccctcacctcccggacggggcggctggccgggcggggggctgacccccccacctccctcccggccggggcggctggccgggcagaggggtcctcacttcccagtaggggcggccgggcagaggcgcccctcacctcctggacggggcggctggccgactccccccccccacctccctcccggacggggcagctggccgggcagaggggctcctcacttcccagtaggggcggccgggcagaggagcccctcacctcccggacggggtggctggctgggcggggggctgaccccccccacctccctcccggacggggtggcttccgggcggagacgctcctcacttcccagacagggtggttgccggacggaggggctcctcacttctcagacggggcggttgccaggcagagggtttcctcacttctcagacggagcggccgggcagagacactcctcacctcccagacagggttgcggcccagcagaggcgctcctcacatcccagacagggcggtggggcagaggtgctccccacatctcagacgatgggcggccgggcagagacgctcctcacttcctagatgggatggcggcggggaagaggcgctcctcgcttcctagatgggatggcggccgggcagagacgctcctcactttccagactgggcagccaggcagaggggctcctcatatcccagacgatgggtggccaagcagagacgctcctcacttcccagacggggtggcggccgggcagaggctgcaatctcggctttttgggaggccaaggcaggcagctgggaggtggttgtagcgagccgagatcacgccactgcactccagcctgggcaccattgagcactgagtgaacgagactccatctgcaatcccggcacctcgggaggccgaggctggcggatcactcgcagttaggagctggagaccagcccggccaacacagcgaaaccccgtctccaccaaaaaaaaacgaaaaccagtcaggcgtggcggcgcgcgcctgcaatcgcaggcactcggcaggctgaggcaggagaatcaggcagggaggttgcagtgagccgagatggcagcagtaccgtccagctttgg

SEQ ID NO: 7519 - DNA, 882 bp, Artificial sequence
  DNA replication origin
aggggctcctctgcccggccgcccctactgggaagtgaggagcccctctgcccggccagctgccccgtccgggagggaggtggggggggggagtcggccagccgccccgtccaggaggtgaggggcgcctctgcccggccgcccctactgggaagtgaggacccctctgcccggccagccgccccggccgggagggaggtgggggggtcagccccccgcccggccagccgccccgtccgggaggtgaggggctcctctgcccggccgcccctactgggaagtgaggagcccctctgcccggccagtcgccctgtccaggagggaggtgggggggtcagccccccgcccggccagccgcccagtccgggagggaggtggggggtcagccccccgcccggccagccgccccatccgggaggtgaggggcgcttctgccgggccgcccctactgggaagtgaggagcccctctgcccagccacgaccccgtctgggaggtgtgcccagcggctcattggggatgggccatgatgacaatggcggttttgtggaatagaaaggcgggaagggtggggaaaaaattgagaaatctgatggttgccgggtctgtgtggatagaagtagacatgggagacttttcattttgttctgtactaagaaaaattcttctgccttgggatcctgttgatctgtgaccttatccccaaccctgtgctctctgaaacatgtgctgtgtccactcagggttaaatggattaagggcggtgcaagatgtgctttgttaaacagatgcttgaaggcagcatgctcgttaagagtcatcaccactccctaatcttaagtacccagggacacaaacactgcggaaggccgcagggtcctct

SEQ ID NO: 7520 - DNA, 1105 bp, Artificial sequence
  DNA replication origin
ttgatcaaattggagaatctccagtttaaagaatctttcctacccactcaccctgctaatggaaatgttgaatgtaggagtttgtatccctgaagactgaaaacaaatctgggaggaaagacaaggacaagccctctgaagctgagggctgagaacagagcagccaatgagcggccctggcttcccatccacacgtagcccagcactggatctaggggacaactgtttaggttcccagtcccactttgctgtgactacgagccctggtgagtgaaaaaagtgaaagggagatagccatgtgctcttctccaaagagaactccagagagggatatgctgacactctggtagggaagaaagttatggaaggaagagtcagaggggaagacacttgaggcaaggttctccaacacagactgaggagttcagataccacccaggaaaaggcagggggagatgacttgtgtgcctgactgggagtaggagtctgaaggtgaagtatgtgtggaaggtatagaggatgtgaatatggtgggtgtaagagttggggggaagggatgcctggagacaccttgtgggatatgaaggcatggggaggtgactgatgtgaaagagtgagtgaggttctaattgtgagtgggcaagaagagtctgggggctttgagagaatgtgtgagagtgtaggctgtggagatgaagagattggaggtggcaaattgtctgagggaagtgaggaggatgaagtagatgtgagggatttgtgggattctgtggaagtggaggatgaggagtagtaggggtttagagggggagatgggtagaagagaatatgaggggctatgagtgtgagaaggtgaggtttaagaagggttgacggagtatggaaaggtgaggtggtgtgagacagtaaaagagggtgggggaaggtgagaggagggtggagtgggagaaagcaagagggctccacagtcttccaagctactgacaaagggagtgaagggtaagggaaatggggatctgacatatgaatgagggtcaggagctaaaaacaaaacaaaacaaatgaaaaacaaaaacaaaacaaacaaacaaacaaacaaacagca

SEQ ID NO: 7521 - DNA, 1462 bp, Artificial sequence
  DNA replication origin
ctttaaaacttttcttaaagatacaagcctttctctgtttgggggacactttttatggccgccagggaagcccaagcacttagactggcattttcggctgcagcgacaaggcaggagtcccggccagcagccctttaaatcgccggacgacgcagctgaccttagccggtcggctcagacaaaggactaccgctcgcccccaaagccccccaacccccgaccctcggcttttgccacactcgactgagccagaacttaagttttttttaaccaaccgacccccatcccgccaaagtggcccccctagcactggaaggcatcttgtcggaggcggccacgggcctgcaggccctctcagagcctggaaggggaaacgcggcgtgcactttctacagaggcctaagacgaggtaggaggaagcagagaaggcttggaccgcaggcaacaagtagccgaagctgaaagtggaagtcacccttaaatcccctttcccagaggctccgtacgactgcggggtatagcgctcaggatccctgatttgcccagggagatccgagagcgaaaacctgtttctcctggatccacgcccgactcctttgtttctttggccagcaggcctgcgggtgggtgtgacttgtggcggggagagtcctttcaggaaggcacgggttcgagcccagccttttcaggccgtcaccacttcccgcctaatcccgtccctggtcagggccagatccttgagtttcgcgcgtctttgagctctccaacaccggggaggaggggcctgcaaggctaaatgggaagagagtatagaggaaagagagggggaggggaggagaaaggaagacgaagtgaggtagacgttttggggaaaataagagagacgaaaaggaccagaaagatgagggaaacgagacatttcggagaaagccagaaaataaaattaggctcaacggctgctagcctaggagtttctcagctcctggctcctgagtcagcaacctccttcggtccttcgatcccgaccccctcctcttgcaggctgcagggacaaactgcccaacgagaccgccatctctgcgcacacgatgctgcccatcagccccgactgaggtcccgcaatgctgcctccccaaagttgtggtgaatggtggcataacccagccccgagtacttccaggagccctgagtcaaagctgatccactcagctttccggagaggagggggaggaggctcaaggggagagaaaaggatttgtgcccgggtcagagcgcatgagcagtggaagcttgagatgctgtgggggtggggtgagggagggaaagagggtatatgtttgggggagaggtgtgtgagggggtggcggttggagcagggaagtgtgagagagagagagagagaccgaccgcgtgcggcaggacctgtcatcactgacgtcggacccggccgcgggccaatggg

SEQ ID NO: 7522 - DNA, 763 bp, Artificial sequence
  DNA replication origin
ttgggacacagagataagaggttggggcctggaaataagggattggggcgcagagatataagaggttggggcgcggaaataagggattgggtgcagagataagaggttggggcggggaaataagggattggggcacagagatacgaggttgaggtacttgcctctcctctaggaaagtgggacttgccactcagggtgaaggagaaagggttggggatttattgccccccagaaaggcggagaaggggtagagacacgagagaaggggttggggtacttgccccttccccagaaaagcaggacttgccgctaagggtgaaggaccaaggcaggcgtccctgcgtggtctgacacctctgaaacctgggtgaataatcagagaggcgtccctgcaatgattaaacaccaagggaagcctgccttccctagtccgtgaccggcgccggagttttgggtccacgaataaaacgtgtctcctttgtctctaccagaaaatgaaaggaattgaaattaagagaagggagagattgaagagtggaaaggagaaagtggatgagggacagtgagagaggttggagaagagagtaagaagaggccacttacccgatttaaaattggtgagatgtttcttgggctggttggtctgaggacctgaggtcgtaggtggatctttctcatggagcaaacaacaggaggacaggggattgatctcccaagggaggtcctccgatctgagtcacggcaccaaatttcatgcgcgtcc

SEQ ID NO: 7523 - DNA, 1361 bp, Artificial sequence
  DNA replication origin
aatgtcgggagcagattgggtaataaaatgtattttgagaataagacggccttttgaccttttagggtatagggctgtaaagtgtctcagggttgctgccaaacaagtcatgaactgggctggatttttatatttgatgaaaaagagcctaaacgctatctgatttgggataaagaaaaaggagcattaaccttgactatgcctttaggtccagccacctttttaagagtaaattgctgggcaggagggggagggctagtcagagaaggaaactgtaagccggaccaggtgttaggaggggaggtgataaaaagagtatagggtgggggagcagaggctgaggaagaattgggacctagctcagcctggcgaggagcagcctggggaggaggggagaggtcagatgggtttgtagaaaaggaagattagaaagactcagcgatgcttggggttggtactgaggggacagacgggagggaaagaaggaagatatgggacgagttgcactgggcacagagactaggaagggactgatgtgtaaaagaatgcctggacgtcaggcacctcagaccatttgcccattttacaacaagaattatttagatcttgtaggatggaaaaattgaaagtgccattttccggctgtttggaactactgtcgagtttgtattggggtcaagcggcattgcagaagaaaataagatgcttagattttatgtcaggtgagagttgaagaggttttaagtttttgaggacacaggctaagggagaagaaggaggaatggagggtggaaggttgcccatagtgaaggaagcaagcctagagaaaagagagagtagagaaatggagggaaggggttcgggggttcttaccttccagagaagtgggaaaggggttggggcgcagaaataaggggttggggcgcagaggtaagaggtcggggtgtggaaataagggatggggcgcagagataagaggttggggtatggaaataagggattgggacacagagataagaggttggggcctggaaataagggattggggcgcagagatataagaggttggggcgcggaaataagggattgggtgcagagataagaggttggggcggggaaataagggattggggcacagagatacgaggttgaggtacttgcctctcctctaggaaagtgggacttgccactcagggtgaaggagaaagggttggggatttattgccccccagaaaggcggagaaggggtagagacacgagagaaggggttggggtacttgccccttccccagaaaagcaggacttgccgctaagggtgaaggaccaaggcaggcgtccctgcgtggtctgacacctctgaa

SEQ ID NO: 7524 - DNA, 1030 bp, Artificial sequence
  DNA replication origin
ggaggtgtggcgggagaggcgcgggcgggaacccaggctgcacgctgcgcttgcggactagggcaagttccgggtgggcgtggcctcccaggcccagcactcggagcggccagccggccccgcgcccggggcagtgaggggcttagcacccggtccagcagctgctgtgctcgacttctcgccgggccttagctgcctccccgcggggtacggctcgggacctgcagcccgccatgcctgagcctcgcccccgccgtgggctcctgcgcggcccgaggcaccccaaccagcgccactccctgctccacggcgcccagtcccatcgaccacccaagggctgaggagtgcgggcgcagggcgtgggactggcaggcagctccacctgcggccccagtgcgggatccactgggtgaagccagctgggctcctgagtctggtggggacttggagaacctttatgtctagctaagggattgtaaatacaccaatcggcactctatctagctcaagttttgtaaacacaccaatcagcaccctgtgtctagctcagggtttgtgaatgcaccagtcgacactctgtatctagctaatctagtggggacgtggagaacttttgtgtggacactgtatctagctaatctagtggggacctggagaacttctgtgtctagctcagggattgtaaacgcaccaatcagcaccctgtcaaaacggaccaatcagccctctgtaaaacagaccaattggctctctgtaaagtggaccaatcagcaggatatgggtggggctagataagagaataaaagcaggctgcccgagccctcagtgggaacttgttccggtgctattccagtttgtggaagcttcgttcttttgctctttgcaagaaatcttgctactgctcactctttgggtccatgctgcctttatgagctgtaacactcaccgtggaggtctgcaccttcactcctgagccagcgggaccacgaacccaccagaaggaagaaactcccaacatcaaaacgaacaa

SEQ ID NO: 7525 - DNA, 1444 bp, Artificial sequence
  DNA replication origin
ttttctattattgtacaccttgaaggcgaggttaattaaatcctgttgtggggtttgagggccagaatttaatttttggagttttatttaatgtcgggagcagattgggtaataaaatgtattttgagaataagacggccttttgaccttttagggtatagggctgtaaagtgtctcaggtttgctgccaaacaagtcatgaactgggctggatttttatatttgatgaaaaagagcctaaacgctatctgatttgggataaagaaaaaggagcattaaccttgactatgcctttagctccagccacctttttaagagtaaattgctgggcaggagggggagggctagtcagagaaggaaactgtaagccggaccaggtgttaggaggggaggtgataaaaagagtatagggtgggggagcagaggctgaggaagaattgggacctagctcagcctggcgaggagcagcctggggaggaggggagaggtcagatgggtttgtagaaaaggaagattagaaagactcagcgatgcttggggttggtactgaggggacaggcgggagggaaagaaggaagatatgggacgagttgcactgggcacagagactaggaagggactgatgtgtaaaagaatgcctggacgtcaggcatctcagaccgtttgcctattttatgacaagaattatttagatcttgcaggatggaaacattcaaagtgccattttctggctatttggaactactgtcgagtttgtattggggtcaagtggcattgcagaagaaaataaggcatttaagttttaggttaggtgtgagttgaagaggttttaagtttttgagaacacaggccaagggagtagaaggaggaatggagggtggaaggttgcctatagtgaaggaagcaagcctagagaaaagagagagtagagaaatggagggaaggggtttgggggttcttccagaaaagtgggaaaaggggttggggtgcagagataagaggttggggcatggaaataagggatggggtgcagaaataaggggtcggggcatggaaataaggggtcagggcatggaaataagtggttggggcatggaaataagggattggggcacagagatataagaggttggggtacttgcccctcctctagaaaagcgggacttgctgctaagagtgaaggagaaggggttgaggggtacttgcccctcccccagaaaagcgggacttgccgctaagggtgaaggagaaggggttgaggggtacttgcctctcccccagaaaagcagagaaggggtagagacaagcagagaaggggttggggtacttgcccctttcccagaaaagcgggactttccgctaagggtgaaggaccaaggcaggcgtccctgcgtggtctgacacctttgaaacgtggatgaataatcagagaggcgtccctgca

SEQ ID NO: 7526 - DNA, 864 bp, Artificial sequence
  DNA replication origin
tggctcggggattggtaaggatggagagtgactctgggttctgcatctgctgcaggaagactgggagctgcaggcggagctgctcctgcagttgggggttccccgcgaagagcggcacattcaccatcatctgagcagcgaagtcggggttctgggcaagcgtctgcatcatgctgcgcatgtagggtgctgagatcacattctgcatcagctgggggttctcagagatctgctggaggagggcttgcatttctgggctattgaacatccctgacctcaggctagccgcattgatcccaaaggggttcaagactgtcgggtgcacctggctggtccccgatcctccggtgccctccccaccggacccgggggcctgggaggtggggggcgaggggctccaggggttagggaggggctctcgattctcagtccgcagaggctgggaggatgagctgtcggagttcccggccagggaagagaagggattgttgccaaactgttcccgggcagcactgaacatgggctcctggatgtccgtgtacatgcggcggagggcattataccctccagggatgctctcaaggttgctcagggcccggtcctggttccgcatcatctcttgcatcacggctggattccgagcaagctccattgtctgcctcatgagttcagggttattgagcatgtggctgatctcagggttccgctccatcaactgctgcatctggggtttggcaataatcatgtgacgcatcaggtcagggttagacatcatatcctggaccagggggttctccatgatctgcaacagcatctcaggattggacatcagctgcctctgcatctgctgctgcagctccatga

SEQ ID NO: 7527 - DNA, 805 bp, Artificial sequence
  DNA replication origin
ctaaaaatacaaaaaaattagctgggtgtggtggcgggcgcctgttgtcccagctactcaggaggctgaggcaggagaatggcgtgaacccaggaggtggagcttgcagtgagccgagatcgtgccactgctctccagcctgggtgacagagcaagactccgtctcaaaaaaaaaaaaaaaacaaaaaagaaaaaaaaaaaagagccaggacagtttatccttggtaacatgaaggaaggcaaagtgtatgggcacagatgcttgtaggcaggtgttatgttttggctgaatgaatgaatgagcaatcagccaatagaggctaagaatgacatgctgcctccaggagagtctccctagtggcctggtgttgtaagtccttccctgacctggtctgtgaagagaggccagcctagaagataatgttgttgactaggtcctagtgtaggttattaaagtctgggttcgagtgctgacattgttctgatttccagggtattattgggaggattagtttgcaaggcaaagaaattgggtgggtgtctggtcagttgtttgctgggggtagcagctatcttctagtgatgggatatgcaccctttgtgttcctcaggccccacctcagcaagtccattcctcctctccatgatcaggcccactccttggttacttgggtttgtgactcctaacttagattgtgagtgcgtgagagaggagaggtgtgcagttggttgtgggagaagggcttgtgtgtggctctgcccatgtgggcaagtgagtctgagaaggtgcatgagtgagtcgcaa

SEQ ID NO: 7528 - DNA, 1230 bp, Artificial sequence
  DNA replication origin
gtgtggaaggagaggcatgggcgggaaccagggctgcgcaagcggggcttgcaggccagtgcgagttctgggtgggcgtgggctcggcgggccccacactcggagtggcctgccggccccaccagccccgggcagtgaggggcttagcacctgggccagcagctgctgctgcactcaatttctcgccgggcctcagctgccttcccgtggggcagggctcaggacctgcagcccaccatgcctgagccttccccccttcaccccctgctgtgggctcctgcacagcccgagcctccccaacgagcaccgtcccctgctccacagccaccggtcccatcgaccacccaagggctgaggagtgcaggtgcacagcaggggactggcaggcagctccacctgcagcccgggtgcaggatccactgggtgaagccagctgggctcctgagtctggtggggacttggagaatttttatgtctagctaagggattgtaaatacaccaatcggcactctgtatctagctcaaggtttgtaagcacaccaatcagcaccctgtgtctagctcagggtttgtgaatgcaccaatcgacactctgcatctggctaatctagcggggacgtggagaacttttgtgcctagctcagggattgtaaacacaccaatcagcaccctctcaaaacagaccaatcagctctctgtaaaacagaccaatcggcttgctgtaaaatggaccaatcagcaggatgtgggtggggccagataagagaataaaagcaggctgcttgagctagcagcggcaacccacttgggaccccttccacaccatggaagctttgttctttcgctcttttcaataaatcttgctactgctcgctctttgggtccacactgcctttatgagctgtaacactcaccgccaaggtctgcagcttcacttttgaagccagcgagaccacgaacccactgggaggaacgaagaactccagatgtgccgctttaagagctgtaacactcaccgtgaaggtctgcaggttcactcctgcagccagcgagacgagaccatgaacccaccagaaggaagaaactccgaacacatccgaccatcagaaagaacaaactccagacacgccgcctttaagaactgtaacgctcactgtgagggtctgcagcttcattcttgaagtcagtgagaccaagaacccaccaattccggacacaagatcacgacat

SEQ ID NO: 7529 - DNA, 1304 bp, Artificial sequence
  DNA replication origin
aaagaggaagaagagagggggaggaagagaatgggagagaaggaaagaggaaaggaggaaggaagagaggaaggaaagaagagaaggagggagagaaggagagagggaaaaagggaggaagggagggagggaggaaggaaggaaggaaaaaaggaaggaaggatggggggagggaaggaaggagggagagggagaaaaaaataagacaaagggacttggcaagcagagtggagaaacaaggttcagagaaacagaactggctaggagtgtcagaacccacacagaggtaaacagatggtttacccagccagatcctgagaccagcttccacaggctccccacacagggcagagaaagggtgttagactaactttctaggtggttaccttgcagaaggaggggctgggcactgaataaatttatgccttgaacagcagattgcaccagccagtggatggtggtgggaggtggacagggtggccgggtggggccaggcctggagggccttgtcaccaggacaagatagagagtacagaaaatagaaaaggaccaaggtagggaggcattagcttagaagaagaaggtgaatgaggttcacgaatctagagtctgaaggatttggcccggaactagagggcgggacacataccaaatttgaggagaccagctgtggttagtgatgtggcatgggaccggaggagggcccaagaagtgtggcctcagcacactaacaggggtgaagccagaatccaggatggcctgaggaaataaatcagtggagttgggaagcgtggaaccacccacctgctcaggcggaggcaggcaaatcctcataagagtgtcattgggtcaccactatgtgtccaacaacagggaacgtgtgtttggcccgatggcttagagacaggattccactggtgacagagcctatgggtgaatgacggcatcctttgttgaagcataatcattgcaaccctcctgtctgctgatctatcccacctggggccaaaatgggggaaagtgatgcttaaactactgatatggttaggctttgtgtccccacccaaatctcatcttgaattgtaatccccataatcctcacgtgtcaagtgagagactggggggagggaactgaatcatggcagcagtttcccccatgctgttcttgtgatagtgagtgagttctcatgagatctgacagttttatacggagctcttcccccttctcttgatgattgtctttcctgttgccttgtaaagaaggtgtcttgcggccaggcgcagtggctcacgcctgtaatccc

SEQ ID NO: 7530 - DNA, 910 bp, Artificial sequence
  DNA replication origin
gggagtcagccccccgcccggccagccgccttgtccgggaggtgaggggcgcctctgcccggccgcccctactgggaagtgaggagcccctctgcccggccagccgccccgtccgggagggaggtgtgggggtcagccccccgcccggccagccgccttgtccgggaggtgaggggcgcctctgcccggccgcccctactgggaagtgaggagcccctctgcccggccagccgccccgtccgggagggaggtgggggagtcagccccccgcccggccagccgccttgtccgggaggtgaggggcgcctctgcccggccgcccctactgggaagtgaggagcccctctgcccggccagccaccctgtccgggagggaggtgggggggtcagccccccgcccggccagccgccccgtccgggaggtgaggggcgtctctgcccggccgcccttactgggaagtgaggagcccctctgcccggccaccaccccgtctgggaggtgtgcccaacagctcattgagaacgggccaggatgacaatcgcggctttgtggaatagaaaggggggaaaggtggggaaaagattgagaaatcggatggttgccgtgtctgtgtagaaagaagtagacatgggagacttttcattttgttctgtactaagaaaaattcttctgccttgggatcctgttgatctgtgaccttacccccaaccctgtgctctctgaaacatgtgctgtgtccactcagggttaaatggattaagggcggtgcaagatgtgctttgttaaacagatgcttgaaggcagcatgctggttaagagtcgtcaccactccctaatctcaagtacccagggacacaaacactacggaagggcagggtcctctgcctaggaaaaccagagacctttgtt

SEQ ID NO: 7531 - DNA, 666 bp, Artificial sequence
  DNA replication origin
tgcccggccacccatcatctgggatgtgaggagcgcctctgcccggccacgaccctgtctgggaggtgaggagcatctctgcccggcagccgccccgtctgggaagtcaggagtgtctccgcccggcagcgcccagtctgggaggtggggggcagcccccacctggccagccgccccgtccgggagggaggtgggggcacctccgcctggccgccgccccgtccgggaggtggggggcgcctctgcccggccgccccttctgggaagtgaggagcccctttgcccggctgccaccccgtctgggaggtgtacccaacagctcattgagaacgggccatgatgacgatggcggttttgtcgaatagaaaagggggaaatgtggggaaaagatagagaaatcagattgttgctgtgtctgtgtagaaagaagtagacataggagactccattttgttctgtactaagaaaaattcttctgccttgggatgctgttaatctatgaccttacccccaaccctgtgctctctgaaacatgtgctgtgtccactcagggttggatggattaagggcggtgcaagatgtgctttgttaaacagatgcttgaaggcagcatgctcgttaagagtcatcaccactccctaatctcaagcacccagggacacaaac

SEQ ID NO: 7532 - DNA, 984 bp, Artificial sequence
  DNA replication origin
agattaacagcatcccaaggcagaagaatttttcttagtacagaacaaaatggagtctcctatgtctacttctttctacacagacacagcaacaatctgatttctctatcttttccccacatttcccccttttctattcgacaaaaccgccatcgtcatcatggcccgttctcaatgagctgttgggtacacctcccagacggggtggcagccgggcaaaggggctcctcacttcccagaaggggcggccgggcagaggcgccccccacctcccggacggggcggcggccaggcggaggtgcccccacctccctcccggacggggcggctggccaggtgggggctgccccccacctcccagactgggcgctgccgggcggagacactcctgacttcccagacggggcggctgccgggcagagatgctcctcacctcccagacagggtcgtggccgggcagaggcgctcctcacatcccagatgatgggtggccgggcagagacattcctcacttcctagacgggatggcggccgggaagaggcactcctcacttcccagactgggcagccgggcagaggggctcctcacatcccagaagatgggcggccagggagacgctccccacttcccagacggggtggcggccgggcagaggctgcaatctcggcactttgggaggccaaggcaggcagctgagaggtggaggttgtagcgagccgagatcacgccactgcactccagcctgggcaacattgagcactgagtgaatgagagactccgtctgcaatcccagcacctcaggaggccgaggctggcagatcactcgcggttaggagctggagaccaggcaggccaacacagcgaaaccccgtctccaccaaaaaaatacgaaaaccagtcaggtgtggcggcacgcgcctgcaatcccaggcactgggcaggctgaggcaggagaatcaggcagggaggttgcagtgagccga

SEQ ID NO: 7533 - DNA, 990 bp, Artificial sequence
  DNA replication origin
tctccatatctgtgaaataaccgtggaaggacacgcaccatctctctctttctctctctctctctctctctctctctcacacacacacacacacacacacgaacacacgcgcgcgttgggcactgtgacttggtgccttcttcggctccaggctgacttacttgaggaagtacctctggccagtggccgtgaaggtcatctcccagcccgggggcagtggcagctcgtcggtcacgtcgtaggactgctggcggaggtgcgcgtgctgctgcgcggggctacccgcagcacccgcgccggtgcccagctgcagggacgcgggcgacgagtgcgagcggacatgctgggcacccccagccagtcgaggccccgggtggccgcccgacgagtcggtgctggactggcgcgagtgcgagcccgaatcaggctccttaaagaaagactccggcaggatcttcttccgccacgagctaggcttcggattcatgacagagttgaagagggcttcgaggtctgtgtctaggtcctgcgtgacgtggatcacttgctgcccaggcggcgggagcggagggggcgccgaggccggattcatcttctgcaaaaagaaggtcagatcagccttttatttaaagtcggaggaagtgggtaagagggttacagggtgagagggcgagatggtgggagaaagaatagagggaaaaggaaacgaggagacagataattgcccgcctggagatcccagacactcagcggtaagaccagcaggatgggggaggggtccctcctggcctcgagaattatgcaactttcttgaagcaaagaagttgcctggaggaggagaagatagggcgaggggtggagggaataactgcactcggggcttgctgaaccgcaggatggcaaaggaaaggtcgcacgattccaggacaggcagccccccgaaagaagttcagcccgagccaactccaccacgtctcgactccggaagcc

SEQ ID NO: 7534 - DNA, 1067 bp, Artificial sequence
  DNA replication origin
gccttttatttaaagtcggaggaagtgggtaagagggttacagggtgagagggcgagatggtgggagaaagaatagagggaaaaggaaacgaggagacagataattgcccgcctggagatcccagacactcagcggtaagaccagcaggatgggggaggggtccctcctggcctcgagaattatgcaactttcttgaagcaaagaagttgcctggaggaggagaagatagggcgaggggtggagggaataactgcactcggggcttgctgaaccgcaggatggcaaaggaaaggtcgcacgattccaggacaggcagccccccgaaagaagttcagcccgagccaactccaccacgtctcgactccggaagcccgaggagcctggagccctggagtggtgccggatgagcgcgcgagctccagcgggcactacctgggcgggcagcgaagctgagcctgagcgcgcggcggccgccgtcccgcccgaacttgccgtcgggcctgggtcgctcgggtgagtcccgagattgcggagctggagccgaggcttggctgacaaatcccgacccgactctgtgcctggcagtctaagggcttcggctctcacatcccccgagctggcctaaggcgctagtgctgggcgaaaaggaggcgcaggagaagcagacagcgcggccgcagcagctcccggactgtcccataaacaaagtttggagcaaactcccacccccaggaaagaggcgggcccgaaagttgagctgttgaattatgtatgacctcctagtccctagccggccagcccccgctcgcccctcctcttcctcctcctcctcctcccacctcggctccagaaaaccctgggcgtgatgggtactttactgggtaagaggagacgggtgccccccacccactcctcccggccgcgcggacctctcccgctcagacctgcatctgcattcctttgagtttaccacggacttggggcgggatcaaagggaaagtggcctgagcctgtttcatcaaggggttgtggaccgaaaccaaggccgggggtggcggagggcacg

SEQ ID NO: 7535 - DNA, 1179 bp, Artificial sequence
  DNA replication origin
cccgaaagttgagctgttgaattatgtatgacctcctagtccctagccggccagcccccgctcgcccctcctcttcctcctcctcctcctcccacctcggctccagaaaaccctgggcgtgatgggtactttactgggtaagaggagacgggtgccccccacccactcctcccggccgcgcggacctctcccgctcagacctgcatctgcattcctttgagtttaccacggacttggggcgggatcaaagggaaagtggcctgagcctgtttcatcaaggggttgtggaccgaaaccaaggccgggggtggcggagggcacgcggatgaggggctcaggcctaggaagggccggtcctggacaccgcgccctcccctgcagccaggcgccgaggcctgcagcacccggagcgccgcactgacccgcgattctgcccgaaggccggcccgggtgcgccccggcgcggggagacaccaacaaggccagcttttccacgagaggctgcttagctcttgtgaccatatttggtctggcgaggaggcatcttggctgcctggctctcaattgtctgctagagcacagacggtgcccagaaagtgcctctgtcactggagatgcggcttcgccaacgggtgggttgtaaacaaacaactttcaaaccattcatcaatccttaatttcctctacgggggtgactcaggccactagagattgagaagaaaaagctgggtgttggaagagaagagcaattgcacccccctcccccgcaacatccgtgagggttgtgggaggattggaatgtccctgccgccctccggggagcctggagccgggatggaacccgagcaggtggctggaagtagagagggtgcgccagtgacccgaaaaaagccacccaccttcccaccaactagatctgggcgagggatggagaccccctgcctctagctaagggaagaaggtcaagtctggcgaaacagctgcgggaagtaggaggaggccttgcccttcagagcagctcaatttcttttctctctggttgcctctccactgaggggaaagggtggggggagatggcgaggtaagccaaattccaggaagcccctactccaccccatttgattcaaataggagtttattaagtaaatcaaacgagacaatgtaaagcacttcgcacag

SEQ ID NO: 7536 - DNA, 996 bp, Artificial sequence
  DNA replication origin
ggagcggggtggccggccgcgggggcaccgcagcgcggggctggaacactgagggccgagcccgcaggtgtgctaggcagcgggcgccgaggatgcggctgccgggcgggcggggaggccgaggcccggggacgccccctcacccggggctgcgctgacaggctgggggcggcggccggactccttgctggccctggccgggcgcccccggcgttcccagcgtcggtccaggtgcccgggttgggggagggggcacgcaccggccagggcaaggggaggggttccttttttcctcctagtgcggttcccctaggttctcttgaagccctgaggtttgctatgcacgttctggggtggaagcgggggtcggggatccgggctggggcgcgcgggccccgggtggaggtccctaggctctctggccggctcttgctccgcggacagcgcgcctcccgcgcctccggctgtgggaggcggcggccccggcccggcccccgggattctcgaagcgactttgcgtaggtttaccgatgtccaggcctctggggcttgcgagagatgtacgccgaccgcgtaggtggattcgtgaatctcgacttcagctctagctctataggttgttttttttttttttttaaattctccaagatggcgaactgccattgatttctcttctcatatggagattcatcgatatacggttatccccagttatgcaacatagctcaaaaaaggggtgcttttcgggggctttcaattatctgcgaagaccaggagcacacttcacttctctaagtccctccctctttagtggtggcagtaaaggaactaatgcagttttatgcttcacattgcctgattttcttgagacttgatggttttgagttggttgcaatatgtttggagaatatttgccacaaaacctccagcttattgttttgcctgtttctgcccaaggctgtttctaaaattatgataattgtactaaatacgaga

SEQ ID NO: 7537 - DNA, 1384 bp, Artificial sequence
  DNA replication origin
aggcgcagcggcggcggcggcggtagcgggcggcggcggcgcggggggaggcggggcgggggcggggaggaggcggctctgcgcaggcaccgaccgcccccctccccgaggagctgcggcgggaggacgcgggttcagcgatgagggacgaacctcagagcgcgctcggccgcccggccgcccgcagccgcggggctgacaaaccagcggcgggaggctgcgaagcggctgtgcctgtggcggctgctccttaccgcagcgccctccgttttccgcggacacggctgggcgtgcgcgcgcgcgtgcgtgcgatccttccgcggcgcccgggcacggagggtcccgggaagggcggggggagactgaggcgggggcgcggagggataccgccccgggacaatcacggccgccacgtgcgggaggcgccggccgggagcggtggcgggccgagcttcggacctcgggccggcggagagggtggaccccgcgtcgctctcggcaccccaggaacagcggcggcacggacgccttggagccccgcggccgggccgcgatgtgcttttctcctgtgttcgctgcccgggatgcggaatcttgagcctcggtgtcgggttacagagttgtcctggtgacgggatgcggagcgtttcctcctttttgttgtgggggcggctggtggcaggggcagctggtggcagggttgcccacgctaatctccgagtctctaagggcaccgtctttcctggatccctcttgcgcctcgtccataaaggcagacccgcgggcgcgcgccggcaacctgaaatcagagcaggcgtccgtggcgctcaggaaccttgctgagcttcgccgatctttcattgttgcttcatttgggtaccaagggcctctcattctgtggattctttgcctggaggagcccccttaatgttgctaatcacgtgtggttaaattgctcgtaaattccgaacaaaacaaatagcgacctgtgttacactgtttcttggtaactgggaaagttactggtggcttgaagtatacgcagaaaatacaaagattaaaaactagggaagagttcactgaatgaacaccgtaacatttctgctctgcagggtaaaataatttcgggacccaggtctgggaaagatttgtattaacaaggtaaacggtgggtagagtgcctgagaagctattcgtatcgtctttggtagcctctgggcactaggactagacatggaattaggggtcccccaacaatgacttcaattttaggttaatagaaaccatctgccacttaagggaaagaaagcaccaaaatgtagataagttgatgttcacccttaaagttatcgtgtgaggtcatgatttgtaggaggattaagga

SEQ ID NO: 7538 - DNA, 1074 bp, Artificial sequence
  DNA replication origin
atcggagcagtgtaaacgaggaaagtcctccacccatttattttttaatattaaagttaattaaaatttggtctcccctctgttttactccatatttctggttttcctcatgctctctgtctgtcctgctcccgaagcctcctggttgtgcactcgggctctcagcccagatttcttttgtgggttcagttgagccccggggtctcggcggccggcggctccccgcggcactggctccctcttgtggctctctgcggtcactgcacacccgctgaacggcagtctcttccagcgggccccggcctggggagaacaaatccggggacagcgagagggacaatcccaacgctgccagcagtcagtaaagattctccctctaactcagaagccggccccagggagcatttcgggtctcctcatacatgttagggctcctctgacccctgtcgttccttaggtttctcaggtgttcccttgcgtgaggattttcaagaagcatcaagagtgcagccttcagggtccagggagcgggggcgagagggacggagaaagtgtgtgtgtgtgtgtgtgtgtgtgtgtgtgtgtgtgtgtgagatgggagtgtctgtgtatgtgtgtgagagagagagatggggagagtgcctgtgtgtccgagagagatgggagattgtgtgtgagagagataggagtgtgtgtgtgtgtgagagagagagagatggggagagtgcgtgtgtgtgagagacagatggggagagtgcgtgtgtgtgtatgtgtgtgtgagaaagagatggggacagtgtgtgtaagacagacacagagagatggggagagcgtgtgtgtgagagagagaaagagatggggaatgtgtgtgtgacagagagatgggcagagtgactatgtgtgtgagtgtgtgtgagagagagaatgtgtgagacagtgtgtgtgtgtgtgtagtgtgtgtgtgtgtgcatctgtgttggtgtgtgttgtgtgcaagtgtacttgggaagaaaaacaagaaagaagagttgatagcggctgcctcacggcttcccaagtcctctggggggattt

SEQ ID NO: 7539 - DNA, 1098 bp, Artificial sequence
  DNA replication origin
agaccgctggcacgggaccggaggcgccccggctgtgtgaggtagcggtggtggcttctccggctcctcctcggtgcgcccaattcctaaaccccgaagaaactgaaattcaaactgctgaagcggcggctgcagctccctccgctgggccaagatggggctgaaatggccgcgccagggatgctgggaggagcagcagccccgctgccgccgccgctgccgactaaaatgccgccgctgccgcagccaccgccagcgccgcagccgccgccgttccgtgacgcaccggcgtcgtgacgtcaccgctccgccccctccggtttcctgcagtttcgcgtggaacctggggtggggggcaatgggcggggctaaaggttaaaaaagggagcggtttctttatttaaaatttttaaaatttaaattttgtgttgtaggttctttaagcattgacgagctaaagaccattttaaattctaagcctagggaagcttacaatggaactaatcagatgtttttatgtcggtttgttccgagacagtggaagactggaggtcatgtgcttgtgtctaatgtttagcaaaatcttagtgaaacgagggcgataggaatgggggctggggaagacttagatgggataaaaagaggtgcggctggaagaactaaatcactttaaaacttctgaaaataaatgttgaccattgtagtcagaggagtaaaatgttcagagaaatggggatgattaaacaagaacggcaagccagattgagtcagaaaattatcttcctgccagaaattctgtctcccacaacggcatcagggggtggttacttgcccagggtgtagtcagtttttaaaaagcttaagggttaccaacatattcctaaatttcctgaatttgctgtgattccaggattcatttaaactcttgagactgttttactttcggcacgaaatcagctcatgggctttataaatgtagaacctactgcattatagttcttctttttgtttattctaaaactgttagtagcagccagcgtattatatgatttggattgggccatgaacaaccgtaacgagtgataaagcaccctttcc

SEQ ID NO: 7540 - DNA, 965 bp, Artificial sequence
  DNA replication origin
cccgggggacagactctgccgccgacgaatgtaaccctggcgcagccggctatgtccctgcctccgcagccgggccctgcagtgggcgcccccgcggcgcagcagccccagcagttcgcgtatcctcagcctcagataccgcccggacatttgctgcccgtccagccctccggccagagtgagtacctgcagcagcacgtggccggcctgcagccgccaagccccgcgcagccctcgtccaccggcgccgcagcgagccccgccacggcggccacccttcccgtgggcaccggccagaatgcttcctcggtgggcgcgcagctcatgggcgcgtcttcccagcccagcgaagccatggccccccggacgggaccagcgcaaggcgggcaggtcgcgccttgtcagccgactggagtgcccccggctactgtgggaggcgtggtgcagccgtgcctcggtcctgccggggctgggcagccccagtccgtgcctccgccgcagatgggtggcagtggtccgctgtcagccgtacctggtggccctcacgccgtggtgcccggagttccaaacgtgcctgcagccgtgcccgctccaagcgtgcctagtgtgtctaccacttctgttactatgccaaatgtacccgcgcctctggcccagtcgcaacagctgagcagccatacgccagtcagcaggagcagcagcataatccagcatgttgggctgcccttagcgccaggcacacacagcgcaccaacaagtctaccacagtctgacctaagccagtttcaaactcagacccagcctttagtcgggcaagtcgacgatactagaagaaaatcagaacccctacctcaaccaccactttctctcattgctgaaaataagcctgttgtgaagccgcctgttgcagattccctggcaaacccccttcagttaacacctatgaacagtctggccacctctgt

SEQ ID NO: 7541 - DNA, 1193 bp, Artificial sequence
  DNA replication origin
gtgggccagggctctgcgcaccgctggggttcggggcccgggacgccgccgggaggagggcaccgcgcggggtccgacgcggaggcgtgctcggaacgccgggggctgcggagtgcatcagcgcggtccagccctccgcctgccgggcgccgagcgtctccgccgcccggacctgggctgggcgccgtggcgttgcctcggagctcgctgcccgcggggcgcgcaccgccttgacccgggcggccccgcggcaggcaggcgcccgcagttccatggttggttcggagcgcgatgagccgcccgtcctccaccggccccagcgctaataaaccctgcagcaagcagccgccgccgcagccccagcacactccgtccccggctgcgcccccggccgccgccaccatctcggctgcgggccccggctcgtccgcggtgcccgccgcggcggcggtgatctcgggccccggcggcggcggcggggccggcccggtgtccccgcagcaccacgagctgacctcgctcttcgagtgtccggtctgctttgactatgtcctgcctcctattctgcagtgccaggccgggcacctggtgtgtaaccaatgccgccagaagttgagctgctgcccgacgtgcaggggcgccctgacgcccagcatcaggaacctggctatggagaaggtggcctcggcagtcctgtttccctgtaaggtaagcccagggacagcccacgtacctccgccggtgacctcagggactccggtatccgccagcccactcgcaggcccggagaggcgggcggcatctctcatttaaaaaaaaaaaagaaaaaatgtttacacttcgtccaccctccctcaagcccactttgggtgtaggtctgggttgacatttaccgagtaataattgttaatagacaattaacagattaattggcatttgctgatcgttagaacatcgtagctcacccggcccaatgcccgcgtcctctgcagacgtgtattcgggtactctcggtagggctgggccgcaccagtaaaacttggaccgagaaactgactgtgtggggattgaggagggaggaaacgggcgagctaaacgccccctttaccagcgctgggctcggctgaattgataattggagtcctgcaccccgcgcctaccgtctgcgcacccctgacacgtgggagctctcg

SEQ ID NO: 7542 - DNA, 1275 bp, Artificial sequence
  DNA replication origin
cacgcctccgcgtcggaccccgcgcggtgccctcctcccggcggcgtcccgggccccgaaccccagcggtgcgcagagccctggcccacccgcttctggaacagccgctgacgcaagccccgggggcgcgcgcggacgtgacgcctggacacgtgtgcggccgcccaggcgcgcggggactggcagagccaccctgcgccggggcgctggctccgcccggctccagctggcagcgcagggggccgcctagcgccggcgcttcctgctcgggctgcgggccgggcctgcgccagtgagcatgcctggctcgctgcagccccgcggggttgtcttttctgggttgaggaggggggctactctcggggaagcgtcgccgaagtcctctggccacaccccggggtgcctggctgacgcgtccctcagctcaaacgagaaaggcaacttcaggcggggcgggagcgtggacggtgggtgggaccggacgcgggcgggcaggggcggggcgcgggcgcccctgcactagtcggaaaaaaccgagaggtttctcttctcagggctgagtcaccagcacgcaggagaagagggcgaagcggccacccgcgttctgtgttcggagtcaggacgagaagcattgggtgggagcagggcgaggggctcgagttgggtctgcagcgggcacaggacctagttttgtacagttaacggtggggttgagtaaagaggggggcggtggggaggatgtaagctccctttattcctttcccagcggaccaggaggaagcttcgttgaattgagcgcccctggctcgtatagcaggccgaggagggagctcatgggcagcgttggctaagagttcgagatcatctagaaatgtcagaaacgtaggttgggtcgtgaggtctctgaagacagtgggtgaaactccagtgtaaggcgctgcgtccgcttggtagagagccggccgaagtccgagtctttgttgcgaggcgtagggccaccctgcgcgcccagcagaagcgctagagggcacggttgcccggggtgaaccgcatgtccaaatgtaactgtgtgctccgagttaaaattgtttttctgcagactttgcttgagccaacgattccggaattggggaaagggttaccttaggtagaaatcggaaatttataggagacacagaggtaaggaccaactgttaggactgagtgaaaaatggttccctccaactgtaaaagtggaaaaaaaaatacctatcttataggtggggcagtgaggag

SEQ ID NO: 7543 - DNA, 1277 bp, Artificial sequence
  DNA replication origin
gtgtggcgcgtgggcggctcctccgcgcaggcctggtcagagtagggggcagcggtgactgcccctcttgcagcctgtaggccaggtggctgcggctgcgcttgacctccgtcacgcagagctccagcaggaccttagcgggctgtttctccaccttttccctgggcacaccgcggctcagcagcggcccttgaggtccctgcgcatcgagttgggccccagcgtgagcttggcgctgccccgctggccctggcgccctagcaggccgctgtcggggaggcctggatctccacaacggcctccatcaccgtcacgcccttcaccagcaggctggccagcaggagacgcagctccgagggcgccgccatcggcgtcggcaagcgcctgtgcaggctctgtgtgaagagcatgtcctcgggcggcactggctcaggagcagagggcgctggaggggccgagggtggctggcaggagctccagtcgatgcccacctccatggtggtccagggccggaagggcagctcggtggcctcgaagtgaaaggaagacagtgctggcgcaggccgtcagcagcccggccagcattgtcaggcatccgttgcccaggagggccttgcagtggttgttgaagacggcgtcgtggctcaggttgcccagcagcaccagctctccagagttcagagacagggcagggtccccctggtggaagacccgcaggattcaggagaacatgagctctatggagttctgcttgaagcaccgagaggtggccaggaggtgggtgtacgtgtagtacgagcagaaccgatcccccgacccttgtgggtggtcgctggtgctttcttagccatgagcgtggcaactcctaggcagggaacagcagagagcccggagggacgcgagagcaatggccgggcccttcagcacctggaggaaccacctttggaaggcaggaatcgtccttgccccatacagctgtagaggatttgggccatctgctctgtgactgctttacagacaaagcaactgaggtgcaggagaacaatcgcttgatgaacatctccaagcccacgaacagcagagctgggatttggacacaggcctgtctgactagttttccacagctacgagatgggttttgtatgtaaatcctgagtgccattgttggcatataaattaattccaagagatatctaatatgaagccaacctagatagtgagatattttagacttggatgggtcagggagtggaagcaaggttcttaccacaatgggg

SEQ ID NO: 7544 - DNA, 885 bp, Artificial sequence
  DNA replication origin
ggggtcagcccccgcccggccagccgccccgtccgggagggaggtggggggggtcagccccccgcccgaccagccgccccgtccgggagggaggtggggggatcagccccccgcctggccagccgccccgtccgggaggtgaggggcgcctctgcccggccgcccctactgggaagtgaggagcccctctgcccggccagccgccccgtccgggagggaggcgggggggggggtcggccagccgccctgtccgggagggaggtgggggggtcagccccccgcccggccagccgccccgtccgggaggtgaggggcgcctctgcccggccgcccctactgggaagtgaggagcccctctgcctggccagccgccccgtccgggaggatggtgggggggtcagccccccgcccggccagccgccccatccgggaggtgaggggcgcttctgcccggccgcccctactgggaagtgaggagcccctctgcccggccacgaccccgtctgggaggtgtgcccagcggctcattggggatgggccatgatgacaatggcggttttgtggaatagaaaggcgggaagggtggggaaaaaattgagaaatcagatggttgccgggtctgtgtggatagaagtagacatgggagacttttcattttgttctgtactaagaaaaattcttctgccttgggatcctgttgatctgtgaccttatccccaaccctgtgctctctgaaacatgtgctgtgtccactcagggttaaatggattaagggcggtgcaagatgtgctttgttaaacagatgcttgaaggcagcatgctcgttaagagtcatcaccactccctaatcttaagtacccagggacacaaacactgcggaaggcc

SEQ ID NO: 7545 - DNA, 1298 bp, Artificial sequence
  DNA replication origin
agtaggggcggccgggcagaggcgcccctcacctcccagacggggcggctggccaagcggggggctgatccccccacctccctcccggacggggcggctggccgggcggggggctgaccccccccacctccctcccggacggggcggctggccaggtggggggctgaccccccacctccctcccggatggggcggctggccaggcggggggctgatccccccacctccctcccggacggggcggctggccgggcggggggctgatccccccacctccctcccggacggggcggctggccgggcagggggctgaccccccctcccccctcccggacggggcggctggccgggcagaggggctcctcacttcccagtaggggcggccgggcagaggagcccctcacctcccggacggggcggctggccgggcggggggctgacccccccccacctccctcccggacggggtggctgccgggcggagacgctcctcacttcccagacggggtggctgccggacggaggggctcctcacttctcagacggggcggttgccaggcagagggtttcctcacttctcagacggggcggccgggcagagacgctcctcacctcccagacagggttgcggccagcagaggcgctcctcacatcccagacagggcggcggggcagaggtgctccccacatctcagacgatgggcggccgggcagagacgctcctcacttcctagatgggatggcggcggggaagaggcgctcctcgcttcctagatgggatggcggccgggcagagacgctcctcactttccagaccgggcagccaggcagagaggctcctcatatcccagacgatgggtggccaagcagagacgctcctcacttcccagacggggtggcggctgggcagaggctgcaatctcggcactttggggggccaaggcaggcggctgggaggtggaggctgtagcgagccgagatcacgccactgcactccagcctgggcaccactgagcactgagtgaacgagactccgtccgcaatcccggcaccccgggaggccgaggctggcggatcactcgcggctaggagctggagaccagcccggccaacacagcaaaaccccgtctccaccaaaaaaaaaacgaaaaccagtcaggcgtggcggcgtgcgcctgcaatcgcaggcactcagcaggctgaggcaggagaatcaggcagggaggctgcagtgagccgagatggcagcagcaccgtccagccttggctcggcatcagagggagaccgtggacggaga

SEQ ID NO: 7546 - DNA, 2128 bp, Artificial sequence
  DNA replication origin
gagggagagggagagggagagggagagggagagggagagggagagggagagggagagggagagggagagggagagggagagggagagggagagggagagggagagggagagggagagggagagggagagggagagggagagggagagggagagggagagggagagggagagggagagggagagggagagggagagggagagggagagggagagggagagggagagggagagggagaggggagagggagagggagagggagagggagagggagagggagagggagagggagagggagagggagagggagagggagagggagagggagagggagagggagagggagagggagagggagagggagagggagagggagagggagagggagagggagagggagagggagagggagagggagagggagcagtttggtattttttttaaaaagccttttttaatgcatttttaatagtttttttcttttgtagcttgacaccatccatgccacatcagtgattttttgttttgtttttgttttgttttgttttgttttagatggggtctcactctgtctcttagatggggtctcactctgtctcataggctggagtgcagtggggtgttcatggctcactgtagcctcaacctcctgggctcaagagatcctcccacctcagccccctaagtagctgggaccaaaggcatgcaccaccactctgctaatttttttattttgtagtgatggggtctccttatgttgtccaggctggtcttgaactcttgggctcaagcgatcctcccaccctggccttttcttttcagttttaaagaaatttcaaatgtttacatttcagttagacaataaataatgagtcttatctcagcaccagcagtttagtaacagcagattcaaagcaggcagaaaagaaaagaaagagcttcagaagattctgcttaactttatagttgcaggttaaatgagctgtgaatttgagctctgaacttttcttgctgtaatttgcccatcagtttaaaatgtacacaaaaacagcctataatatgtaaccagctggagtcccatatagtctagaaaagagttcacatgcgctttccccctacaaagcttaacccagatacagagagtactctggaatcccaaagaggataacaaaatcagggccagggtgttggaaagtgtttcttccttagtgaggagagaagcagcctaccttgctccttctgacaatcagatgaacctggtgctatgaagaccatcccagagcaccctcagagggaggggtaacactaaacagagacacaaacagacggatccaaggcagatggagcactctgaactggtccctgaaaggggaaactggataaaatcctgaagtcttgtctgaaacccagaaggcaccgcaaaaggatctcctgtactaggtccagatggcacaaaggcccatatggcaccacagttgacctgtgctaggtccagatggcacaaagtcccaaaaggaagagacagaggagccccattcacactccagtcgacttacctagtccaagtgcctcggcttcccaaatgccactttccttgcaccagcaaagcattgtgggcagttgatgctgtgatggggatgggagggaaatcctaggggcagaagtgtccttggcatctgctgggaggtccctgaagtccccagccatggagtcagctagctgtgaattgctggcacttttgagcagctgttgcctcctccagtagaaaccaggcggacagtctaggctacatgaaacacacagctcctcacatggggcaccaaatttgtaattgactcaagttcagttgctcaccacttggaagtcaaagcaggagaagtgaggtgtggtaaaaggaaagcagcatttattcaaatgttagcagatgggagtatggctgggcttgagcctcaaaggaactatctcaacttttggactgagggaagtggtttaagaaggaaaacttggtatggaaaatgtgcgggagtggtgcaggagggtacaggtctatgtgtctttttctaatggttgagtaatcacccatatggaggtccagtgggcatcatcttgatttgggcctggtgaggtggt

SEQ ID NO: 7547 - DNA, 1066 bp, Artificial sequence
  DNA replication origin
ggcatggtggctcacacatgtaatcccagcactttgggagggcccaggtgggtggatcacttgaggccaggagttcaagaccagcctggccaacatagcaaacaaaaaattagctgggcgtggtggtgcatgcctgtagtcccagctgcttgggaggctgaggcaggagaatcgcttgaatctgggaggtgaaggttgcagtgagcggcggtcaccccactgcactccagcctgggtaacagagactctgtctcaaaaaaagaaaaaagaaaagagaaaagagaagggaagggaagggaaggaaaaggcaggggaagtgggagggggagggggaagggggagggaaggggaggggaggggaggggaggggaggggaggggaggggaggggagggaagggaagggaagggaagggaagggaagggaagggaagggaagggaagggaagggaagggaagggaagggaagggagtggtcctactattcctattcctattttacagattagtaggtagggctccagaggtgaagctgctgttcccaggccattgagttagcgactagcaaagccagaatcaaacctagaatctctctgactcccaaacttatgcttattattgttgtcaatgtgttacatgtattaattatcatttacataacacataaaggtgagcctttgaagacagttctggtataagagaagcaaaactcctgacagctcactctggcatagcagcacaattccactcaagtggaaagaaacaattctcagtgtagtgcctgtaggtaaagtaattaaagttgctagctttcctcatgggattgttgcgtgtccaggtgtatatactgtgttttgttaacagattgtctataggcagtttgcttactttccatttttcttacatccccattatatttcaatgtatttgtctcatgcctacttctaaatcaaaacagaaaaatttcccctttattttaaactccccaaaaaaggaaagatgataatgacttgggaaggtgggtcagaagagagaaaagagaaatggaagagtaatttgggggtgttt

SEQ ID NO: 7548 - DNA, 1248 bp, Artificial sequence
  DNA replication origin
cgccggctcgccgccggcgttctcgcccccacggcccgggagcgcgagcttccgagttggcggacggcggcgcggcgtccgcactgagcatgcccagctcggcggccggaccgcggaggagttggctgagagcgcggtgagcgcgctccaatccgcctctccgggttttcgcagccgcagagcgcgcagcccgcgggccccggcgccgaggctggccctggggtgaacctgggcgagggagggagcgccctctggagccctgctccaagccccccgctgcaccctccgcctcgacctccccagaggtcgcggtccccgtggcctgggccgaaaacctcacctgcgccgggagcgtggaaggggcggggggggtgatcctccagggcagaccttggtcatccaacccgccctcgctcctcgcttcggggcgcgggcaccaagatgctgggccacctggcgcgagctctgcgagaccggagccgcggaggcgggctcggcctgtcctgagggaccccgcgggaggcgtgcccgggagaatgcgcccgcacttggccaagaatgatggctgccatttatggagccttcgctacgtgccaggatcttgatagtcagaatctctggtccttacaaccttccacggtcttactgtaccctttttatggatggagaaattgagccagctcagagaggaccactcacttgccgaaagccacgaaacgagtcggaatttgaacccacgactgattctaagtttctgacctgttttccctgacttggacttggagggactgggttcctaacctgtccttgcctgatggactcacgttctccacggcttgaggcattctcggccttccctctctgtaaggtggtaaaggcagattctaaccggaagcctttgatacatagtaggtgctctggaaatgctggttgaatctgaacatcaactttgatgttcgttgacatttaagcaaagggggaagaaggagataaataaagtgaaggtaatgtggtagaggctagttcctcactcctgatcctgacctgtgagcacctccaaacccagtttgaggctgagtcaggtgtttagcttttggcttccttaatctgaacaattacttctagagagcatttacctaacttcactggagggcatttcctgaccaccttccccatcttgccccagggtcttctcttccactaatatcctgggattaatttcatggctggacttgcccttgtgataca

SEQ ID NO: 7549 - DNA, 1145 bp, Artificial sequence
  DNA replication origin
aaacgacttccattccaaactggaaaatttgaaaagcttccccctcaccttcgtccctggccagcaaaagcaaaacgcaagacctcagtgtaggatgcactgcattccaacatttttcaaaaagtttacgacgatttaccgaagcggcaagaagaaaaataaagcaggcagaaacgggtgagagcgagcaaggtttcggcagggaagaagcccgagaagcgcccggcggcgccgtgcaaggcccggcaacgggaaagcgaccggcacatggaaagcgagcgccccagtggagcgcggggactgacagccgctcggtctccgccgccggggggtcgcccagcacccccagcctggcccccgcctctaatccccctccccgacctcttccaccgcagcgccggcgatgcccgctgggccaacttggccccgggtcagtgctgcagagcgcggccccggttgccggggaggccgccggcgcccttacctccttctgcttggggtcctgtgggtagacgtcgggcggcccgagccgggggcgcttcagcggtctctgctcatagctgagaagcccgaaggcggccatgatctctcatgttaaccggcgaaatgaatgagagttggagctggagcagccgcctctgagcaccagggagcagcactttgcagacagactccctctctccccctcctcgctcgctcgctcgctgtggcgctgcaggcaggaggaataaagcaggttggatgctgccgctgcccggcagcagacacgcactgatggggacagccttcggcgggtactcggctgcgctcgagccccgggacgcaccgctccggtggcggcggcggagggactagaggtcggccagggtcctccgcggcgcctgcctcctctgctcccccctaccttgtctccagggggaggagcagctgatgggaacgtgtgacttttttcaccaatggacccaaacccaccccagctgggcgcaggatgggggtgggggtggggcactggaaaaaaaaaaaaaaaaacttttcttggcgcctaggctggtggctgaagtgctcgcccaaggcgagggtggccctcccctcccgggaagaagctgtggagcggaccgcccccgcctctcttccccggcagggac

SEQ ID NO: 7550 - DNA, 973 bp, Artificial sequence
  DNA replication origin
tgaatcagagtcagaagctgggtggttggagagggggggaagagggagggcaggagctggagcatagggcggagggtcgtggtgattgggcggagcattattatgttgactgggaggggcagggggagacgtcggcagggtcaaaggaggaggaatcgccagaaggaaggggagctgagggtgagcctggcttggagcgggcgaggaggatttggaaagtgaaacaggaccgataaagggaggggcagctatggagggcaaaaaaggcctgaacataagggatttcagaccactttccattgcgatggcaaaagttgtctaggtccctgaggatgttaaaatcgaatgtgccattttcaggccactgggagccattgtccaatttatactgaggccaggctgtgttacaatgaaagatgagcctttgtggtcgaatttcggaatggaggccaagggcattaagattccggaggagacatcggaggggagatgtctttgagggactggactgagaggctcccatgatagaatgaatgaggaacagatggagatgagagacgtggccagagactagaatgataggagaaggcgtcccctgagtcggagaggtgcgataattccccattcaagcatccgtgaaaggcagataccaagggcctggaggctgggaggagaaaactcttggcccagtgctgcatcttttgggaaggaaagagtggacaagggttccggacagaaggcagaagtctcctttactcacccctgaggtggccctggtgttggatgtgtctgccagcaatggaaaggagtaggaaatcctctgggtctccagcacgttctggaagggggagtttggccgggggaagcggggaggaaaggagagagggagaaagggaggccgagctctaccaccttgccgggtttcggcaccaagatacaagggataattggaaggacagccgagaaaggaatg

SEQ ID NO: 7551 - DNA, 918 bp, Artificial sequence
  DNA replication origin
gggagatttctttgagcttttcaaaatttacggccttatgggctgctttgttaagtcctgcgatgaggcaagtaatcatatggttacgagatgcccggccagggtctgtgggttggtacttccaggggggttcctccaggggaactgcagcagcccctatgggcttagtagggtcttgccgatgaagatcgttggcatgtgcctgtgctgcaagccacactctttccttcttttctggaaggagggtagaagagaggataatgtagagatcatgccaagtgagttcataagattgggtaaggtacttaaattctttgatataagtgtcgggatcagaggaaaacgacccgagacgttttgcaatttgggagaggtcagagagggagaagggaacgtggactcgaatgatgtcttcggctccagccacctctcggaggggaagtatgggggctggttgttgggcatgctgagtttgagagcgtatgaggtggagtatgaggtggagatgcggatgaatcagagtcagaagctgggtggttggagagggggggaagagggagggcaggagctggagcatagggcggagggtcgtggtgattgggcggagcattattatgttgactgggaggggcagggggagacgtcggcagggtcaaaggaggaggaatcgccagaaggaaggggagctgagggtgagcctggcttggagcgggcgaggaggatttggaaagtgaaacaggaccgataaagggaggggcagctatggagggcaaaaaaggcctgaacataagggatttcagaccactttccattgcgatggcaaaagttgtctaggtccctgaggatgttaaaatcgaatgtgccattttcaggccactgggagccattgtccaatttatactgaggccaggctgtgtt

SEQ ID NO: 7552 - DNA, 934 bp, Artificial sequence
  DNA replication origin
aggtgcagtgatgagagcagtttggagtttacagaaactgggaagtatgttgtgtatggggcttaggggttcattgagggggcctttggctgcttcgtagaggggttgagccaggagggcaaagttgggaatccatattctaaagaaaccttctagtcttaagaaagagagaatttcattttttgaggaaggcagaggcaagctgtttattaaggttgcttgtgctggggtcatggcttgggccccaggggagagttggactcctaagtatgttactgttggggcagatagttgggctttggagggggagaccctatatcttttgctagaaagagagtttagtagggtgatggtgtgagtttggagtcctctagggaggggctgcaaagaaggaggtcatcaatgtattggaggaggcagctgggggaggggtttaaggtggtgtggtcttgggctagagcttgtccaaagatgtgagggctgtatctgaagccttgagggaggacagtccatgtgagttgtgactgaagagtgtcaggatctgtccaggtgaaggtgaagaggtcttgggaattagagtgtaagggaatggtgaagaaagcatcctgtaggtcgattgctgtatagtgggtggtgttggaagggatgagggagagaagtgtacaggggttagggaccaaggggtaaatagggagtacagcctgattgatggctcagaggtcctgaacgagtcggtatgagctgtcagattttctaacagggaggaagggggtgttatatggagaatgtgttggtctaagaagatcacatgagtacagcttgtttataatgggttggaggaccttttggtgggttagggagatagggtattggggaacgttaggaaatttggaggggtcctttaactggattttgatggggttatggtgtgcag

SEQ ID NO: 7553 - DNA, 993 bp, Artificial sequence
  DNA replication origin
ggggtgtaccagcaggccttggccagggaggggttagtttgactgagtatcatatgtgcctgtggaatggtgcgctgtaggtggagcggtagcgagaaggaggagggaagaaggagtaaatagacagagagcaagtgtaaaggtaaagaattcggcttcatctggagtgaattcctgtaaatccccttgaaatataagattggtgatccaatcaaggaatgctgtgagggtgggatgttctgggtaggaccatgaaaggttttctgtgatgcagtgaaggaagagtgtgaaatgccaggatgggcaaagacaggacatttaggaggggccactatctgttggtggtggctattatacctgctatgaggaggattatgaggcaagaggttacgaatattgagttttttttgtctgaaattccacccaggaggcaagacagtatatattcctatggcaaagagtagagtaagtagggtgattcctgcaagggcagcgtaatggatgatttccattaataagggtttggatacttaatggtaaggggtgataacttatctgctatggttcatgagggaagagtggggtcttcaggcatgggcgttaggcggagtcgaattggtctgagaagagtgctggagtatttgcagggaacagctggttggttagttggtgatgggtcagctgcaggtgctctttttaacctggaaagatggtaccaagacttgtgttctcaaagtttggctgcagtggaggtagcgagaaggacttggaaagggatttcgcactttggcatgagacttgttgatttttaggaagacatattctcctggaaggagtgtttggtcagtggtgccttggtggggttttgtgggggcctggtcagcttgttcgcagaggagatgatggatgagggagagtgttgggaggtattctaattgatactcaggagggggtctgttttgtaagaggaaagggcatccatacattaagtcg

SEQ ID NO: 7554 - DNA, 1515 bp, Artificial sequence
  DNA replication origin
accctattgagaggtgacagcgtgctggcagcccttgcagccctcgctcactctcggcacctcctctgcctgggctcccactttggcggcacttgaggagcccttcagcccaccgcttcactgtgggagcccgtttctgggctggccaaggccagagctggctccctcagcttccagggaggtgtggagggagaggcgccagcgggaactggggctgcgcctgcacttgcaggccaactggagttccaggtgggtgtgggcttggcgggccccacactcggagcagctggctggccctgccgccccgggcaatgaggggcttagcatctgggccagcggctgcggagggtatactgggtcccccagcagtgccgacccaccggcgctgcgctcgatgtctcgctgggccttagctgcctccctgtggggcagggcttgggacctgcagcccaccatgcttgagcctcccccactccgtgggctcctgtgccagccagagcctccccgaccagcgccgcctcctgctccacagcacccagtcccatcgaccacccaagggctgaggagtgcggacgcacagcgcagtactggcaggcagctccacctgcggccctggtgcgtgatccactgggtgaagccagcggggctcctgagtctggtggggactcgcagaacctttatgtctagctaagggattgtaaatgcaccaatcagcaccctgtgtctagctcagggtttgtgactgcaccaattgacactctgtaactagctactctggtggggacctggaggacctttatgtctagctaagggattgtaaatacaccagtcggcactctgtatctagctcaaggtttgttaacataccaatcagcaccctgtgtctagctcagggtttgtgaatgcacctgtcgacactctgtatctagctactctggtggtgacttggagaacctttgcgtggacactctatatctagctaatctagtggggagatggagaacctttgtgtctagctcagggattgtaaacgcaccaatcaaccctgtcaaaacagaccactcggcttgctgtaaaatggaccaatcagcaggatgtgggtggggccagataacagaataaaagcaggctgccagagccagcagtggcaacctgctggggtcaccttccacactgtggaagctttgttctttcactctttgcaataaatcttgctgctgctcactcattgggtccacactgcctttatgagctgtaacactcaccacgaagttctgtagcttcactcctggagccagtgagaccacgaacccaccgggaggaacaaacaactccagatgcactgccttaagagctgtaacgctcactgcgagggtccgcggcttccttcttgaagtcagtgagaccaagaacccaccaattccggacacactatctctgcatctctacatctctatcctaactttctaatcttctttccaccacttttgggtaatggtcttctgctccagctaa

SEQ ID NO: 7555 - DNA, 884 bp, Artificial sequence
  DNA replication origin
tgttgcagaagaaaataaggcatttaggttttaggtcaggtgtgagttgaagaggttttaagttcttgagaacacaggctaagggagaagaaggaggaatgaagggtggaaggttgcctatagtgaaggaggcaagcccagagaaaagagagagtagagacatggagggaaggggttcgggggttcttaccctccagaaaagtgggaaaggggtcggggcatggaaataaggggtcagggcatggagataagaggttggggcacggaaataaggcattggggcacagtgataagggattggggcacagagataagaggtcaggatgcagggataagggattgggggttcttgccccttagaaaagcgggacttgccactaagggtgaaggagaaggggttgaggagttcttgcccttcccccataaaagcagagaaggggtagagacatggagagaaggggttggcaagtcccccagaaaagcgggacttgccgctaagggtgaaggaccaaggcaggcgtccctgcgtggtctgacacctctgaaacgtgggtgaataatcagagaagcatccctgcagtgattaaacaccaagggaaggctgccttcctagtccgtgaccagcgccggagttttgggtccatggataaaatgtgtctcctttgtctctaccagaaaatgaaaggaattgaaattaagagaagggacagattgaagtgtggcgcccagattgaaaggagaaagaggttgagggatagagggaggttggagaagagagtaaaaagaggccgcttactggatttgaaattggtgagatgtttcttgggctggtggtctgaggacctgaggtcgtaggtggatctttctcatggagcaaagagcag

SEQ ID NO: 7556 - DNA, 1095 bp, Artificial sequence
  DNA replication origin
agatgcccccaattaagttgatctttgagccaaggaggctggggagcagcctccccaagctagagccctgcagagcgagtttcccttgacctcgctgcgcctctggcgcgctctgcagcgcggacccgcggcccctcgggaaagcgcagtcggaaagttatccgcggcggttccctgcgcgccctgttgtgtaagctcggcgttgccagcggacggagaagttgctggcttgcccgatagcccagttcggtggcggcccggggcggatttcatggcccgcggcgaacgcggggccagagctggcgtgggcgagcccctgcgcgccccctcccgcggggatccagttcgcctgctcccttccgctcgctggcttttccgatgcttgctgcgcccctggccgccgctgccctctcgccgcctcctacccctcggagccgccgcctaagtcgaggaggagagaatgaccgaggtgctgtggccggctgtccccaacgggacggacgctgccttcctggccggtccgggttcgtcctgggggaacagcacggtcgcctccactgccgccgtctcctcgtcgttcaaatgcgccttgaccaagacgggcttccagttttactacctgccggctgtctacatcttggtattcatcatcggcttcctgggcaacagcgtggccatctggatgttcgtcttccacatgaagccctggagcggcatctccgtgtacatgttcaatttggctctggccgacttcttgtacgtgctgactctgccagccctgatcttctactacttcaataaaacagactggatcttcggggatgccatgtgtaaactgcagaggttcatctttcatgtgaacctctatggcagcatcttgtttctgacatgcatcagtgcccaccggtacagcggtgtggtgtaccccctcaagtccctgggccggctcaaaaagaagaatgcgatctgtatcagcgtgctggtgtggctcattgtggtggtggcgatctcccccatcctcttctactcaggtaccggggtccgcaaaaacaaaaccatcacctgttacgacaccacctcagacgagtacctgcg

SEQ ID NO: 7557 - DNA, 1449 bp, Artificial sequence
  DNA replication origin
tccccttcctcagctacgcaggaaaaacccaggagagagcaacccagagaacgcagggcggaaaccaccgaacggaggccgggcgccgggccggccggcggcggcggcagcgtatccctggggtgcgggtccgggccccgcagcagtccgcggcggcagcagcagcccgggcggcgaaccgagaggacaatgcccgcagcctgcgcgaggcgacggctggagctcctagctgcggcagcccgggagggcagggaggcggtggcggcgggctgcggaggtggctgctaattgcgcgtcgggccgggacgcgcgtggcatgagtccccgcggaacgtgcgcccaccgccgcggcccatcgcgctctctcccacagcctctactgggcgagggcttcctactcgccgcgcgcagcccggcccgcccctccccggcgagcatgcccagtgcgttccggccgcgccttgcccaagcggccgctcctggttttccgcggggccgggagggggcggggcagtgggcggggctccggatttgagtccgatttggggagtggcgcgagttaggaactggctggaagatggggtgtgtgtgcgtatatgggagcgaggaaagcgctgtaggaagcatgcaggccgctttattttacagctgtgggagtggtggacaagggcggcggctctgcgagaagcacgtgggcgcggcgggccgcctcagggatggagtaggctgtggtcttgccaactcccgttatcaaaggcccaaggacgccattcactcagccccgggcgggcgtgggtctgggggccggaaacccgaagtcctgtgggtgccgtggaatgcacgagcagccggcggagcaaacctgccccatagatttttctaaaccgttcgccacagaaacgctactctgtcttctctgaccgactctgtgcactgcagccttgcacaaagaaaacaggaggtactccaagtctgagatactgttccgactaggaaaggggtagcttctggtacctgcagctctctcggggcagggtcccgcgggtcgtacccacctccccgctcgagtgcggtcaaaacccggagaccggattacatcccaatccagaagtctcagggcgcccgcagttagttcagggcatgctcagtcgcagagcaggtttttgggcttggaagtaggaagcttttgcaccacacacccacactctagctcaaattacctctcccagactctgcactcattggtctcggggcgcgagtctgacacccctaagtgttgttcattggctgccgccaaggctttatcagtttggggcgcttcattggctaaaaagtagcctccgctcgcgattggttatttatagagattgagcggagaggcggaggcacagctgttctttctccgttgctcccccaccctctgcctcccacttccccaaccctggcgtt

SEQ ID NO: 7558 - DNA, 1154 bp, Artificial sequence
  DNA replication origin
caaatcggactcaaatccggagccccgcccactgccccgccccctcccggccccgcggaaaaccaggagcggccgcttgggcaaggcgcggccggaacgcactgggcatgctcgccggggaggggcgggccgggctgcgcgcggcgagtaggaagccctcgcccagtagaggctgtgggagagagcgcgatgggccgcggcggtgggcgcacgttccgcggggactcatgccacgcgcgtcccggcccgacgcgcaattagcagccacctccgcagcccgccgccaccgcctccctgccctcccgggctgccgcagctaggagctccagccgtcgcctcgcgcaggctgcgggcattgtcctctcggttcgccgcccgggctgctgctgccgccgcggactgctgcggggcccggacccgcaccccagggatacgctgccgccgccgccggccggcccggcgcccggcctccgttcggtggtttccgccctgcgttctctgggttgctctctcctgggtttttcctgcgtagctgaggaaggggaagagaagtccagccgccaagcccagccttccccggcgcgcagccccgacggggccgcggcaggcgcggcgagagcgctgacggagccatgagagagtacaaagtggtggtgctgggctcgggcggcgtgggcaagtccgcgctcaccgtgcagttcgtgacgggctccttcatcgagaagtacgacccgaccatcgaagacttttaccgcaaggagattgaggtggactcgtcgccgtcggtgctggagatcctggatacggcgggcaccgagcagttcgcgtccatgcgggacctgtacatcaagaacggccagggcttcatcctggtctacagcctcgtcaaccagcagagcttccaggacatcaagcccatgcgggaccagatcatccgcgtgaagcggtacgagcgcgtgcccatgatcctggtgggcaacaaggtggacctggagggtgagcgcgaggtctcgtacggggagggcaaggccctggctgaggagtggagctgccccttcatggagacgtcggccaaaaacaaagcctcggtagacgagctatttgccgagatcgtgcggcagatgaactacgcggcgcagcccaacggcgatgag

SEQ ID NO: 7559 - DNA, 955 bp, Artificial sequence
  DNA replication origin
ctcggcctggcgaggagcagcctggggaggaggggaaaggtcagatgggtctgtagaaaaggaagactggaaagactcagcgacgcttggggttgggactgaggggacaggcaggagggaaagaaggaggatttgggaggaatcgggaacagagactagggagggaatgaagtgtgaaaaacgcctggacgtaaggcacctcagaccatttgcccatttttcaacaaaaattatttaggtcttgtaggatggagaaatcgaaatgccgttttctggccatttagagccattgtcaagtttgtattggggccaagcggtgttgcagaagaagataaggcatttaggttttaggtcaggtgtgagttgaagaggttctaagttcttgagaacacagaataagggagaagaaggaggaatggagggtggaaggttgcctatagtgaaggaggcaagcccagagaaaagagagagtagagatatggagggaaggggtttgggggttcttaccctccagaaaagtgggaaaggggtcggggcacagaaataaggggttggggcacagagataagaggttggggcatggaaataagggatcagggcacagagataagaggtcagggcacagaaataaggggttggggcacagagataagaggttggggcatggaaataagggatcagggcacagagataagaggttggggcatggaaataagggatcagggcacagagataagaggttgggacatggaaataagggatcggggtgcagagataaggggtcagggtgcagaaataagggatcgggggggttcttgcccccaagaaaagcagagaaggggtagagacagggagagaaggggtcagggttctttcccctcccccagaaaagcgggacttgccgctaagggtgaaggaccaaggcaggcatccctgcgtggttagacatctctta

SEQ ID NO: 7560 - DNA, 1434 bp, Artificial sequence
  DNA replication origin
tttctttaagtttgtcataattaccagctttgtaagctgcctttttaagcccttcaactaggcaggaaaccatgtaatctcgcctggctatacctggggaatctgcctgatagttccattggggatcttctcgggggaactgctctaataccttcctggaagtttgtctcctggagccagcggttatcagcatgagattgggctagagaaaaaactctttcccgttcatctggggagagggtagaagtcaggatgacatttaagtcactccaggttaaactgtaggacagagttagatattggaattcctatatgtatttagtggggtctgatgagaaagagcctaaatgctggctgatctgggaaaggtctgatagaggaaaaaggcacatgtaccctgactatgccttcgctccagccacctctctaagaggaaattgctgggcaggtaggggagagctagtcgcagaacgaaactgtaaaccagaccgggtgtgaggaggggaggtgatagaaagattatagggtgggggagcagaggctgacgaagaattgggacctggcttggcctggcgaggagcagcctggagagaaggggagaggtcagatgagtccatagaaaagaaggattcaaaggactcagagcttggggtggagactgaaggaacagacaggagagaaagaagaaagatctgggatgagtcacattgggagcagagactagggagggaccaatgtgtaaaagaatgcctggacgtcaggcacctcagaccatttgcccattttttgacaaaaattatctaggtattgtaaaatggagaaatcaaaagtgccgttttctggctacttagaaccactgttgagtttgtattggggccaagcagtgctgctgaagaaaataagacgcttagattttaggtcaggcaagagttgaagaggttttaagtttttgagaacacaggctaagagagaagaaggaggaatggagggttgaaggttgcccatagtgaaggaggcaagtttaaagagaagggtagagacacggagagaaggggtggggggtgcttgccccccaggaaagtggagaaagggtgggaggtgcttgccccccagaaaagtggaaacgggatgggaggtgcctgctgcaaggaaagtggaaatggggtgggaggtgcttgccccccaggaaagtggaaatgggatgggaggtgcttgccccccaggaaagtggaaatggggtgggaggtgcttgccccccaggaaagtggaaaaggggtgggaggtgcttgcccccaggaaagtggaaaaggggtagagacacggagagaatgggtggagtgagcagccctgggctgcaatatgggtgagcagccaaagcaggtgtccctgcaattgacttgccaccaaaggaatgtgggtgaatgaccaaggcag

SEQ ID NO: 7561 - DNA, 990 bp, Artificial sequence
  DNA replication origin
tacacactccatttttcctctatattaatcgaattatttaaagattggttagctttttggggaaatgtctctccattgtattccacttattaggatgaactaccttttctccttgcttttcagctttctctgctatgaaaaagatggaaaattttttagcacaaggggactcttctcaagcagcaaatcattttgatattaaaaacagataattgcaaacccagttttatttcagtatgaattccgcagtggagtgtgaatatgtgtgtgtatgtgtgtgtgtgtgtgtgtgtgtgtgtgtgtgtaattacctgtgattcaaaagaggaaagggatcagtattaaaggtacttgtacactggaagcaaaaaaaaaaggaagtttagttcctctgagctccttggcaattatagctgctaaaggtagcttttacaaagaaactgcctttgtgcctaaagtatttatttccttgtttgtatttacccctttgaggaggaatcgctgtgtcttgagtgaaaggggtacgctgcttgcttgcattaaactgtgagggtccaggcgcattacggctgatttcagtaggtagagcagacacactttagtttatttttctctttctcactccccaccctcaacctccgatgtacacacgttttaagattccctgaagtcaggaggtgggagcggagagtttcagttcagatcttgacatgagagtacttcgaccaaggaaaagaaagggaagaaagagggaagcggggtggagaaagcaggagcaaggaaggaaagaaggaaacggggagggagagtaagaaaaaagaaaacgaaggagggagggagagaggacatttaaatgaagaaggaaggaagcttggattcagggaggaaagggagcgggaaagagagcgaaagaagagcgtgagaagaggcaagcattatagtctccggtccacaggggagagatggagccccctcaggactagagaatcc

SEQ ID NO: 7562 - DNA, 906 bp, Artificial sequence
  DNA replication origin
ggatctgctgaggggtcacggtgagtctctgtgggtgcgggtcggagggatgcccaggtgcctcgtcgccccacggcccgggcggaggcgggtccggaacctcccccaagtccggcctcagcctggagcccgcgcgccttgggcggatgcacggactgagaggcgcttggctgggctctcagcccgccactgccacccggccccgtgcgctcattggtcgggatgtgtcggctcagcagcctccaacttctcccgaatcccactggtgagtcccaggagagcgagctgagggagaaaggtccaaagggcgcgagcgcccagggcgctgggagcccgtgggacgggcacggggagggcagagccagccgaggggagcggctgccgggaggtgcgctgagcagggtccgcagctaaggtccagcgcgatccgagcgcccaggaccctgcggccgtggaggaggcgtgccctgggaaggagccgctactgggacctgaagagtgaggggagggagaggggcccagagggtgacctggaggagggctctggaagtcacgtcaggttggctcttcaggttcatttccatagttccctgcggcctctgccttggggagttatgttttgttaccgagatccgcgctaccagattgcaccggggctgatttgggggctgggaatttgccattctgctgtacagacactgatttttttttcttctttttaaaaagcaaggtttgttttcattttggtttctgtcggattttctcatttgtaactcacttttctatttttacttttcttaaccggaagatcttttcattatcccacctcttcatcttgcttttaacctgatttcctattatataattaatgcttaaatctcacaagggttggtcggtgcggggctg

SEQ ID NO: 7563 - DNA, 1361 bp, Artificial sequence
  DNA replication origin
ttccttgtgtggcacctgcgaaaaccacgttgcagctgagtgaattgaagtcaccagctgacaatcatcctactagcttgatagggaatgcttcagcccccacagtgctgctcagagatctcctgcatcgtggaatcaccctgcataaaagcggttggggcactgttaagacgtctgatatctggggcccgcccactggcgactgcaggtcgcggggccaccccggtccgcggggaaggggaccccgccgccttcccgaggtgagcggcgccccctgccgccagccggaggagctcagggccgctcgcaggaggccgggaacatggcggggcagcccgcggccaccggctcgccgtctgccgacaaggacggaatggagcccaacgtcgtggctcggatctcgcagtgggcagacgaccacctgcgcctagtccgggtactggggccacgcagtctgggcgggtggtgggcgcggggcggcacagagcgaccctgagaacaacgtgaggcctcaggcgtggatcccgccggggccggggagcgacagaaaactgcgggggaatgagctcgagagggcgacatcgcgagtgtcgtgtgtgcggggctgcagagggccgggggcgggccagggggccagttcggcctcattattacaaggactgttctggatccttgctgggctgtagggggcacctcaaagggtgagacgcagcccagctcggggatgccacctggtccattagagcatttggggagggcccagagaggagaccgaggaagagcagggaagtcctgtacgccttgggagagagcatttctaatttttatttatttttaattttattttttagggacacggtattcctctctggcccaagctggagtgcagtggcacgatcatagctcactgctgctgctccacccacttcggccgaaaagatcctcccacttcagcctcccgagtagctggaaccacaggttgcgtgcgctaccccatcgactactttcttttagagttagagactgggagtcttgctatgttgtccaggctgtcctccaactcctggcctcaagtgatctcccacctcagcctcccgaatagatttcttttttttgagacagggtctccctctgtcacgcctggagtgcagtggcaccattatgtctcgttgcagtctccacttcctgggcttaagcaatcctcccacctcaggctcccgagtagctagggctacaggcacttgtcaccacaccaggctaatttgttttttgtttgtagaggcaaggtcttcctgtgttgcccaggctggccttgaactcctggtctcaagagatctgcccgcctcggcctcccaaagcac

SEQ ID NO: 7564 - DNA, 1030 bp, Artificial sequence
  DNA replication origin
ggggggagagaaagaaaaagggggagggggagggggaggttgtggggggcagggggaggggggagagcaggagtggggggtggggagaggggaagagggaagtgggggagagagggggcaggggaggtggtgcagaggagctaggcagaggggacaacatggtggggtacaggaaccaagccctgccccgtggggaggcagctgaggcccagtgagaattcaagcacagtgccggcgggctggcagtgctgggggacccggcgcaccctctgcagctgctggcccaggtgctaagcccctcactgcccaggggccggccgctctgactgtggggcccactgagcctgcgcccacccggaactcgtgctggcctgcgagcactgcccgcagccccagttcccaccagcgcctctccctccacacctccccgcaagccaagggagctggctccagcctccaccagcccagagaggggctcccacagtgcactggcaggctgaagggctcctcaagtgtggccagagcagacgccaaggccaaggaggcactgagagtgagcgagggctgctaacacattgtcatctctcgataggattattttgggaagtgatgttaggtttttaaatttgtagctttctaatgtgtacccttttatttgaacatgtgcttcaaatgtgcaagtgtcagatgtctaaaggatgccagcaaatctgatgtgacggttaaactcaccccaaattgttgagagctctgttcccagccaagccatcatgagctattacctagatgacagtaatcactaccaatttccaaatcacttcccggcttccaatcttaccaccccatactcttttctctacaaagcagcccattcattcttattgctgtacactattgcattgagtgagtatatgtcagtttatcgatccattctactgttgatggacatctgagtagtttaatgctgctgcaaatcttctagtattcatctttttggtacacatacaggcatagtttagttaggtatatt

SEQ ID NO: 7565 - DNA, 1113 bp, Artificial sequence
  DNA replication origin
tacgggagccttccggctaccccgcgtttcgggctgcagcccagaagtttggaagatgttttcacattaactttgagagcgcacaagtcttcgtcttcctccccgccgccgcgggaagcgctcgccgcctttcccccgcgcttcgcggctcagttctgcgagcccccaagacccgttggacgctcctcgggaggtgagctgagggggtaaagaagaattagagagagaaggcgccgcgagtagtctctgggatgcagggaggccggggcgggtcgttggtccgaaggaggctggacaggagttggggggcgcccaggcgcctgctgaggggaaggcgggggcggggacgcccgggaacacccggaattgcagagccgggcggcgcctcagctgcactgcgcggagttggcgcggcccgggaccaggagctgagcaaaccgccgcggccaacaggaggcgtcactcggacccgggctcggcgccggggtgtcgcgcggcggcgggcgggcaggctttggagcggcagttttttcggaaagtgcttttggccgggagtgccgcagaaccccagcgtcacgaggtgaggggtgtcgcggtgtgtcgcctgccgctggagaccggaggatgtgttcttctcatctttatttttctgttatgaaaactaattgaggagctaggttctagtggctttccccctccagccacttctccagttctctgcttcttcctcccagttttgtttccgagtttgatgaaagggcaataataggaaaagttgcgcgcgcgcgcttgcgtgtgtacgcgcagacacacatataaataaaatcgatttagtgtctattttaccttgattgggtttgataggagtggttagagagtgtgcgcgtggggaaagcacaggccggtttggtatggtggagagggaataccacaatctgtgccaattgtgccttgaggcaataacaccaaatgatgaataataacgcctggcttggctcctttccagttgatttatgtctcatgtcagatccctccttcttcgtgaagctttccctaacaatgccagcttacagtgaactctcctttttctgccttttccttttgtacttatca

SEQ ID NO: 7566 - DNA, 1574 bp, Artificial sequence
  DNA replication origin
cgatgggactgggtgccatggagcagggggtggcactcgtcggggaggctcgggccgcacaggagcccacggagggtatgggaggctcaggcatggcggctgcaggtcccgagccctgccccacgggaaggcagctaaggacaggcgaggaattgagcgcagcgccggtgggctggcactgctgggggacccagtacaccctctgcagccgctggcccaggtgctaagcccctcattgcccggggccggtagggccagccggctgttccaagtgcggggtccgccaagccgacgcccacccggaactccagctggcgcgcaagcgcggcgcgcagccccggttcccgctcgcgcctctccctccacacctccctgcaagctgagggagccggctccggccttggccagcccagaaaggggctcccacagtgcagccgtgggctgaagggctcctcaagtgccgccaaagtgggagcccaggcagaggaggcaccgagagcgagcgagggctgtgaggactgccagcacgctgtcacctctcactagcaaggcagcagggcagtcattgcccaatgtgaggaccccagaacaggggtgatactgcctgagaatccagggagctactcctggtgctggggtttctgtccagcttctgatcttcagacatgccccaccaaagccggcttctgcctatagcccttctgccagaagctcacacaagaccataagcagcttaccaagatccacacttcctgcccaagacaataagtatggttggtggaatgaggttgtctgcttctttggacctggtatctagggtcctgctgaaaagaagaggtgctaaatgcctcacattcaaaagagatctcagataccagggtcagatactgtttccctaggcagctgattaggcttccacagtcaaccccgctcctatccctaccacctcactgctccttctgtatggagaagagcagaaagaagtcatctaggtcaacagccttggacaaggtttatagtaggaagagacttcctattccccactgtccactcctgccccaaggcaaaagaaatgggggaggggctgcaagaaggggagtgcagcacctcattccccagctggacatctgcttcagctatggacttgcaggtttccccctttgcctacctgagcaggagaaagtgaactgaagagagagggcagctgaggagtggtttgcacctggagaaagtgtgagtcttgaactctcttgtcaagatctacccaagaggcctgcccactgggcatagggacccagaaacaataggctgtggggtgtgccaccagagcgttgctgagaagtggcagaagacgtcctttcaagctggatcttccacatcagggaatggtgtggtcccctctttcctacaccatcccactccaacacctggaggattttaaaactgaatgagggaagtaggccagagagcattctgaattagatatgagaaagaggttttagagtgaatcgacctcagtttagtgtttgaaagtgacaagagtaaaggaatctatctacaatgtgctcagggaa

SEQ ID NO: 7567 - DNA, 956 bp, Artificial sequence
  DNA replication origin
gggcacgctgggggcgactttcgtggccgggcggctgaccccggcgacccggcgcagtgtccagaagtgcgctggggggtaatgaagggcagcgctcgctgaggctgaaaggagcgagggccggcgctgtgtaggttagattctttgttgacgtctgggagccgtcttttgaagaatgagaacggggccgttattgcaagtaggatgggcttcatcgtgggcctcgaaggatcaggggtgggcgcgccggctgccagggcccctctcacgccacgccgcgtgcaggcgaggggaagcgcgtgtcgtgacgacctgcgatgagatcagtttgagtaaccacagccgtcggggctgagaaatgcagccagtcacgcagcgcagcgcagctcagcgctggctctggccgggtggccgcagccgctccgcgcttcgcagagggaggtgggggtggatcagccccttccaggtggtcgccggtgggggcgtcagaactattctaagagggtggggagccagagaagaaaaccatacaaaatgcaacttgcatgattaggaggctgaattctatgagcaaatgggttttcaagaagcacactgaaaataacctctgtaaatggttgtctcttacactttgcccagtagataactgtttaaaaactactctaacacggaattcaaaggtcattcaaatgtgccttcaatttgtttatattacttagtttaacaggcagtacacacggctcacatatgcgtgcatgaaatttaatttatacagtcaagtctggaagcatggtttggcaagaggaataattgtgaattcagttaaagtcagggtacaaacagccagattacttaaaaggacagatgaactgaaaaaaaaatcagtccatgaggaagctgttacattcatcttttcatggtcttgaacatcttataccaactcaacaataataccc

SEQ ID NO: 7568 - DNA, 1019 bp, Artificial sequence
  DNA replication origin
ccgggctgcccccgcgcccgcccccgccctcgaaatccaggcagtgcgggaggccgccttgctgctctctccgcccgcacagggccgcccgacggagcgggcagggagcaggcgccaaggaggccgagaggggcccaggggcgaggtcgactctcagcccgctgtccccttatcccacgtttcgcagcctgaggtgtttgttgtatatcgggaactgacacttttcggcgttaaaatgagggcgtcacctgctcgaactaaagtcggtggagggcgtctggagccgggcggaatctgggatgcctcgccggattacgcggcggggtcggcacgcgaggcaggctccgggcgcaccaggaagcccgagcgtgcactaaagcggcggaagcaggcagcgggggcggggccggcgggctgcaggcacgcaggcggcgcggcggcctggggttgcgtgacctgccgggctgcggtcgcacgcacttcgtgcttcaggcggccgtcgccgggcgggaggtgcaggtgctggagggcggcgcccggcttctactttcaaaacaccgccggggagggcagtcacgctatatttctgggacagggagtgagttcaccgggggaggacacagcgtccccttgttatcacaacgtgggtaacattcggtaataaaacgcgctcggacaggatgtattaaacgaattgggaaccggagctgctctttccataagcaatcaagctggggaaactttacaaggaaagctttaaattgcgatgcatggcgcaggagtgtggttcgtgtgacatgcttacagagaaaggaaccagagcaaggacggtggctttgggacgaaatttctgtccgctctgcacaaagactaattacagagtcgtgatttggggcatgctctcattcctcccggaagctttctttgcagtgttttattttaaaatcagaggtggttgatctccctggcatacgaacatgagagacctcatttatatggtgactcaaaagccccaagga

SEQ ID NO: 7569 - DNA, 1098 bp, Artificial sequence
  DNA replication origin
actcggaatgggacaagctcttcatcatgctggagaactcgcagatgagagagcgcatgctgctgcaagccacggacgacgtcctgcggggcgagctgcagaggctgcgggaggagctgggccggctcgcggaaagcctggcgaggccgtgcgcgccgggggctcccgcagaggccaggctgaccagtgctctggacgagctgctgcaggcgacccgcgacgcgggccgcaggctggcgcgtatggagggcgcggaggcgcagcgcccagaggaggcggggcgcgccctggccgcggtgctagaggagctgcggcagacgcgagccgacctgcacgcggtgcagggctgggctgcccggagctggctgccggcaggtaaggaggcaagcggggccgggacctcccactgcggctttgttccgggagcgcgcgtaacggcaagccaagccaggcaaccttctaggggaagctttcatgggaagcgcgcgcgcgcgcgcgcacacacacacacacacacacacacacacacacacccctatttctgcatgcgcggtcacagagctcaggcacaccatacaaggcgggaaaattggctttaaaaaagtattcctcagtcctaaggagccctaaagagagttgtggaggtaaccatcacagtcttgaaatagacgtctagggccccttacacccgatccgactaagcgctgcaggagtccactggcccgttataaccgtgatccctcttgccgcccagcttccctccgttagggatttccacgtcttctaattttatcctgcctctgtctttagaggagctctggtttcccgcactatttcagggcccaggctaacgtttagggatgttttccagcccctcagccggcccctcctctccgcccacccattctcagcaagaaacttgaggctaaagctaatctcccgaagggtcagcggaattcttcaggggtcccccagcccccggggtttgtggaattagcgcgacaggggaggtcggagggtgtgcggtttgggattcagcgtggaacagtcaggtgtaggagccaatccgtgtaggggatcccagctccaccccaggga

SEQ ID NO: 7570 - DNA, 1075 bp, Artificial sequence
  DNA replication origin
aaaccgaggatcgcgaatattccgcttgaacctgttgatctctgtgggttaagcgtttagggtcgagtctgcgtttccacgagggagggcgaagagagaacagaaagagcggttgctttcgcccgccaccggaggctggttttccgcctcctgccttctggcccggcttgggcggcgagccctttgggcagccaacatggcgtgggcgcctgtgctcgtgcgaccccggtcgggcaggcgggacggagattacctggctgtccaggggaccttatgcagggtttggcccgagcccaggggcagcgaggggcgtctgcggatgcggctccctgtgcggcacaacaccggggtctgttgctctcgctgatacctttcggcccaattgttcctaaattagaccagcaagtttgcggtaggcagagagccagcggtggtgagagctggcctgagaacgagccagccttctgggaatggccggtgtgagaggccagtgggtggccttgccgcgcccttatgtccagactttgctctgtgagaggcctggcgctgcgcctttgatttctgtgagtgctgcggagcaagtgagtgcgaaagtgagtggaaaccatttggtgtttgctggggaaggccggtgactggggggtgaatagtgaggcggtgagtcgaggtacgtttgtgaaggaggtggtggatgactgcccaccttgccccaggcggccgctcagacttgacctttgcgcttctccgggatattcttcctccgggtgggttgagaagccggaccaggattccacgagggggaaggattctctattcttttttgcgacaaatctggtaacaggatttgctgtgctgttttcgtccgtgtgtgtgtgcgtgtgtgtgtgtgttcgtgtggatgcacgtgtggccccgctggggtgccccctccagtgtccccggagctgaaagatcgcaaagaggatgcgaaagggatggaggacgaaggccagaccaaaatcaagcagaggcgaagtcggaccaatttcaccctggaacaactcaatgagctggagaggctttttgacgagaccca

SEQ ID NO: 7571 - DNA, 1092 bp, Artificial sequence
  DNA replication origin
ccacctcctgtcccattgatgtgttattattgggggggctggagcagtaaaaaaagaagaaggaaaaaaagagcggggctctgctggcagaggttgagcgccgggctgacgtgcggcggcgatggaagaacttacggcgttcgtctccaagtcttttgaccagaaagtgaaggagaagaaggaggcgatcacgtaccgggaggtgctggagagcgggccgctgcgcggggccaaggagccgaccggctgcaccgaggcgggccgcgacgaccgcagcagcccggcagtccgggcggccggcggaggcggcggcggaggaggcggaggcggcggcggaggaggcggaggaggtgtaggaggaggaggagcaggcggaggagctggaggagggcgctctcccgtccgggagctggacatgggcgccgccgagagaagcagggagccgggcagcccgcgactgacggagggtaacgacctgactgacccccggcagcggttccccttcccgccttccggactcctctcgggcgggagaggactccgaggcccagcggggaggggagagggacacggagagggccctggaccccagctttgtcagctagagtgatagtggaagggtgggggtccggtggtatgctcggtcatgggtggggtcctagtgtgttgtgggggtggcgtggggggaagcgtgtggggtttgtgcgcgcccttcccagatgttcccattccaccgaaatgcatttttcaccagcgggaggatgggcccgcagcccggatggcccgcaggcggacgtggaagttcgcggggccgggctgcaggagggggtgctgaaccagacggcgggactaaagctagcctctagcgcagagtttgccgggagggagaaggggcagaggtggaaagcttaaccctccggtcgcctaggtgtttggggccgccaagacccctcgaactccgcagagcccctgaatctttggatcttaggggccaaaacttcccattctctttcaaggtagaaggaagccaacgaaagctgaggtccaggctacgctgcttctcccgggcgaggcgtttcggtttcttggtgt

SEQ ID NO: 7572 - DNA, 1365 bp, Artificial sequence
  DNA replication origin
gaacttcttaaattatctgctaatttgttttgatgccttaaccaatatacggaagatatacatattaatgttctgtaattcctcttatttttactaagagtattagatccaaaataatgatcaagttacctttaacttccagaaagtctgcattaatattcagagtacttgaaaatgtcccctaagccacacttagaggtatatttgtttacacacttaaatataacatcatatgtaaatattcttttgtgagtatgtatttgcatagccacacttctcacagcaagccctgtccggcacaatacagacaaatgactcaggaatatagatgttcctctaacgtaacaaaccgttccgatgaaaatagcccagaaatagaattttaaatcgtaagcggggtggtggggggggtaggcagagagacctttactcctggcgagcgtctcttttttagctctccgtaataaatgaaattagagggggtacaaacttaacgtcgatttttttttcagactcgaagagggataatctcttgtttttcaaattagtaaataaactcggatgtttcccaagatgctaaagaagaagtcctgtaattcaccatagaggggtccgagtgcagagagtaagggagaagggtgggagttctgagacctcagagaggaaacgaacgaagtcgagctgtccttgaccgggcgctaaggaaacactttaaaatgagatctgtcagctaacagctgctggggaaacttgttaaatcgactggtcccttttagcggggtctgtccatagaggagtcagctgggctccaggacacgaataatagagcgaataacacggaccgaggggcgaggagcttggagaagacccggactcagcctgcctgcgagccgggaagctcctaagagaagctgcgcgggtcggagaaggtgcaggcaaccctgtctctgggcaggatgatgctgggcggtggagctacggccggcaggggtgggattgtgagggagaggcggggatgcagaattgggatgcggggtcaggatgcgggaatgggatgcggggcctgtaaactgctgggcggttgatgcagggcagggacgaggaaaagcaatgcgaagctgagcattgcgaggcaccctgactcgaagcaaggctgtagggaaggatgcagtgtcgggatacctgactgactctaagagctgcgcacttgtcagtttcctcttggccccaccccgcggggtctatccagctccccagtgtttaactaagtcgtgacaccaacgcaaaatccacgcctaattaaattaattagggattcttgtcaatcctggattaatggccaagagcacaggcggcaggggctat

SEQ ID NO: 7573 - DNA, 2305 bp, Artificial sequence
  DNA replication origin
attatttgctcacagcttttgactaccagagaatgtttcggatacaggactaattcctgtggatgacagaatgcgaccgttgaatgggacattgggtgtcatctggtccaaatcttgaccccttttcattttccccgaaagaaagacttgcggctcggaaccgagggcggcatgcccaaggtcacagaaagggtggtctaatgttttggttcctgcagcccagagaacaagctatcccatcccacaggagccttggcgaaaagctccccggccggcgcaaggccagacttctcgcctccactgtgttgattgcggttgccagggcagcggcgcattgctccccgcctcgtcctggtgacgtcacagagcaatgtccaatgggaaagcagctcggtgtcacgcacctcctatcccggcgggcaccgcctgcgccgcggcgagtgaggcgtcgtccgtactggaggctagctcttgtcgcggccgcggcgagttaacatcgtttttccaatctgtccgcggctgccgccacccaagacagagccagaatgttcaggatgctgaacagcagttttgaggatgaccccttcttctcgtgagttacgggagccaggagtccggggtcgcgcgggaattaaggtatcgaggggagctattttaagggaaaagagcgagttttagagggcgagagagaattcggagtaactctggaggcggtttgaaggagacgaggatttggaggcctgggagggaagagagaggaggatttaggggtgtgtgagacagggaagagacggatttgggcgcatgaggtggagagaggagggtttggacgcgtgaggtaggcggagggaagtttgggggcgtgaggtgtggggaggagagttaaggctgggagtggggggagaagagttgaggccgggaggtggggggaggagaattgagggcatgaggtggggagaagaggttgagggcgtgaggtgagggaagggtttgggagcatgaggtgggagggaggagggttgagggcgtgaggtgaggggaagggttgagggtgtgaggtgaggggaagggttgagggcgtgaggtgaggggaagggttgagggcgtgaggtgaggggaagggttgagggcgtgaggtgggggaagggtttgaaagcgtgaggtggggggaggagggttgaggctgtgaggtggggggagggtttgggagcgtggggtgggaggaggagggtttgggggagtaaggtggaggggggagggttgagggtgtgagatggacgaaggaggatttgggggtgtgaggcgtttggaggagggttgagggcgtgaggtggggggagggtttgggagcatgaggtgtgggggagagttgaaggtgtgaggtgtaggaggagggttgaggacgtgaggtgggaggaggatttgggagcatgaggtgtgggggagggttgagggtgtgaggtgaggggaaggagggttttggaccgcgaggtggggggaggagggttgagggcgtgaggtggggggacggtttgggagcatgaggtgcaggggagagttaagagcttgaagtgcagggacgagggttgagggcgtgagttggtggggagggtttgggagtatgaagtgcaggggaggattgagggcatgagttggtggggatggtttgggagcgtgaggtggcggtaagagggttgagggtgtgaggtggatggaggaggatttaggggctgaggaggatttgggggcatgaggtgtgggaggagggttggggagaagggttgagggcgtgagttggtgggaagggcttgagagcatgatgtgggaggagggttgagggcgtgaggtagggggaagaggtttgagggtgagaggtagtgggacgagggagggttggggcgtgaggtggagggaggagggtttgggggcatgaggtgtggggaagagggtttaggggcatgaggtgtgggggtaggagggttgagggtgtgaggtggacagaggagagttgatggcgtgcagtggggggaggagggtttgggggcgtgaggtcgcaggaggatggttgaggacgtgaggtagagagttgagggccccaggtagggggaggaggatttggctgcatgagatggaaagaaggcccttcctcacactcccggggtgcctgctgctttccatttggccggactttgggtgcccgtcatggcttcctgtgtgcagagttggcctttgcagcttcaagggctttgcaggtgacataactaccatctcggtgaaacttatggtgagaattatgttcacataa

SEQ ID NO: 7574 - DNA, 1251 bp, Artificial sequence
  DNA replication origin
cagccccgccggcaacggctgcctgctccctggtccgggcccaggggcccgcgccccaccgccccgctgctcgcgctgctgctgttgctcgccccggtggcggcgcccgcggggtccggggaccccgacgaccctgggcagcctcaggatgctggggtcccgcgcaggctcctgcagcaggcggcgcgcgcggcgcttcacttcttcaacttccggtccggctcgcccagcgcgctacgagtgctggccgaggtgcaggagggccgcgcgtgggtgagtgcggagcgacgcgccggggcacgcgcctgcctgtccgcgcacggcgctgggaggtgacacctgggtacgcgcgcctgccggcccaacggatggtccgccagggaaggtgcagtgcgcacgacgcccggggagatcccagctgggcctggcgcccctgaagtatcccagggcgtggaaggggccccttcggtgcacagcgtctgcagaaatctggctcgttccttccagcatttatgaggtcataggtttttcacagggcagcgctcttgactgctcccacacctgggaaagagatgctttgggaaattgaggaacaggctgaaagggcaacatttaattttgtccggaggtacccagagttggttgctatgggggtgcttactgtgcctgcgccctactagtggctgcagccaaagttttgggcgggatttccaaaatctaagccagtagccataccataccgcggacgactgtctcttgttaattgcagtccaccacgctagggcttcggggtaatgtggttggaatttacacgtaggcctgggcagaaacctgctaatgctggcgtctgatttgatctaattagaagtgagtgaatccgagcccagtgttctatatgaaccgaatgaatgagaactttgcaacccgttgtttggttgctgatttcaaggcattgactgtaggaattgtctcgtatgtgtgaagctactttgcgttcttcatcctatagattacaaaagttacagaactacactaagtctgtcccaaaagcaaagttgctccttctacaacctccagatattccacaaagcctgcagacacacggcctcaaagaatctggaattgagtatcgcatgtatttaataaataggtcgagttttaaagtgtagcagcaggattttcatttaacagtgccaaacgcctggaagcaaacaccattggaaagtccttcaagaagctcagcctcggttc

SEQ ID NO: 7575 - DNA, 1176 bp, Artificial sequence
  DNA replication origin
gcgggaccccagcatcctgaggctgcccagggtcgtcggggtccccggaccccgcgggcgccgccaccggggcgagcaacagcagcagcgcgagcagcggggcggtggggcgcgggcccctgggcccggaccagggagcaggcagccgttgccggcggggctgcatggacgcaggaaagttggctcggcacccgacagacacgggctcggagcgggcagtgccggcgctcgcggaaataaggccgtggtgggcccctcccctccgcccccagggcgaaggtctgtagcgagcccgggtccccatggggccactccttttccacgtttcccgcagcccctgggttctctctgcccctccccgctgcccgggcttagtgctaggatgcggcatcgcctccgcagcgcagggccgggtgcttctggcccaggccgcggcgggagagggtcggggttggggggacaatggggacgcctccccgaggaatcgcggcccgcccgtgctacctcgtaccgcgtccctagcccagctcagggacttggcgtttcccctgcggtttcgcaaccctggggttttagagggaaactgcttggattctccaagcattagggctgtgatttcccagcaggtgaaaggggacggcggagaaaggggcaggccgcagcgggcattgatggggctcctcgtggcacagccactgtggaggtgggagaagtcgccagagggctggggctggggaggaggtgaaggtggatgccggcagggagcccgggacgccggagccaggggctggggacgggcctgaacacctgccggtcctgcccagaagaggcgccgaggagggaggagtgggcagcaaggcagggtaagataaggcctgagagtcccatttgtctcagaagcaagtaggtcattgatacattgataaccactgtgcgaggcagatttaaaggccggggatggaagtcggattccagcggggtgaggcatggatggggcttcagggaatggaggcagcaagtgttggcaactcttttttttttttttttttttgagaccatgtcttgctctgtctcccaggctggagtgcagtggcacgatcttggctcactgcaacctccgcctcccaggttcaagcaattctacctcagcctcccgagtagctgggactacagcca

SEQ ID NO: 7576 - DNA, 1262 bp, Artificial sequence
  DNA replication origin
ggagtgggcagcaaggcagggtaagataaggcctgagagtcccatttgtctcagaagcaagtaggtcattgatacattgataaccactgtgcgaggcagatttaaaggccggggatggaagtcggattccagcggggtgaggcatggatggggcttcagggaatggaggcagcaagtgttggcaactcttttttttttttttttttttgagaccatgtcttgctctgtctcccaggctggagtgcagtggcacgatcttggctcactgcaacctccgcctcccaggttcaagcaattctacctcagcctcccgagtagctgggactacagccaccatgcccggctaatttttgtatttttagtaaagacggggtttcaccatgttggtcaggctggtctcaaactcctgacctcgtgagccgcccgcctgggcctcccaaagtgctgggattacaggcgtgagccacggtacccggcggcaactctttttagacaggtggcagtgaagggctaagatagccattgtttttaaaccgtaggcaagagaaaaagtcctggagaaccagggctgagagaggagaactggtactgctaggcactcccaacatccatttctccatcctgcattttgttcaggggtctacccctgcaccaaacgtggaccccagtgccattgtggggctaaaggaaatctctttttgccagtgggtggttgagagtgggcatgtgccagttctgcatggtgagcaaagcctgtgggttgatgggcgtggtgccatctctggaaagatcctgtcttactgcacttcttcctctggctgttgtctgtcccttgtctgtctttccttccttctgcagataattgtgaaacacctgtgccaggccctgggggaatgagggtgaacaatcttaaacatctctgccttcctggagcacaccttctaggcaagtggggcccggacactcagtgaggccaagggaatgtgtgctatattggatgaagttacatgccagggagaaaaattaagccagaaaaagaaatggggagttgggaggtggttaatcttaaaaggtgtggtcagggcaggcctctctcgggaggtaatatttgggtgaggacctgaaggaggcagagccaagtggacatgtatgcaaaagcactgtaggcagagggaacgcaagtgcagaggctagggcaggagcctatctggcatgtttgaagaaaagcaagaaaatccagctggagggagaagccaaggggg

SEQ ID NO: 7577 - DNA, 979 bp, Artificial sequence
  DNA replication origin
tctggcatcattgactccgaggctctttgctagacctggcaactcagagatgtggaaagcgtggaccaccttgctcaagggtctcatgaatgagtggggaaatagacagaggatcagtgattcagtgactctgatacagcgtgatgagggctgtcagagcaatgacaagacttaataaggttcagagaacctaggacacctgcatgatttgaagaggaggtgatctttgagctgcattgtaaagggtgagtaggatagctcatctaaagctgagaaggtgcaggatgggagggaggaggagaagacgtcccagagctaatcctgagagaggctgctggtgaatggaaatgaaatgaaagtgacatgtggggaatttagttgtgcaaggcagatcactgaagtctgtttcttcgatgttcaggattgtgatcataatcttttgagcttctggaagatattaatgctggtgattctcaaggtaggatttgaattttagaaaggtgaccctttaagcagtaggaatggaatggattgggggttgaggggaacaaatttggaggcaggagaatggttaataggttggagcattgaagctggagacatgatgggccttgaattaaggcagtggtagtgaagatggaaaggagggacaggtgcttatggtgcttgggaggttgaactgacaggtggtcatttgctggatgtgaggtcggggagaggccagagttaaggacgactcccagactcctgcctagggtggacattggtgccattcagccatcaagaccgcaggtgagaaggtgcagggttgggaggaaaatgagtttagttttggcattgcggagcttgcggtgcccgagatttgtatgaacaggaacatgggttcaaaatgtgagagaggattgctctggggtgtgatttgggagccatcggggagtcagtgagattgctcagaaagaatgtgggataagataagagg

SEQ ID NO: 7578 - DNA, 1306 bp, Artificial sequence
  DNA replication origin
ctccgagaaccagacactttcccaggaaattataattccctgggggcgggaactgagaagggggtgggcggctactaatttcgcatctcgctctaggcgctgagaccaccccccgccccggcccggcccggcccggccccgccccgccccgccccttccccgcccgcggctgggagcccgggtccgcgcgcgagctgagctttactttgtaaggaaccgctggcagtcggaggtctcactcccgcctccgcgtctccctggccggcccctcctcccacccgccggaaggctcggggtggggggcgctctcggcccacgccgggcagggtggtcccccgcctccccaaaaggtgtgcctggccggggcgcggcggcaagtcgctgcaggcgccgtcaccgccctaggggagggaggacgcgccctcctggcggtggagccggtcccgccaccgagcatgcccagaggctgccgggcgcggcgcagtccgcagtcccggttttcgcggcggcaggctggagcaggaggcaggctgggatggggttggaggggccaagataggcccaaaagaagggggcactgggcgttaggggcgcaggtccagccagttagcaagggcggcgcgctgggaagagtggtgtattttcacgccgacacccgtattttcttggcttgcctcaagccgtctctgcgtgactcgttaccccgccgaagccacccggcatcccaaagcacgagcctggcgcctcctattccacgcggaagtgcccgagtgaccctgtgaaggacctccctcccctcacacacgcacatacacaagcccatgtgggagcccgagtgacgtgtgctcggtggtcatgcaccatcatttcccttccaccttcctcctcgccgcttcctctccctccaccgcgcagctccagccgccttgccgccgccgcatccccttccaagttcaggctgtgggtggaacctgttgctttagctcacgtttcccttcccctccgggctgcacgctgaggatgacctcagcgaggtgtgtgtaaggggaatggagggtaagtgcgagaaaggactcctgcctggcaaggagacaggggaagcgggtaggggcgaatgttctaaagggttgggcgagccaccagagactctttccgccacctccaatcaaggggaccttaaaggaggggaagaggtagatatcaggtgagggtgcccttggcacatccgctgcctttgcttccttagatatttcaggtacctgagtcaaacctatgctggcgttttcaaaaacgtacgggctgcctg

SEQ ID NO: 7579 - DNA, 1208 bp, Artificial sequence
  DNA replication origin
taacgcccagtgcccccttcttttgggcctatcttggcccctccaaccccatcccagcctgcctcctgctccagcctgccgccgcgaaaaccgggactgcggactgcgccgcgcccggcagcctctgggcatgctcggtggcgggaccggctccaccgccaggagggcgcgtcctccctcccctagggcggtgacggcgcctgcagcgacttgccgccgcgccccggccaggcacaccttttggggaggcgggggaccaccctgcccggcgtgggccgagagcgccccccaccccgagccttccggcgggtgggaggaggggccggccagggagacgcggaggcgggagtgagacctccgactgccagcggttccttacaaagtaaagctcagctcgcgcgcggacccgggctcccagccgcgggcggggaaggggcggggcggggcggggccgggccgggccgggccggggcggggggtggtctcagcgcctagagcgagatgcgaaattagtagccgcccacccccttctcagttcccgcccccagggaattataatttcctgggaaagtgtctggttctcggagaatccttggggcggggtaaaggggcgcgcctggcgcaaaatggttaatacaaagtctgcgcgcgccgcggggccccttgtatgaaaagtgtgcgcgctggtggctgggcacccctttgctaatttgagggttagttaccggcaggaagtctggttgtgcgagaggaaaggcgggcaggagggaagcctcaggctggtgctggctcccgcccccaggcctccttgggggacgcacctctgacccagcgggcgcagggtgcggggcactgagccggggcatttggggcgggtggcgggaggctggagcaggcttggcccagcagctcactctctacctcctccccctaggattaccgagaggatgggatggatctaggcagtgacgccggcagcagcagcagcagcagccgcgccagttcacagtccaactccaccaaagtgaccccttgctccgagtgcaaatcttcatcgtcgccggggggcagcctggacttggtgtctgccctggaggactatgaggagcccttcccggtctaccagaagaaggtgattgatgagtgggcgccggaggaggacggggaggaggaggaagaggaggacgagcgcgaccagcgagggtacc

SEQ ID NO: 7580 - DNA, 1274 bp, Artificial sequence
  DNA replication origin
taagcgccaggacccgcagcggcggcggcgggggcaggagcgccaccaccgccatgccgcccccggtgcccaacggcaacctccaccagcacgacccccaggacctcaggcacaatggcaacgtggtggtggctggccggccgagctgttcccggggcccccgccgggcgatccaaaagccccagccggctgggggccggcgcagtggccgcggcccggcggctggggggctctgccttcagcccccagacggcgggacgtgcgtccccgaagagcccccggtgccacctatggattgggaggcgctggagaagcatctggccgggctgcagttccgggagcaggaggtacggaaccagggccaggcgaggaccaactccacctccgtaagttggccggggtgcgtgcccacgcgcgcacacacgcgtacacaccccgcgcacagcccgcacgccccctccctgcgctcccgcccgcccgcggccccattcattcttcctcgagggtgggggccaggccagagagcctgccgtctgctcccctggggataaggttgctcggtctgtgagctgtctgggtttgcaggatgggcggagaggaaggaggagcagccagagggcagcggaaagtcgggttagtggaaccggcgactcattttaatggaattacttatggagaccaggttgtgagtcacttgcctgaaaataaatccggggagattctggcaccaaaagtcagtgcctgcgggggatatttcaaatcgtaatagttgtggctttgtcaatcgtggtggctctcctctcgttgccactaatgtctcatccatatataggcttgttcctatgcacacgcacacattcgcctgcccacaccaccggtctggcagcggggttcgttccgtcttgtgttaagcagatgctcctgtatttgaatgggttgattttcctcctctaagactttcttcctttatgaaacccgagttattgttgacctgggggaacggggtaaatggacctgtcaggataagggaggggttcttccctcggtcgcctgactcactccctctgctgtgaatccctccttgttttgataacggagccacttacagtttcttcccggaggctactgcctcaattcaggaaagccagacagggaggggtgctggagtggaaaagagggagggaggagaggagggctgcatctataataagaagcactggcaggttcacacttgtctcaacatcttttttgcccctgagagaagagcagataaa

SEQ ID NO: 7581 - DNA, 1018 bp, Artificial sequence
  DNA replication origin
atgggccctaaccacgacctccagcctagtactggaaggggtaggcaaatcattcactcatcatcgttcctttagatggctcactagatgccaggccgacgttgcaccaggtgcaggacacccagggagaacaggacccttggggcattgccacactaaatcagactcaaggcgttttgttcacaggtcttttctgaaacctgaaaagggatgagagctggctgactctgcaattattactcttgtagagaatccagtttaacgataggatgaatacacagagtcctgggaggaaagacctagagaaagagcccacgctcagccggagcaacggggtccaggagtcagcaaaggctcccgggagcaggcaggggccccaacctgagtgttaaaaacaagcaggcattagaccgcttccagcgggagggcacgcagggtctagccaggggaaacagggatcagaagcgcagtcatgaagggttgagggaggtgggggtctaggtgtccttgcagggtgtgaggctggagggctggatggggccatgccatgagggcaggggatgccatactaaggagtgtactttctgtgctgagagtagtggggagtcttcctgggttttaggcgggagatgtggcagaatttgcatgatggggggatcccttcagccacagcatgaaggatggatccaggggtcaggagtagagcagagggaagagttgacaaggtgtggccaagtccttattcagtatggagaacacagggtgggcaggagggactctcagagggcttgtgggccaaggcttggtagctcctcaggtgagcgggagaggaaggccctgagaatggggaatggagattgttctagctttacagggattactgtataagaggactgagtttggaggagatggtgagaagttccattttggatgtgctgggtttgaggttcctgtgggactttttagttcagttgtttttcccacaggcattagtcaccctaggcgtgggtagtgggga

SEQ ID NO: 7582 - DNA, 976 bp, Artificial sequence
  DNA replication origin
gataagaatttttcttagtacagaacaaagtgaaaagactcccatgtctacctctttctacacagacacggcaaccatccgatttctcaatgttttccccacctttcccccctttctattccacaaaaccgccatggtcatcatggcccgttctcaatgagctgctgggcacacctcccagacggggtggtggccgggcagaggggctccccacctcccagtaggggcggccgggcagaggcgcccctcacctcccgggcggggcagctggctgggcggggggctgacccccccacctccctcccggacggggcggctggccgggcgggggtctgatcccccacctccctcccggacggggcggctggccgggcggggggctgacccccccacctccttcccggacggggcggctgccgggcggagacgctcctcacttcccagacggggtggctgccgggcggaggggctcctcacttctcagatggggcggttgccaggcggagggtctcctcacttctcagacggggcggccgggtagaggcgctcctcacatcccagacggggcggcggggcagaggtgctccccacatctcagacgatgggcggctgggcagagacgctcctcacttcctagatgggatggcggccgggaagaggcgcttctcacttcctagatgggatggaggccgggcagagacgctcctcactttccagactgggcagccaggcagaggggctcctcacgtcccagacggggtggcggccgggcagaggctgcaatctcggcactttgggaggccaaggcaggcggctgggtggtggaggttgtagcgagccgagatcacgccactgcactccagcctgggcaccattgagcactgagtgagccagactccgtctgcaatcctggcacctcgggaggccgaggctggcggatcactcgcggttaggagctggagaccagcccggccaa

SEQ ID NO: 7583 - DNA, 893 bp, Artificial sequence
  DNA replication origin
tgagaagcgcctcttcccggccgccatcccatctaggaagtgaggagcgtctctgcccagccgcccatcgtctgagatgtggggagcacctctgccccgccgccccgtctgggatgtgaggagcgcctctacccggccgccccgtctgagaagtgaggagaccctccgcctggcaaccgccccatctgagaagtgaggagcccctccgcccggcagccaccccgtctgggaagtgaggagcgtctccgcccggcagccgccccgtccgggaaggaggtgggggggtcagccccccgcccggccagccgccccgtccgggagggaggtgggggatcagacccccgcccggccagccgccccgtccgggagggaggtgggggggtcagccccccgcccagccagctgccccgcccgggaggtgaggggcgcctctgcccggccgcccctactgggaggtggggagcccctctgcccggccaccaccccgtctgggaggtgtgcccagcagctcattgagaacgggccatgatgaccatggcggttttgtggaatagaaaggggggaaaggtggggaaaacattgagaaatcggatggttgccgtgtctgtgtagaaagaggtagacatgggagtcttttcactttgttctgtactaagaaaaattcttatcctgttgatctgtgaccttacccccaaccctgtgctctctgaaacatgtgctgtgtccactcagggttaaatggattaagggcggtgcaagatgtgctttgttaaacagatgcttgaaggcagcatgctggttaagagtcatcaccactccctaatctcaaatacccagggacacaaacactgcggaaggccgcagggtcctctgcctaggaaaaccagagacct

SEQ ID NO: 7584 - DNA, 1147 bp, Artificial sequence
  DNA replication origin
cacgccagctcagcgcagcccccgccgccccgcgagggcgccaccagcgccagcgccagcagtagcagcagcggcagcagaggcggcggcgccggagccaccgacaggccctcagcagtgaccccgggtccccacatggcccgcgcagacctcggctaacgtccgggacgggaggctggggagtccgtccgccctcgcgtccgtcggcccctccccggcgctccgctcgggtcccgcgcgcgccgcctcccgcgcctcagctacctgcggccggagcagtcctcacttggccacgcttgggcgggaggaggagcccgcggcgcgcggaggctgcgggaggcggctgctactggcggcccaagcagcttcccgagcttctgaccttaacctctcgcgcccaaccgcccgggccgggtgcaaggcttccggagcctccctaaatgtcagaggcagcccgcgcggggctgccatgggcatcttggccccggccggcgcgtttttcctcccccgccttgtcgctctctgggactggaagggttaacgctctgctctcagcccgggagccccttgatcttgattaattcagccttcgcgcttaggcccgccagacgggcgggggctctcgctcgcgtaggtgtctccgttttaagtgattggatttccccaggaatgttatttaaattgacttgcgactgggattcgcttaccatctttcttgtgatcttccgattaaaaatagatgatggccattaatggctagtgcagtacccactgctgtcccagagtttgggggtggggggtggagaccggcggatatttctgcttgcaggcaggtccagggagctaggaacccgggattcccaggaaacctccagaacaggtagagaatttctcgtagagggacaggtcagggtaccacagaggtagccccagagggacagggaagcgctccgtcaaggtgaccttagttgattaaggagaagtgaggggacgcatattttcccagtggctcatccgacaagcccccactgagtccgaagcacagagcaaagatttgggttgccgggctgaaaggagacccctccttgagcataaataacacatccgtgaaatgcctaaggaggttacaagtgattggcaacgttct

SEQ ID NO: 7585 - DNA, 1258 bp, Artificial sequence
  DNA replication origin
tcggctatttcctgcagcgcatcatctgccccagtccacgcaggtacccgcgcggccaggcgcgcccgggacagcggcccgggcctccggggggcgccggaccgctggggggcgcggggccgcccgacgacgacgacgactcgcccgctctgctgcgcgacgaggcggcagccggctctcaggactcactgctggacagtggcggcggcggccggggccggggaggcggcgggcgctcggacccctcctgcgcctcagagcacgagatgcgtgtagtgtcgccggtcttcctgcagctgcccagctacgaggaggtcaagtatctgcccacctacgaggagtccatgcggctgcagcagctcagccccggggaggtcgtgctgccagtgtcggtgcttggccgccctcgaggcggggtcgccgcggagcccgacggcggcgagggccgctaccctcttatctgagcgctcggggatcggcggctggtgcagggctgggggctgcgggtggcaagcaacggccggggtgccgccgccaactgcctcagaccttatctggcaccctggcctaactgcccggcaccccgcgactgggttggggtcactcgtctccctcgcgttctcccgggatcttatgtttctctgcgtttcattccgttcaaagaaacgtggggcacgcgcggcgggtgcggctgcagcaggcgaccctccagcgcaccttcgaaggacgtccctgccctctgccttgcctcgtattgtggttcactagtaagtgcctgcttccctagtcaaagagaacacgtgagccctttggtgcgtcgagagaagggcggtcttctttagggctgaggagaaaggaccgcagttccactcctttccctacctgccgcctggacaggtctcccagggtgggcagagggcgaggagccgttgaggaccagccgcgaccagggactgctgcacgtgggtgtgggagagcgccacttggttatgatgaaatcgctgccatgcggcagaccccccaaaatccctcagtgtcttcctgatctagcaaatagtcacagctggtgtttcacaattaggtggagtgcggggagtgggctaggggggacacctgtgatacaaggttagctgctgtacctactcagggaacagcaaccatgtatatccattcggctggacttttgattgttcaataactgaggaggtatttatatttatttgtcttttattctaatatttttaccatgcattgaacg

SEQ ID NO: 7586 - DNA, 1280 bp, Artificial sequence
  DNA replication origin
gggcccgggcgggggaaggagtcaccggcccggccatggcggacaacgagaaactggacaaccaacggctcaagaatttcaagaacaaaggccgcgacttggaggtaaactcggggacgacgccggaggggtgggggctgtgggcctggggccggtctccgccgggaccccgagtgtggggattaggggcgggagccgcctccaggcctcggggaatggcgctaggggccggcccgtctgtgacgcctctgctagcgcgccgggaagtttatgtcgggcctgctccgcctccgccggggagcgaggtgcccgggtacggccggcgcggcctaggcctgcccggcggagccggcccggcgcgggtgcgaggggccgggccgcgcggcggggaggccgggcgcggcgcgtgcggaggaggcgtgcgtgtgcggccggtgctgccccggccgggccgcggccccttccccggcagtggcggagattccggctctcgctcgggcaccgacgtctggcgccgcgggaaggagggcggtgggaatgggagggtgagcgtgtggcgaccgagtggggctctgaacttcctcagcgaggcccgaggcgtctccacttaaaggcattttttctggtcttcccgactcccgctttacccctgcctccccccaatatccaaactacaggacaacttctccgttgaaaaaaacacccccggcgtgagaggccatcctggtgatcctaacagtgccttccagcggcctgtgttttactctggatatagctgattcaagatgtggctcacggtgtgccctcttccaggcaaaggataccccttatttcagcttgtccacaaatctctttaccccctcctgagaggagaccaccagctgcattcttacatataaagtctaaagggttatacaaagctgtcatcctctagtctacagtatcctttccctccacctgctggtggtggtagtgggggatggggtgggctagggaatggcaccatcacgtttgattatttaaaaaggaaaaaaaaagcttcattgtcttagatacagctgctcccgagattgtctacataaggtgtatgggttaaatacacacatgcacacacgcatacccacacaccccactgagatttttgatagaagacttcttcccttcagcttttaagagtttagataaatagatttaatacttcccttctgcatcttaatcacgagtttagcttttagggaaagtggtcaagcagtattttttatgttgttctcggtacgttt

SEQ ID NO: 7587 - DNA, 1331 bp, Artificial sequence
  DNA replication origin
tccaagtcgcggcctttgttcttgaaattcttgagccgttggttgtccagtttctcgttgtccgccatggccgggccggtgactccttcccccgcccgggccccgcgggatccgccccaaccaacgcgccgcaccgacactcccaggaaccgggccgccgcctgagctgctgtgcccgccgcgccgccgcttccttcctcctctcacctgcctccgccgcggccttctcctctccccgcccgcccccccgccctaaccccagcgcgactgcagctccggcaaagacaactgtggggccgggcggcggcaaggcgacggaatgtgctgccggctgagagggggaggcagcctcgatctgagggccccggcgctgcggccacgcccatcgcctccagcccggctcgcccattggctaaccaggctccggtgcgttcgaccaatcagaaggggcgatggagagccggggcggaaagagcgaacggaaaggggaagcgaacgacgctgggaggagccggctccgggcccggaggggtgcggcgggggcaggcggggaaggaccacgtgccttcggagagaggggttggaagcaatagagaagtagacttaaggggaaaccagcaaggggaaggagaggcccgggaacgcagcagggcgagttgttttgctccactcgtccaggaagccctagatgccgggggttcagggtcgaggctgcgttaaagtaacgttcttttctccccgggcgcgccctgtcttcctgggcattccttgcgctctccgttcgctttgcagagagatctgagcttcgctgtctcccggtcggacgctcgcagctgcgttcccgggctggggctccgtgccgtccagggccgggtctgggggccaggacctgctgggatgacgtgagttgaggaggctcagcggaaagcgacaggaaaggtgggtggaaaaggaaagggcccattagacgaatctgattcatcttctgtgactaagcacccgcaacagttaggaatttaggcagagctggtgatcctgggacaatagcacttcctaggtaattcgtcttaaaaagttaaagaagctgcttgaccacaaagtatgaacttctggagggcggggcccgtggcagctgacagggaatattgtgtgttgagaaaggaaatgagttccaaggataccaaggacaacgttaccagaggcagaaatgacacgagatacaaaagaacgtattcaaaaatttaacaaaacagaaatggaaaattattttaaaatatattgaaatatcaacgaataacacctcaaatgtacagggatatgtaaagcagcaa

SEQ ID NO: 7588 - DNA, 1334 bp, Artificial sequence
  DNA replication origin
ctcctcgcgtcccggctcgcgcgcgctccgccccccgcgcgctcgccccgccccgtcccgccccttgagtcgggactcgacaccccgaggtgttcccacccagctgtcagaggctgagcaagttccgcggccgccggtgcgggctcgcagccccatgcggtccaggacagccaagggggagaaaagagggaggtccgctgcctagctcttgcgaatcgttgttccttccccctgtgccggctcctaagacaagctaatactgaccccggtagtcttagcgttggttttccaggaactattgctgctcactgggaagccgagagccatacgtgagcgttccccccttcggcggctgcactatagtgcggtccccgcttcgccagccataaggcaagcgagaagggacgcacttctcccggcttgcaaagcggtagggagacgatcgggccgctggccgctgtctcggcgttcagcaatagaggccttcccggatctcccgagaggcggggagcgagcctgggtccagcagccttctccctcccgagaacagcagaaaggggggactcgacagaatgacctctgtttccccaaggaagtgcactctgacgataacctcgggagggacgagaagggccgctctttcggagagcggccgccgcccctggagtaggggactcagtggccacgaaggccttccctgctcgcgacctttccacgggaaggcacgaagcttccgatgggggccccggggcgctcctgacttttctacggcgcgagggctctgactctgcggttcaggtttgaaagtcctttggaagctcgcaagtggtggtctcccaccacctcctcggtcatcgcaggaagaaggcgcagtgagggcgggagtctggatgagcggagagtagccaccgcggagaagagtgcgggcttgcaggagccgacgaagataactcgaaatgtgggcaggcaggtgttggtgggtcttgaaagtgggaaagcacgagaaaagaacaatgttcgcgtccgcttagaatacggaaacaagtgagctttaaaggaaaatactcattctcattacccctgtccaggaagaagagtgctgatctgctgcttccagtccgctgggctggagagcagaaagaggctacttgatcccagccaagccagtgtctgtcccccagcaagcacttctgccttggtgtgatccccattccttttctaaaaatacaaaataataagaagtcctggaaggaaatacactaaaatgttcccagtggttaatcatgcgtacagtagtagattatatgcagctttcattttctgctttagacttt

SEQ ID NO: 7589 - DNA, 1483 bp, Artificial sequence
  DNA replication origin
ccccttcggcggcgaccgaggggacctgcgtccctcgtccgccgggctctggagccctgcgcctcacctgctgatcgctctccggagtctcgagggggcacccccggagggaccgcgcgggcgccggcgcccctgaactctcccgctcaccgcggcagacccgcccagcgcaactttaacttgattcttcttgcccaaccggggcaccagcggctgctgctgcggcggctgctgctaccgccgccgccgcggtctcacaaaggggctcagggaagggaggcggcgcgggcggcagggacgggcctccgggccgccgaggcggggagacaaaagggaagctgcctctgctcgcgctgcctgctcggagccgcttgctcggctgcctctggctgggctccgcgatcctctcccccaccctcgggcactgctccgcctccctcccggcgggctgtccccgcagtgctcccggacccggcgagccttcggggcgcgcgtcgctggtggtggttgaggctctagcgataataaatgatagaggatacaatgactttgctgtctctgctgggtcgcatcatgcgctacttcttgctgagacccgagacgcttttcctgctgtgcatcagcttggctctatggagttacttcttccacaccgacgaggtgaagaccatcgtgaagtccagccgggacgccgtgaagatggtgaagggcaaggtagccgagatcatgcagaacgatcgactcggggggcttgatgtgctcgaggccgagttttccaagacctgggagttcaagaaccacaacgtggcggtgtactccatccagggccggagagaccacatggaggaccgcttcgaagttctcacggatctggccaacaagacgcacccgtccatcttcgggatcttcgacgggcacgggggagaggtaggagctaccccggggctttgtatttgtgtccgtgtatgtctcgtgtgtgtgtgtgtgtgtgtgtgtgtgtgtgtgtgtgtataaacaacaggacagcgtgtgcgcagcgggagaggatctgggtgcgaggggcgtggtgatgacaccacggtgcctggctggacaaatgcggctcaagttgccaaaagcactgctggatccagacttcttggtgctgagggtccactttagggaaaggagagtcatccacagcatatttgttgctacttaatgtgaggttcccaaggccggaacccagaaaacactgtgctagtttagcaaggagaattaatggtatctccagtgaactttggtcccagaccccagtgcccttgttctagggtttgagctgaactaggcacagagaaggaagacaatatcttatgcttcattaggcaaacaggctatatctgcagagcgagctcattgagggtgaaggaagctgtgactccttcccatcgccttcactctagggaggaatccgaggggcagctctgcgcttctttccaactct

SEQ ID NO: 7590 - DNA, 1526 bp, Artificial sequence
  DNA replication origin
ctggagatgtggctggggtttgtctcacagtggaggcaaggaattgcaacttttttctattattgtacaccttgaaggcaaggttaattaaatcctgttgtggggtttgagggccggaatttaatttttggagttttatttaatgtcaggagcagattgtgtaataaaatgtatattgagaataagacggccttttgaccttttagggtctagggctgtaaagcgtctcagggttgctgctgaatgagccatgaactgggctgggttttttatatttgatgaaaaagagtctaaatgctaattgattttggagaggtcggataaagaaaaaggagcattaaccttgactatgcctttactccagccacctttttaagaggaaattgctgggcaggtgggggtgggctagtcacggaacgaaactgtaagccagaccaggtgtgaggaggggaggtgataaaaggattatagggtgggggagcagaggctgaggaagaattgggacctggctcagcctgttgaggaggggagaggtcagatgggtctgtagaaaaggaaaattagaaagactcagtgacgcttggggttgggactgaggagacaggtgggagggaaagggaggatttgagatgagtcgcattgggaacagagactagggagggaacaatgtgtaaaagaatgcctggacgtcaggcacctcagaccgtttgcccattttatgataagaattatctagatcttgtaggatggaaaaatcgaaagtgccgttttctggctatttggaactactgtcaagtttgtattggggtcaagtggcattgtagaaaaaaataaggcatttaggttttaggtcaggtgtgagttgaagaggttttatgttcttaagaacacaggctaagggagaagaaggaggaatggagggtgaaatgttgcctatagtgaaggaggcaagtttaaagaaaagggagagtagagacatggagggaagcggtttgggggttcttaccctccagaaaagcaggaagggggttggggcatgaaaacaaggtgttggggtgtagagataagaggtcggggcgtggaaataagggattggggcacagagataagaggtcggggtgtggaaataagggattggggcacagaaataagaggtcgggatgcggaaataagggattggggcgcagagatataagaggtcagggcgcagaaataagggattgggacacagagatacgaggttggggtacttgcccctcccccagaaaagcgggacttgctgctaagggtgaaggagaaggggttgggggtttcttgccccccagaaaggtggagaaggggtagagacatggagagaaggggttggggtacttgcccctcccctagaaaagccggacttgccactaagattgaaggagaaggggttgggggtttcttccccccagggaggcggagaaggggtagagacatggagagaaggggttggggtacttgcccctcccccagaaaagtgggacttgctgcta

SEQ ID NO: 7591 - DNA, 911 bp, Artificial sequence
  DNA replication origin
gaaagtggagaaggggtagagacacagagagtaggggtcggggggttcttgctccctagaaaagtgatacttgcaactaagggtgaaggagaaggggtcggggggttattgccttccagaaaagtggagaaggggtagagacatggagagaaggggtcagggggttcttgccccccagaaaagcagtacttgccgctaagggtgaaggaccaaggcaggcatccccgtgtagtcagacacctctgaaatgtgggtgaataatcaggcaggcatccccgcatgattaaacaccaagggaagactgtcttcccgagtccgtgactggcaccggagatttgggtctatggataaaacacgtctcctgtctctatgagaaaaggaaaggaactgaaattaagagaagggagagattgaagtgtggcgccaagattgaaaggagaaagaggttgagggatagtgagagaggttggagaagagggtaaaaagaggccgcttacctgatttaaaattggtgtgatgttccttgggctggtcggtctgaggacctgaggtcgtaggtggatctttctcatggaacaaagagcagaagaacaggggattgatctcctaagggaggtcccctgatccaagtcacggcaccaaaatttcactcgcgtccctcacacaaagaccacgaaactggctttgtgtgagtaacaggtctgtttatttcacctgggtgcagatgggctgagtcgaaaagaaagtcagcgaagggagataggggtggtgctgttttataagatttgggtaggtaaaggaaaaaggggggttgttctctggtgggcaggagtagggggtcacaacgtgctcagtaggagagctttttgagccaggatgagccaggagaaggaatttcacaaagtaatgtc

SEQ ID NO: 7592 - DNA, 1112 bp, Artificial sequence
  DNA replication origin
ggaatccctggcagctgcggttcaggcgtctggagttcttgtgtgctggagatgtggctggggtttgtcttgcagtggaggcaaggaattacaactcagaaatacattgctacttggctgcctctactctattattgtacactttgaaggtgaggttaattaagtcctgttgtggagtttgagggctggaatttaatttttggtaatttatttaatgtcaggagcagattgggtaataaaatgtatattgagaataagacagccttttgactttttaaggtctagggctgtaaagcgtctcagggttgctgctaaacgggccatgaactgggctgggtttttcatatttgatgaaaaagagtctaaatgctaactgatttgggagaggtcagataaagaaaaaggagtattaaccttgactatgcctttaactccagccacctttttaagaggaaattgctgggcaggtggcagaacgaaactgtaagccagactgggtatgaggagggtaggtgataaaaggattatagggtggaggagcagaggctgaggaagaattgggacctagctcggcctggaaaggaacagcctggggaagaggggagaggtcagatgggtctgtagaaaaggaagattggaaagaggaaagactcagcgacgcttggggttgggactgaggggacaggcgggagggaaagaaggaagatttgggatgagttgcattgggaacagaggctagggaaggattgatgtgtaaaagaatgcctggacatcaggcacctcagaccgtttgcctattttatgataagaattatctagatcttgtagaaaggaaaaatcaaaagtgctgttttctggctatttggaacgactgttgaatttgtattggggtcaagcagcattgtagaagtaaataaggtgtttaggtttaggtcaggtgtgagttgaagaggttttaagttcttgagaacacaggctaagggaggagaaggaggaatggagggtggaagggtgcccatagtgaaggaggcaagcccagagaaaagagagaatagagacatggagagaagcggtgggggatgcttgcccccaggaaagtggagaaggggtag

SEQ ID NO: 7593 - DNA, 1054 bp, Artificial sequence
  DNA replication origin
agccctttggtggtcggtgggactgggcaccctggagcagggggtggtgctcgtcggggaggctctggcgccacaggagcccatggaggaggtgggaggctcaggcatggtgggctgcaggtccggagccctgccccgcgggaaggcagctaaggcccggtgagaaatggagcgcagcgctggtgggctggcactgctgggggacccagtacactctccgcagccactggcctgggtgctaagctcctcattgcccgggctggcagggccggcgggctgctcccagtgcgggccgccaagcccacgcccacctggaactccagctggccagcaagcgctgcgcgcagccctggctcctgctctcacctctccctccgcacctccctgcaagctgagggagccggctctggccttggccagcccagaaaggggctcccacagtgcagcggtgggctgaagggctcctcaagtgccgccaaagtgggagcccaggcagaggaggtgcctgagagcgagtgagggctgtgaagactgccagcacgctgtcacctctcaccttcactaatgacctatttcatcacccgtttagagagttcggtatgcttaagggcagttattgttttaggtgttagctttctcagtgtacagagcagctctaagctggcaacgtggcacggttgcccttgcgatcaaatagaagtgggctaggagctctgtgatttagcctgaggctcttcaaacatccatcctacttccgtgcatggcttctgccattggctctctcccccagcaccctgccacgacagaaaaaagcaatccgattccagaaaatccggaggcaaatggaggcgcctggtcctggttagttcccaggttgatggaaggctttgatgtctgcactgatgtgatccgaagttgttgttgtggtcgttgttgttgttgttgttttttaatggagttctgccctgtcgcccaggctgagtgcaatggcggatctccactcactgacacctccgcctcccaggttcaagcgattctcctacttcagcctccc

SEQ ID NO: 7594 - DNA, 1004 bp, Artificial sequence
  DNA replication origin
gagaaggaggagggaagagggagtaaataggcagagagcaagtgtaaaggtaaagaattcggcttcatctggagtgaattcctgtaaatccccttgaatataagatcggtgatccaatcaaggaatgccatgagggcgggatgttctgggtaggaccatgaaatgttttctgtgacgcagtgaaggaagagggtgaaaccgcaggatgggcaaagacaggacatttaggaggggcagctatctgttggtggctattatacctgctataaggaggattatgaggcaaaagtttatgaatattgagattttttgtctgaaattccacctgggaggtgagaccatatatagtcctatgacaaagagtagagtaagcagggtgattactgcaagggcagcgtaatagaagattttcattaataaaatttggatacttaaggtaagggcttataacctatctgtgatggttcatgggggaagagtggggtcttccgggatgggcattaggtggagtcgaattggtctgagaagagtgctggtacatttgcagggaacagctggtcggttagtaggtggtgggccagctgcaggggccttttttaacctggaaagatggtaccaagagttgtgtcctggaagtttggctgtggtgggggtagtgagaaggatttggaaagggccttaccactttggtttgaaactcattgaagtaagggtttttaggaagaaatagtctcctggaaggagtgtctggtcagtggggccttggtgaagttttgggagggcctggtcagcttgttcacggaggagatgatggatgagggagagggttggaaggtacgctcctaattgagagtcaggagggggtcagtctgttttgtaagaggaaagggcgtccatacattaacttgaatggactgaggaaggagggagcctttggactggctctgatatgtgtcagtgctatgggtaaaagggaggtctaaggttttttgacctcaagtgtg

SEQ ID NO: 7595 - DNA, 989 bp, Artificial sequence
  DNA replication origin
tagtgttgtctagttgtttagagaggtatgccacagggcaaaggaaggaagatttcccttttgtcaccctaagaccctgagagctattccttggttttcagttgtatagagaacaaagggttgggagatgtcagctaaggacagggcaggttcagtgatgagagtggtttggagtttccagaaactgggaaatatgttgtgtggggggcttaggggttcacagagggggcctttggctgcttcatagagggactgagccaggaggacaaagttgggaatccatattctaaagaaacctggcaatcctaagaaagagagaatttcattttttgaagaaggcagaggcaagctgtttgttaaggtcgcttgtgctgaggtcatggcttgggccctggggggagagttggactcctaagtatgttactgttggggcggatatttgggctttggagggggagaccctatatcctttgctagcaaggaagtttagaagggtgatggtgtgagtttgggagtcctctagggaggggctggaaagaaggagatcgtcaatgtattggaggaagctgctgggggaaaggtttaaggaggtgaggtcctgggctagagcttgtccaaagaagtgagggctgtctctgaagctttgagggaggacagtccatgtgagttattgtgacggaagagtgtcagagtcagtccaggtgaaggcaaagagatcttaggaattagggtgtaagggaatggtaaagaaagcatcctttaggtcaattgctgtatagtgggtggtgttggaggggatgagggagaggagtgtataggggttagggaccacagggtgaatagggaagacagcctgactaatggctcagaggtcctgaatgtgtcggtatgagccgtccgattttctaatggggaggatgggggtgttatatggagaatgtgttggtctaagaaggccgcatgagtacagcttgtttataataggttgg

SEQ ID NO: 7596 - DNA, 1645 bp, Artificial sequence
  DNA replication origin
tttaagtttgcaccctatgttaggagcagactgagagatgaaatgggtattaagaacaataactccttcccagcaggtggggtcaacgtgggtatatttttggagggcctctgtaaggtgggaaagaaattcggcggggttttcatcggctctttgggagttttatttgagcttttcaaaatttatggccttatggactgctttgttaaggcctgcgatgtggcaagtaatcatatggttatgagatgcccggccagggtcagtgggttggtactcccaggggggttcctccgggggaactgcagcatcccctacaggcttagtagggtcttgtggatgaagatagtcggcatgtgcctgtgctgtgagccacactctttccttctcttctggaaggagggtagaagacaggataatgtagagatcatgacaagtgagttcataagattgggtaaggtatttaaattctttgatataactgtcgggatcggaggaaaaggacccgagacgtttttcaatttaggagaggtcagagagggagaagggagtgtggacgcgaatgatgcctttggctctggccacctctcagaggggaagtatgggggctggttgttggggatgctgagttcgagagtgggtaccaggtggagatggggatgaatcagagtcagaagctgggtcgttggagaaagggggaaaggagggagggcaggagcaggagcgtggggcagagggtcatgatgatcaggcagaggattattatgttgactgggcagagggaagtcagcagtgtcaaaagcgaaagaatcgtcagaaggaaggggagcttcttctgacagaaagaatcgtcagaaggaaggatgagtcaggcttggagcggatgaagaggatttggaaagcacaacaggactgacaaagggaggggcgactgcagaggacaaaaaaggactgaacaaaagggatttcagaccactttccattgcgatggcaaaagttgtctaggtccctgaggatgttaaaatcgaatgccattgggcgccattgtccaatttatactgaggccaggctgtgttacaataaaatatgagcctttttggccgaattttggaacagaggccgagggcattaaggttatggaggagacatccgaggggggacgtctttgagggagtggactcagaggctcccatggtagaatgagtgagggagaggtggtgatgggagacttggccgcagactagaacgaagggagaaggcgtcccctgtcccacagttcaagtcggagaggtgcaataatcccctgttcaggcatccctacaagggaaataccgagggtctggaggccgggaggaggaaaccgttggcccagcgctgggtctttccggagggaaagagcggacaagggttccagacagaaggcagaagtctcctttactccccctgaggtggccctggtgttggatgtgtctgccagcaatggaaaggagtaggaaatcctctgggtctcctgaaggttctggaagggggagttcagccgggagaagagggggagggaaggagagagggagaaggggaagtcgaactctaccaccttcctgggttttggcaccaagatgtaagggataattggaaggacagccaagaa

SEQ ID NO: 7597 - DNA, 975 bp, Artificial sequence
  DNA replication origin
gatttgggagaggtctgataaagaaaaaggagcattaaccttgactatgcctttaacttcagccacctttttaagaggaaattgctgggcaggtgggggagggctactcacagaatgaaactgtaaaccagatgggtgtgaggaagggaggtgataaaaagattatagggtggagtagtggaggctgaggaagaattgggacctagctcggcctggtgaggagtggcctggggaggaggggagaggtcagatgggtctgtagaaaaggaagattagaaagactcagcaccacttgggggttgggactgaggggacaggcaggaaggaaagaaggaagatttgggatgagttgcactgggcacagagactagggagggaccgatgtgtaaaagaatgcctagaggtcaggcatctcagaccatttgcctattttatgacaagaattatttagatcttccaggatggaaaaattgaaagtgccgttttctggttatttggaaccactttcgagtttgtattggggtcaagcagcattgcagaagaaaataaggcatttaggttttaggtcaggtgtgagttgaagaggttttaaggtcttgatagcacaggctaagggagatggaggaatggagggtggaagtttgcctatagtgaaggaggtaagcccagagaaaagagagagtagagacatggagggaaggggttcaggggttcttaccctccagaaaagtgggaaaggggttggggagcagaaataaggggttgaggcacagagataagaggtcggggcatggaaataagggattggggtgcagagataagaggtcggggtgcagaaataagggattggggattcttgaccactagaaaagcgggacttgccgctaaggatgaaggagaaggggttgatggggttttgcccctctcccagaaaagcagagaaggggtagagacacagagagaaggggttgggat

SEQ ID NO: 7598 - DNA, 1073 bp, Artificial sequence
  DNA replication origin
gaggggtccttcgctccgccacctggcctatttgttggagttacttacgatgtcttcacccagaaaagaggtccgagggtatgttagtctccggtacccctccttccaccaacgtccttacacctaactgatccaattcaaaactgcaacaaacccctagcacctgtgagcgtacagaatacaccgcggccaaactcgatgtgctctacaatgcacatcctacatacgagaaatactggtttcaattaggcgaagtaggaaaggatggcggcgagtacctatggtgcagagcgctcaggatctccgaggtttgctgcgaggggctacccagcaggaggggcaaactctctgcgaagctgaattgtatccatcatactgtagccttgtagcttctcctcttctggccaccaactttccgaaaggctaccgaatcacgcttgtaatccgtttaaatgtttccacctttgagacttgcagggaaatggtcgctgcataccaatgggagagcggggcgcgcacctagcgcggcgatgccagcgacagggagctcacgaccacagctccctatgccctcgatggttggtaggcaggcaggcagagtgagtgtcccaggactaggttcctttgatttaaaatctcggtgctctggatcagtggagagcttcgttgttcccgagagcctgagctcagtctctggatttctctctttctctcttcctcaaaggttgtcactcacagcgcaatccctgcccgaggcctccttccatccgagaagatggaattagcccttgcttttccagggtgtctttgctctttgccctttaggtgggtgggagtgggggttggtggcgtgtagatgagagaagaaaagggtggggagaggcggaaaggaggcaggaagggggcgactagatctcagatcccagcattggtcagacggcgaaggtggggggaaagaaggagagggggagagaagatacaaatacacagtatggctgtgcacaccaaattccacttggatttgggagatctcaggcaaagcacgaaggtgaagcgataccgttggcagagag

SEQ ID NO: 7599 - DNA, 1760 bp, Artificial sequence
  DNA replication origin
atagtgagttcttgcaagatctggttgtttaagaatgtgttgcacctcctcccaccattgctcctgctcttgccatgtgaaatacctgcttctgtttcaccttctgtcatgagtaaaagctccctgagtcctgcccagaagccaagtagatgccagtgctgagaggtgatggcgtgctggcagtcctcacagccctccctcgctctcggcgcctcctctgcctgggctcccactttggcggcacttgaagagcccttcagcccgccgctgcactgtgggagcccctttctgggctggccaaggccggagccggctccctcagcttgtagggaggtgtggaaggagaggcgcgagcgggaaccggggctgcgcggggcgcttgagggccagctggagttccgggtgggcgtgggcttggcgggccccgcactcgtagcggccggccggctctgccggccccgggcaatgaggggcttagcacccgggccagcggctgcggagggtgtactgggtcccgcagcagtgccggtccaccggcgctgcgctggatttctcactgggccttagctgccttcccgcggggcagggctcaggacttgcagcctgccatgcctgagcttcccaccccctccacgggctcctgtgtgcccgagcctccccgatgagcgccgcccactgctccacagcgcccagtcccatcgaccacccaagggctgaggagtgcgggtgcacagtgcgggactggcaggcagctccacctgcagccccggtgcgggatccactgggtgaagccagctgggctcccgagtctggtggggacttggagaacctttgtgtctagctcagggattgtaaacgcaccaatcagcgccctgtcaaaacagaccactcggctctaccaatcagcaggatgtgggtgaggccagataagagaataaaagcaggctgtcggagccagcagtggcaactcgctggggtcgccttccacgctgtggaagctttgttctttcgccctttgcaataaatcttgctactgctcactctttgggtccacactgcttttatgagctgtaacactcaccacgaaggtctgcagcttcactcctgaagccagcaagaccgcgaacccaccaggaggaaggaacaactccagacgcgccaccttaagagctataacactcaccgcgaaggtccgcggcttcattcttgaagtcagtgagaccaagaacccaccaattccggacacactgccatgtctatagcatcatgaaccagttaaacctcttttctttataagttacccactctcaggtattcccttacagcaatgcaagaacggctaatacagaaaattggtaccaggaggggagcattactataaaaaggcctgaaatagtggaagcagctttgcaactggataaccagcaaaggttggaagagtttggagggctcagaaaaagacataaaaatgagaggaagtttggcccttcttaaagaatggttaagtggttgtgaacaaaacgctgatagtagtagataaagtgaagtccaccctgatgaaatctcagagggaaatgagaaagttattgagaactagagcagaagtcacccatgttatgctttaaaaaagagcttccgtgcattgtgttcatgtcctggagatctgagaaagtttaaacttaaaagtgatgacctagagtatatggcagaaaagttttctaagcatcagagcattcaagatgtggcctggctgcttctta

SEQ ID NO: 7600 - DNA, 1318 bp, Artificial sequence
  DNA replication origin
acccttaatccatttaaccctgagtggacacagcacaagtttcagagagcagggggttgggggtaaggttatagattaacagcatcccaaggcagaatttttcttagtacagaacaaaatggagtctcctatgtctacttctttctacacagacacagtaacaatctgatttctctttcttttccccacatttcccccttttctattcgacaaaaccgccatcatcatcatggcccgttctcaatgagctgttgggtatacctcctagacgggttggcggccgggcagaggggctcctcacttcccagacggggcggctgggcagaggcgccccccccctacctaccagatggggtggcggccgggcgggggctgccccccacctccctcccggatggggcggctggctggcgggggctgccctgcacctctcggacggggtggctggccgggcggaggctgccccccacctcctggacggggtggctgccgggcgaagacgctcctcacttcccagatggggcagctgccaggcggaggggctcctcactacccagacagggtggctgccaggcggaggggctcctcccttctcagatggggcggctgggcagagacgctcctcacctcccagacggggtggcagtcgggcagagacactcctcagttcccagacggggtcgcggccgggcagaggcgctcctcacatcccagatggggcagcggggcagaggcgctccccacatctcagtcgatgggcggtcgggcagagatgctcctcacttcccagacgggatggcggccgggaagaggtgctcctcacctcccagactgggcagctgggcagaggggctcctcacatcacagacaatgggcggccaggcagagacgctcctcacttcccagacggggtggcggccaggcagaggctgcaatcttggcactttgggaggccaaggcaggcggctgggaggtggaggttgtagcgagcagagattacaccacagcactccagcgtgggcaacattgagcactgagtgagcgaaactccgtctgcaatcccggcacctcaggaggccgaggcgggcagatcactagcggtcaggagctggagaccagcccggccaacatggccaaaccccgtctccaccaaaaaatacaaaaaccagtcaggcgtggcggcgcacgcctgcaatcccaggcactcggcaggctgaggcaggagaatcaggcagggaggttgcagtgagccgagatggcggcagtacagtccagccttggcttggcatcagagggagaccgtggagagagagggaga

SEQ ID NO: 7601 - DNA, 939 bp, Artificial sequence
  DNA replication origin
gactgagatgtggggagcgcctctgccccgctgccccatctgggatgtgaggagcgcctctgcccggccgcgaccccgtctgggaactgaggagtgtctctgcccgactgccaccccgtctgggaggtgaggagcgtctctgcccagccgccccatctgagaagggaggagcccctccgcctggcagccaccctgtctgggtagtgaggagcccctccgcctggcagctgccccatctgggaagtgaggagcgtcttcgcccggcagccaccccgtccaggaggtggggggcagcctccgcccggccagccaccccgtccgagaggtgcagggcagcccccgccagccagccgccccatccgggagggaggtggggggcagcccccgcccggccgccaccccatctggtaggtagggggggggcgcctctgcccagccgccccgtctgggaagtgaggagcccctctgcccggccgccaacccgtctaggaggtatacccaacagctcattgagaacgggccatgatgatgatggcggttttgtcgaatagaaaagggggaaatgtggggaaaagaaagagaaatcagattgttactgtgtctgtgtagaaagaagtagacataggagactccattttgttctgtactaagaaaaattctgccttgggatgctgttaatctataaccttacccccaaccccctgctctctgaaacttgtgctgtgtccactcagggttaaatggattaagggtggtgcaagatgtgctttgttaaacagatgcttaaaggcagcatgctcgttgagagtcatcaccactccctaatctcaagtacccagggacacaaaaactgtggaaagctgcagggtcctctgcctaggaaaaccggagacccttgttcacatgtttatttgctgaccttccctccactattgtcct

SEQ ID NO: 7602 - DNA, 1287 bp, Artificial sequence
  DNA replication origin
agttctggaggaacacctggccactgcggtttaggcgtttggaagttcttgtgtgctggagatgtggctggggtttgtctcacagtggaggcaaggaattgcaactcagaaatatgttgctacttggctgcctctactctgttattgtacaccttgaaggcaaggttaattaagtcctgttgtggggtttgagggctggaatttaatttttggagttttatttaatgtcgggagcagattgggtaataagatgtatattgagaataagacggccttttgaccttttagggtctagggctgtaaagcgtctcagggttgctgccaaacgagccatgaactgggctggatttttatatttgatgaaaaacagcctaaacgctatctgatttgggataaagaaaaaggagtattaaccttgactatgcctttagctccagccacctttttaagagtaaattgctgggcaggtgggggagggctagtcagggaacgagactgtaagccagacggggtgtgaggaggggaggtgataaaaggattatagggtgaaggagtggaggctgaggaagaattaggacctagctcagcctggtgaggaggggagaggtcagatgggtctatagaaaaggaagattagaaagactcagcgacacttggcgttgggacagaggggacaggtgggaggggaagaaggaagatttggggtgagttgcattgggaacagagactagagagggactgatgtgtaaaagaatgcctggacatcagccacctcagaccatttgcctattttatgacaaggattatttagatcttgtaggatggaaaaattgaaagtgccattttctggctatttggaactactgtcgagtttgtattggggtcaagcggcattgcagaagaaaataagatgcttagattttaggtcaggtgagagttgaagaggtattaagttcttaagaacacaggctaagggagaagaaggaggaatggaaggtggaagcttgtccatagtgaaggaggcaagcccagagaaaagagagtagagacacagagaagggatggggggttattgccctccagaaaagaagagaaggggttggggcatggaaataaggggttggggtgcagagataagaggttgggacacagaaataagggattaggttgcagagataagaggttggggcacagaaataagggatcggggcacagagataagaggttggggttcctgcctctcccccagaaaagcggtacttgccgctaagggtgaaggagaagggg

SEQ ID NO: 7603 - DNA, 988 bp, Artificial sequence
  DNA replication origin
cgggactacgagtccccataagcctctgcacgactccggctgggcaggattccggacaacgcctggttcctcttgggtccttccggcgtcgccggagtgaattgatccgggagttgaagagggctgcaaggtgggaagtgaagtcagtgcctcagttgctggtaaggtgtagctgttctgtcccagtccccgtagctctgcaccgagcagaagaggtctagggtcacgcaggggccatggctgaggcacttgggcttggttctggcaggcggagcggacggggctgagagcggggccctacgggcgtaagcgaggttaccctacgcgagtggcgtaaagcgggtttgtaaatgccgcctgccggcttgggcccgaacgcctccaggaagtctcctctaggtgggggcgggaggggaagggcgaggttggcccctggtgccccgggagaggggacagggcggatgtgcctggggtggggtcctttgaaggtgtggcttcggaccgagaggtgaggctgctgttttccccctgctttgtaagtaagagaaaagggaggaggaaggaaagggtgcttgggagtcggctcttgggggtgactcgggttatgccctttgagggaagaggagcactggaagaaggaagagacaaatgttggggtctacggattcagttccagtttaatgatgtggccctctaaggagataattttgccttaaacagaaagacttgaccctcttaggtgtcatacctaaggtatgtttttactcctttactgctttcagagcgctttcattttgggatgctgatgaggaaaccgagggattatatgacgtgcccaaggtcacacacgtagggacagactttctgaatctagttcggttcgagtccagctttagagtagggacgttggttgtgctttttgaaaagggtggaggaagttacaaagtaaatgtattttatatagtatatctaagaagccattgtgaga

SEQ ID NO: 7604 - DNA, 1227 bp, Artificial sequence
  DNA replication origin
gccatggcccctgcgtgaccctagacctcttctgctcggtgcagagctacggggactgggacagaacagctacaccttaccagcaactgaggcactgacttcacttcccaccttgcagccctcttcaactcccggatcaattcactccggcgacgccggaaggacccaagaggaaccaggcgttgtccggaatcctgcccagccggagtcgtgcagaggcttatggggactcgtagtcccgctcgccggcgttgtccgcaattcctgcaatcggaagactacacttcccggcaggccatgcgggggatcctgaggcgatgggtggtgacacttctagccaatagtaggagaattccctgcctttgcgggaggaggtgagatgaagagagatggtgcacggaaaggagaggaagggcggggcaagccctcacctgcgccaatcagggtgcggagtaggccccgcaggcgcctcacccattgagggggcgggctgacagagcagaggaaggaagggggtgaggggcctgtggtggggatcctggggctgtcgggctgagtatgccgtgtgggtggagaggaagcctcggggaaatcgcccaggtgaagggagggcttggtgtggggacttgcactgggcagaggggcagcttccctgagagcagctaagccccaggcacaccgggcatccggacacacaggtcggggaaggataggctgagccggggctcccagcagagacgcctgggtggggcaggaggccgctccaggtgtgagccacagaggaggggagagggacccccacgggagtggaagtggcagagcagctgcagaagtgcagggagcggaaaggtaccagggcagctgctttccgctgcctccggtccgggcagctgcagaaacagcagggggaggagcaacagctgccaaattcgccaactagaggagggagaggcggagcttgggtccctgtagaagccagaggcgcagtctggactgtagtttcccgggagagacgaaagcaggaacgagagcggagcggagcacagtccgccgagcacaagctccagcatcccgtcaggggttgcaggtgtgtgggaggtaagcgtgggtccttcttcggggcgtctgcactgccctggagaaaacgtcttccaataggaattacatcaagacacagctaaaagagtccgcgttgggttaggaaaccggtgcaaaacctctcgggtg

SEQ ID NO: 7605 - DNA, 849 bp, Artificial sequence
  DNA replication origin
cacgactttgttgccacctaagggagggggtgcgcgcccaacaaagggaccaggactccgggccgcgcccccgtgcggcctgcccaatgggtggaagggtgggggccagctgtctcggctggttttggggacggcacagcggtgtcactgacgggtcggctggtgcctctgccgccccgccacctcctgcccaacttacgtgtcacccacggcccggctattctggccaacgggattccgggaggaagtcccactcggcctccttgctcattgggcccgtccgagcagacgctccctcccttcggggaggcagtgccgggctcgattggatgccggctttgtccgtccgaccccagggccgcaccttccctcccagtgccggggccggctaggggctctgtgggcagcgcggccgcctggcgccggggtgcgcccacgtggagtcggagagggtgggaagaggcaggcggaagggcgaagggcggggagctttgggtgggcgggggacttgtccgggcctgagtctgggtgaggttcggtgaacacgtgtgtgtgtgtgtgtgtgtgtgtgtgtgtgttccagttctcgttcggaacgcacgtggagagcggagtaaaatgtgtgtatgaacgaaagaatggatggcagtaactgtgtgcactctgctgagtacactttctttccctgtccaataaactgatgcggcagacacatgggatagctacatagcacaatcccggtagtcaaaccagagatgccatgtcgactgccttaccccatccagtgtactagcctagatgtgtgtgtgcccacagatggcccggcaggagtcgggagactggaagcac

SEQ ID NO: 7606 - DNA, 1350 bp, Artificial sequence
  DNA replication origin
gcggctgcggtagtgggcgctgtgcgctcggccatgctctccggcgcggcgctgcgcggcgggaggactgcggcggggagtaggggacaccaaggtgggggctgtgatcgcggggtgggggcgggggcacgggcagagcagagctaccggctccgcacagccacgcgcaggtggggaggaaagaggcccagcgagcgctcggacgtggggagagaagaggcccagcgagcgctcggagagccgggagtggagggcacacagccagcggcggcagcctaggagcaggaggcagagagggcgcgctgcgacccgcgcacctcgggcttgctgggcgccgagcaaaccccagggggcgggctgccagagcgttgggccgcggagagggcgcagcgcagcctccggcgcttcgtctgggtgcagcctgggtccagggtcaataaccctccccggcgccccctgcctgcccggcgcggagcggccttggtctggcgggatgtgggctaaggggtttggggagggggcggtgggagtcccatcccccactcttacagcaaaagtgttggatgactcgcctggctttgccggcggggcccacactttcccacacggtgtgatgctccgccaggactgtagacgacaggactgcgtttgtccaaatgcttctacttcgagttgaaggggactcagggacactgagccccggagcggctgggagcgctcttccttgaggtgtcaataggcggggctggagctgcctcgggagtggacaggccgcggttctctctcccacactcgcactcgccgaaaacaaaactctctaattgtgttgtttacggaacgcagaaatgagagatcggagatgggtgggatgcttctccccagtgaaatcccagtctccccccgcgcgaccctcgcacattagaaccaaatacggtaggtatcgtatccacgcctccttgctcactgcgtccctgcagcagcccgggaagtcggcggcacctcagcaggctcggcttcgcgggcattggagtcggcggtgtagccccgcgagatgctgtcatcccaggcgcctttccagtgctttgtgcagtcctcacccaagcactcgtacactccccgatacatttcctttcccctgggtctgagaaatcaacctaaatatagggctctttgggtcatcagtccatctgtttctcttttgggtgttgttctttacactcgctgctacagtgtcaaagggcgccggtggaactgttttccctgtttgcttttaaatgaggccgatgtctttattttcatctgaagggaaataaatgtacatatacttgaggtttgcgggcttcgatttgg

SEQ ID NO: 7607 - DNA, 1419 bp, Artificial sequence
  DNA replication origin
aactcatggtcccttttgtcacttgggttattctcttcaattgacatttaaactatactataatgtggacatttcccaattttttaaaagtcacaaggttccaaaggacagagaaaatggaaagcaacaaaaatcgcagaggtaggccgggcgcggtggctcacgcctgtaatcctagcactttgggaggccgagcagggcggatcacgaggtcaggagttcgagaccatcgtggctaacacggtgaaaccccgtctctactaaaaatacaaaaaaattagccgggcgtggtggcgcgcgcctgtagtcccagctactcaggagactgaggcaggagaatggcgtgaacccgggaggcggagcttgcagtgagctgagatcgcgccactgcactccagcctgggtgacagagcgagactctgtctccaaaaaaaaaaaaaaaaattgcagaggtaagtagctgtgctatttttggctgacacttacctgctgtgagaggctgtggcagttattgcccataaagggatattggtaataaacgcggggaattaactgagggtcgaagacaatagaaactagaaaaataaaaagctgtcattgatcttattgctttccttacagttacccagtggagcgtggtctcattacttcatgggaggacatggagatcatgtggaagcatatctatgactataacctaaagctgaagccgtgtgatggcccagtcttgattactgagccagcgctgaacccactggccaaccggcaacagatcacggaaatgttttttgagcatctgggtgttcctgccttctatatgtccatccaggctgtgctggctctctttgctgctggcttcactactggccttgtgctgaattcaggtgctggggttacccagagtgtgcccatctttgagggttactgtctgcctcatggtgtgcagcaactggatctggcaggccttgacctcaccaactacctcatggtgctaatgaagaaccatggtatcatgttgctcagtgcttcagacagaaagattgttgaagacatcaaggagagcttttgttatgtggcaatgaactacgaagaggaaatggccaagaaacccgattgtctagagaaagtttaccaactacctgatgggaaggtcatccagctccatgaccagctcttttcttgtccagaggccctcttctctccgtgtcatatgaaccttgaggcccctggcattgataagatatgcttcagcagcataatgaaatgtgatacaggcctgaggaattccttcttttccaatattatccttgccgggggatcaacctctttccctggtttagacaagcggttagttaaggatatagcaaaggtggctcctgccaacaccgctgtgcaagttatagctcctccagaaaggaa

SEQ ID NO: 7608 - DNA, 1787 bp, Artificial sequence
  DNA replication origin
cagttggctggggcacaaaaaaaccagggggtgccaagagttttcaggtacgtaagcgggaaaggggtgccaagtctcagctaaaaaatcccctatggcagagatccgagtacacatgcagcagtttccaccggtggggccccgaggaaggggaggatgatgggagaagacaagcaactacaagcccccgcacgcagtgcgcagctggcttcaggagagaggcccgcggtgctgtgctgccgggcctcggcgcagagccccggcagagcgccagacgctgactgccggcaccagaatgctcgcgatgaggaagacaggcggagcgctgcgagctagcgagccctcagctctcgtatccatgacgcctgctgcttcgggggacccctggcatgctggggagtgggtctctgtggtacatcctgtaccgccctggccggcgccggacccccatggccccagaacctcccgcactgccacgggaagacagagccggacgtgacgccaccgtggaaggaagggaggggcggagcgtggctcggtgacgtcctcccaagatggcggagacagagtgaagaaactgtgttccccccttgggttgctatcggtgagttcctacttcacccccagcccgccatcccggtctctctagagcctgggccatcagagggcaggctccttggagttccagcacgggtcggggcgcaggtggaaggcttgggctaggcagccccggggtggcctgggccacaacctctgctgtggaaattcgcgggagtgggagctgggcagagggcagggcggcagaagccgaggagggactggctttggttgtcactctcggatgccgcctcgcgtagagagtgggaagggagaaggtgtggcctccttagcgcgagtgatagaacctttgacagcaagccatggccgggcgcattcccggctttctgggcagccacctctcgttttggagaaactgcactggggaaactaacaggttttggtgacttgagagcagtttttaaaaactcgtactgttctgcccctatctgtcccaagagatcatgtcttagtggtttaaaaaatttttttgtaacataagtatgtctactgagcttgaaaatctgagggttcaacagatgtgaaagcgtcaggttttgctgtgctttttgcaggtggtagaagtgttgccattcaccgtcacttattgatgtgtccaaaggattgtgttagttgatcaaggtaaccaaagatagaaaggcactcatcccttcattcttaaccatgtatgtttgataaggattttcaagggggctaaaattgtttaagttatgtcctctgtcccttccctcactgaacgttgatgagaacttacggttactgatttactgtttctttttgtcttttagatcaagggtaaaattccattctgatatcaaaatgcagtattcgcaccactgtgagcaccttttagagagactgaacaaacagcgggaagcaggttttctctgtgactgtaccatagtgattggggaattccagtttaaagctcataggaatgtgctggcctcctttagtgagtattttggtgcgatctacagaagcacttctgagaacaatgtctttcttgatcagagtcaggtgaaggctgatggatttcagaaactgttggagtttatatacacaggaactttaaatcttgacaggtaaagtacacattttattttcagttataaaagctagtcagtagtcttcacagcaaaagtagatttgtattttttccattcatt

SEQ ID NO: 7609 - DNA, 951 bp, Artificial sequence
  DNA replication origin
tgtagccgcctcacagctgcaggcggactgtaagtgcgcgcgcggtcgccatggcagcgcagccgccgcggccagtgggtgagaggagcatggggagctcccgggaggccgcccgtgcgccggccaggtccccggcttgggcctccactcaggccagtactccgggcgcggccctggcggtccagcgcggtaagaagtagggagcacgtctgcgcggcctggcccagacaaaacgcgcgaggggcgccggggtcgcacggcaggagtcctcccagcagcccgccagcccaaggcgtcgaggcgggaggggggcccctgggaaccccagctgtggccagaggtttggggcgcccagaaacgagggcaggagaagagtccccggtcgccctttgcgaccgggggcaggagaggagtccacggagaggagttcccgtgggtccgccctttgcgcgataggttgtgcagatggtgtctgtcgccgtgctctcagggtctccgggagggggtggcgggggggctcttctcagccccctttttgtgaaagtcccagagagcaggtcacaggggggcatgagggtcttgatactgtttctgactttgcacctctgtactatctccgttttaaatatttctgcgcccatgattagcaagttaagcacctaccctgaacggccaccccctacccgccatttccgttttatatgctggttttaaagtctgtttgtggatacggaactgtgttcggaggctggcttaataatactgcatccaggagatgggcagtgttaggctctgcctttagcatgagaggaaatttaagctggcataacaacttgttcaaatgtacacactgcggattctggatagggcacccacgttctgactcatgcttatcgcttagatttcccagtgcttggctaagtatagaaaagcatgttttggagggatcta

SEQ ID NO: 7610 - DNA, 1337 bp, Artificial sequence
  DNA replication origin
cgccttgggctggcgggctgctgggaggactcctgccgtgcgaccccggcgcccctcgcgcgttttgtctgggccaggccgcgcagacgtgctccctacttcttaccgcgctggaccgccagggccgcgcccggagtactggcctgagtggaggcccaagccggggacctggccggcgcacgggcggcctcccgggagctccccatgctcctctcacccactggccgcggcggctgcgctgccatggcgaccgcgcgcgcacttacagtccgcctgcagctgtgaggcggctacacgagcctcggcgccagcctgcttcgagtcccgctggctgtgcctgcccgggccctgaggcctcactgctaaggcagtgaccgcctactctgtggaggtcctttgtcaccctgccctggttaaaggcagcctgagggagggcgtcctggctcctttgcagggaggagttcccgaggtttgaggggctccgctgctgagctagggctggggctacaaagaagattatgacaaagcccgctcctacaaagtgtgcaccggcctgccgggccagcgaagaagcagagtagcatcagcacatgataaaggcgttgggctttgggagcataaagggttttgtgctcccaaagggcggggccaccagggagggcttcctgaaggaggtgacatctggatggtccgaaggaggctgccagaggacagaatgcttggtgcgttctgggcatgcgcaggtacttgaatgtactcagatcagtacagacagcggggaggcgggcagggccagatccacatgtgttactaaaaggccaggggttccgtctagatccagctgctcctggcacagaatgccaatcactgaaacaatgagaattgccagggaggaaggctttaatctggtgctgcagccgaggagatcagtctcaaatctgtctccccaaccaactagaatcaagggtttacatagcaagaaagaaatgtgactacttgcaggaaatcaggaattagggaggggtaaggaagaggagttggtcaacaggaatcaggtggtcgtttagggaatcatggtgggtgagggatctggtgtctcattgtccagatgtgacgatctggtaagtttcatttccttgatactgaaatggtaatagtttccttatcccccttgcagggcatgcgatggtgaggcaggaaaatagggtctggaggtagggaacataaggccgattcgcacttcggctataacaggaaatatcctctccatagggtgtacaccataaacgactttgtaaccttacttcatcctcttcatttacacagggcgtactcta

SEQ ID NO: 7611 - DNA, 857 bp, Artificial sequence
  DNA replication origin
ctcagccctctcctagccggcggggggtgacagtctctgtgatatctttccgtcccgccggcaggcggcgccctccggcccttgtttcgttgggcccggacgggacgtgcgcgctcaaaggttgcccgtctctgacgcccgcatttcctggtctggagccggctgagccacagcagggtcgccgcggggtcccggggccgtgctcccctgcccctcccgggagcgcgcggggcggggcggggcggggcgggaccaggcgggcgagctgggccctcgcccctccctcgggcggtcacctgggcacgggcgctgcaggtgtcggggcctcaaccttgcggagccgacagccatcgatcctcgggtgagtgcgggcgcaggtggagggcgcccggcgctctcgccaccggcgtcccagcctcggggcggcgaacggtccccgcgccgctcccagcctccctggccgggcgttcagcgcgcctgggaggggaaggaatttcctttgcaggaactcaggggctgggggttctctgctacttaagagatccaggagtggagcccggacgcccgagccttcctgcttcgggatggggattaccgcggagccttagcaactggggtctgtcgtgggtttgagggcagggggtctggggaatgggcgtgtcccgcacccagagactcgccaccctctctccaggggagatgctttttaaacatgacaaacccagcaaggttatagaaatgggtgtatgcaactcttcgctctttcctggcgcccagaggtgaatagtctcacacacacgcgcgcgcgcgcgcgtgcgtgcattcattggggccgactttgcctcccctcccctggc

SEQ ID NO: 7612 - DNA, 1163 bp, Artificial sequence
  DNA replication origin
agcgagcgaagtgggagggaccgacgcaggaggtgtcttgggcccgggcggctgtagaggcggcggcgcctacgggcagtgggaggagccgcgcggttccggctgctccggcgaggcgacccttgggtcggcgctgcgggcgaggtgggcaggtaggtgggcggacggccgcggttctccggcaagcgcaggcggcggagtcccccacggcgcccgaagcgcccccccgcacccccggcctccagcgttgaggcgggggagtgaggagatgccgacccagagggacagcagcaccatgtcccacacggtcgcaggcggcggcagcggggaccattcccaccaggtccgggtgaaagcctactaccgcgggtgagtgtcctgggacagggcggtgggcgggaggggacaggccggctccactcggcctggaggaggggagggtgaggggctggaggtgttgtgggcggattgggctgggcgggcgggcggctccggtgactcagggtgagtgacgaagtgataggggtgggggcgaagcaaggggatgcagtactgggggcgcccccaggtatggcggtgcggggagccgaggggccagagtagggtccgagaaggaagctagggttagagtaggtgcacctggtgtggacgagagactcgcctcctgagagctttgtaggggccttgcatccttaagtctgggtgtatttggggttgcgagttgaggattccaagtgatgccttagttaactcagtttgctgtggggatagaaaacgggacttcttcagttagctgtccgttttgattaccagcaggcctaacgcctctggttctctgagatatacctccatccccgttgtgttcacgtagtgtatctgcactgccagtatattagacataggggttgtatttaagaatcaagtcgatgcgttttcagggacgtgcagtgggtacttacgtgtcgtcaagattaagttgcatgtgtgtaaatcaaaattttgtgagcctttctttctcagtgttgtttcaacgactacccgatagggtgagatactgcaaggtgaggagactagcctagttacagttttaaattctctgatcttcactcccttactatggttacaagaaaaaacccagttctaagttcattgtgttaaatcat

SEQ ID NO: 7613 - DNA, 1058 bp, Artificial sequence
  DNA replication origin
tactgtccaatttatcttcgtccttggacatgctagcaagtaattattcttatggctggtaaaatgactgctaaacatttattaataattgcagttttggaattacttttttattaaccagtcatgttggtttctaaaaattgttacttctggctagacacaggagccaggtgctgagagttgacctggtgccaagtttcaggactgtccagtcttcacatcagatcttcagctaggccttctgaatattctcacagttagaaaatctatccccctagactcgcagatgctgtttttcccccactggctctgcacagaacatcattatctttgccacgcttctgtctctatggcaataacagatggaaagtgctgtggaattattcatgttcaggaaaggaggcagtcaagaaggaagaaaaggtgggggggcggggtggagagggggcacgacctgggagctcggcggtggaggcctaaggaagggaacttgggtgggggtgcggggagtggtggggattgagaggcttgtgagcctttcggaggcctgttgtgaggaaaaaaaaaataaaaagtacgagcacaagagtatttccagccggccgactgcaaatgtgggcccccacaggaacaacccgaagcagtaaaactagaagaaattggacgaaaatgggggggaaaaaagggacaaagctcgagtctcctgaattttgtgcactgctactcggtggactatttcagttcctgatcttgtggtggggtggagaaaaggggatttcttggtgtttcgaaatgtgacggagcagctctgcagagttcaatatgctaatcggctaccctgggaaccaggaagaccaccctacacgcctcagagggtcacagccggaaagctcttgagtcctatcttccctacctcgtctcgtccctctccaaaaaaacacacacacaaaaaaacaccctcagtaaacactgtaaaaacctttaatttatagctcccttctggaaccgagagagcagcctggtggggtggaggcaggaggctggggagtagggacaga

SEQ ID NO: 7614 - DNA, 1122 bp, Artificial sequence
  DNA replication origin
ctcctaggagcccgacggcggcgacaggggcggtggggaattcacaaagctcgtcgagcttacccgggcaccgaggcccgagtagggggtttggatgcgcgggtcccgggtggggtcggggccagagggggtcgctaggcgggtgttccacggctgatcacgcttcgttggccccaggcggtgggcgccggcagggcagggcgctgtagttgacgggagccgcggggaccccggagacccggacgcccgtcaccgcccccctcccccagtccagcagcgctccgcggggatgccctggtctcgacccggtccgtcagcccccggcggcgcagggatccgcgcccggcgcctaaactgccctggtgtcctcttcgttctggcccggggctggcgcggggaggtgcagcattaggggcgctgaggtgacacccgagaacttcccagggagagggtgcgcgggggggtggatttccacagtccttcccgcggcccccgcgggggggcggtgttgggagggcacttggggttatcccaggctcgccggtgggggtggggggactcctccctttacttccctccacccccttgcacacccacccccaggcttcccgtgtcccttgttctccctctctccgggttagagataggtgggtggctttgagtgggcggaggacttcagggttttaggggctcccccattctaggtcatgcctcttgctctcttccttggcctgtgttgagtaaggtgtgttcctgtggtggacgaaagtctgtacgatggttggtggcattggtccttaatcctttgggtctgttttaaggtaaagtgctgagagtttgggaagcaaaaatttctatttattggatttcttttggcttttctctcaagaaggaagtggaaaaagagtcttttctttttccctcttcctccatttgcattctttgtgaggtttgtctgccttgtgctttttgtcccggattagtcttgttgaaggatggagattcccaggcgtggagtctatagcttttggcttccattaagtaaaatcgctaacctttttttaagagaaagttaatttttgcctgcagtcattccagaaaaatagtgtacacggactagct

SEQ ID NO: 7615 - DNA, 1054 bp, Artificial sequence
  DNA replication origin
tacagccccgtggccatgacgcagtcggcccacagccccttggagcccagctcatccagcttgcggcaggtggggatggtgtagccgcaggtcaccacccagtcattggtggaggtggtcacgatgaccccgatccagcccacgaagctcgtgacgaagcccaccacctgcaggcacgtggccaccatggtggccgccaggatgtccccgtgcctcgcccctcacggctgtgcctgggcctgggctggacagtgcctgcccaggtacgtctcccacgctcgcgagccgctggagggcgacggcccgaggcgggacactggaggtggaggtgggcgccggaggctgcgagctcagcggcgaagggcgcacggcggggacagcagcgctgctgggcagcgcgcccccgccccctctttaagccccgcggctccggccggcgagcaccaatcggcggcagccccggggcgcgccggccaatcgcggggcggggccgggagggaagcgtgaaggggagcagagtaaccccaggggggccattgggccgccccaccccgtccgcagcgcagtccggcgatgcaaagtaaaacaattccatccaggtccagagaaacggagagcgcaaagagggcgtgcgtttgtcgagagttctgttttcctgcgactggtttctcttcttatagcccctctctcatctcagtctctgggtgtccattccgctccgaccctcctcagctcctccctgctcgctccttcttccctgctgcgagcactccaagggcgctcggtacagtcccccgacgacccaggattgtgacagactgaaaagtgcagtagggacaaacgcgaggcattcagtacacacagttactagaagaaagaaaacgatgcttttcagtggttgaacatcatcagcggcaaacgtggccataataatcaacaatagcaactcacatttatcgagctgtgttatatattatgcagatgcattttacatgcattagctcatttaatcctcataacagcctttgaggtaggaacaattgtcaatgacaca

SEQ ID NO: 7616 - DNA, 1319 bp, Artificial sequence
  DNA replication origin
gaactctcgacaaacgcacgccctctttgcgctctccgtttctctggacctggatggaattgttttactttgcatcgccggactgcgctgcggacggggtggggcggcccaatggcccccctggggttactctgctccccttcacgcttccctcccggccccgccccgcgattggccggcgcgccccggggctgccgccgattggtgctcgccggccggagccgcggggcttaaagagggggcgggggcgcgctgcccagcagcgctgctgtccccgccgtgcgcccttcgccgctgagctcgcagcctccggcgcccacctccacctccagtgtcccgcctcgggccgtcgccctccagcggctcgcgagcgtgggagacgtacctgggcaggcactgtccagcccaggcccaggcacagccgtgaggggcgaggcacggggacatcctggcggccaccatggtggccacgtgcctgcaggtggtgggcttcgtcacgagcttcgtgggctggatcggggtcatcgtgaccacctccaccaatgactgggtggtgacctgcggctacaccatccccacctgccgcaagctggatgagctgggctccaaggggctgtgggccgactgcgtcatggccacggggctgtaccactgcaagcccctggtggacatcctcatcctgccgggtaaggacccgagcttggcggcggctcccaaatccttatcctctgggtagagagcgggatattagacggcgtcacagagacattttgggggcttgaagacctttgggtacgtttttgacatccctagtcccaccttgttgtaaaagaattaggcagccccgaacttaacttctctaggccgcagtattcttatctggaatttgagataatagtggcaatgtggccggtggtaacactggccgggtccctttgagaatgaacaaaccggaacacctaataggaactgagtccgtgttaattactgcggtcccagcccgcatccttccaccgtccgcttcccgaagtgcttcccgctcccgcccggcctcccccggggcgccgagccttcgcgttaggttccgcccgcagaggtgagaaggagcgtgtaacacaagctgacaggagaatcgaaccggctcaggctgagtttctcggtcctcatgggatgggcgaagcgcccccggccaggttagagccctcctagctccgtccgcgcagccgctgagcaattcacgtccagggctctctgggctgcctggtttgggaaatgtcacgttgattcccgcacgtgcccagggccatctccgctgcccc

SEQ ID NO: 7617 - DNA, 976 bp, Artificial sequence
  DNA replication origin
gcgccgagccttcgcgttaggttccgcccgcagaggtgagaaggagcgtgtaacacaagctgacaggagaatcgaaccggctcaggctgagtttctcggtcctcatgggatgggcgaagcgcccccggccaggttagagccctcctagctccgtccgcgcagccgctgagcaattcacgtccagggctctctgggctgcctggtttgggaaatgtcacgttgattcccgcacgtgcccagggccatctccgctgcccccgctacccccgcccctgctgtgggcgcgtcagactgcggggctgcggtgacgccggctcccgctccgcgccgctgggttggatagggacgagcgggcgctcctcggagggcggactccactggggagatacggagcgcgccgccgagggtcgctcgccgccacccctccagcgtgtctcagattgggaaggggaggtaaaaattgacagcctagcgccggccaggggccacattttcacatgtgtcctgtggaaacattttgggcgacagcctcaattcagatttaaaccaatgggttgggcaatggcgaggtcgcgggcacccccttggttttctgctggaatctctgctctacccccaaggcatgtccctacaaggtgggcttctgtcccccagccttcgtggattgtgctcacttaaaggattttcccggtttcctcaagatggggagaaacctgtccctgaagccgccagtcagataagactgtgctcgccccttaagcctcctccaagcacgccctatttccggtcctcgcagtcggaatctgaatccctcctttctccttgctgcctagtacttggctcttatcctcacaaaggcacattttatcttgttttttgttgattgttcgtgagtgaagttctcccactacgttttaaattccttgaagatagagatggcgtcctgttattctctttgcttcctcttctggacctg

SEQ ID NO: 7618 - DNA, 2241 bp, Artificial sequence
  DNA replication origin
accattcccatttgtgaattgctgcttcagagaaaactgttactgaggaaggtgggtcatatctcccaggtatgttgggttagacaacactggaatagtaggaccagaggggaaagagctggaagacaaaggagttggaagaaaggtaagaggaatgcttgtatgttaagtgtttgtatttttggcatgttgtttaatttagttcactgatgctgacgtttagtcaaagataatcaaagaaagcagtatggaagagtatttcagacaccatgaaatagtgggaaaggccctgggcctggaatcaagttaactgggttctaatttttcaatcatgtgacttagactaatgaccatcttttggtttccaagttttctttcttgtaaaacgatggtgctaaatgatattcaaagctattctagttctaaaattcaacagtataattctaaatatgaaagtacatgtggactctagttctccagacttcctgaagccctgctactcttttagaaaaggctgctggtttagttctctaacttgtttccataatattggagctgaagttgtgtgaacagtggtatctcaagcagcatgcaaaagcagttgggagggtgggagtgcatgacagtgagtgggtgaacggattaaagagaaaagggttggaagagaggagagtgtgtgaaagagaagagcaggcctccctcctttgtcattctcctgctataatctccaataacagctattcagagccaaataccaaaatgaaggcatgaaaatggcttggactttgagttaaatagatctgattttgaatccaatctctggaatcaagtttctgtttccttctctgtgtgatacttttggttggcagctattgtgaagtttaaatgaaatattattacccagcagatagaggtgttcagtacaaataggcctccccaaattggctcaatcctttccccatcttgcccataatataaaagactagctaaagaaacaaacatacagggctgcttagcgatctttatctagagcatgtaaataacatgcagtggggaaagaagggttctaagaagaggaaaaagctacaaccatgaagcccctcctttgtgtagcctaacaattctctgattcctgaaagccacagaaatgtttattatcaaaacagcatccctaactgcctttcaacactttaccgacaggaagtctcactgctcaggtataggaagtagaacgaggaagctcccgaagttagcaaaactggatcctgaagtgacacccgcttcctgctcttccactcaggaaagccgggaaccttttcccaagcggagtcctggggaagcagaaaaccgggaaaggcaaagccccttcttctcctgtttctctaggtcgcttgcttagaaccctttagggttctaacgcagtttctgctcgcagggaatgtgggccctggcggtattagcacccagcctctgagaactttcagcaccgcggacagcgccattccctgcactcagtcggaggaggagagctaccttgcccccagcgctctcctagaccctatacctagggggaggcagggtgacatcctgcggcccttgggcaattcgggccagtgacgttcaccgacactcaggcggggatcccttcgccagagccagttcctttgagtgtctccgctcaaaatctcaaggaaacgagcttcacacaggtggggggatgaggagtgccagaacaggagcgagccccgctgctctagccttcctgcatctcttctcgcctttgctttgctcactcttcaatcgcaatataaaatactcatttggggagggggcagggtgacacaggagagagaaggagggtgggggctgcatcccgcgtggccacgcagccctaacctggccctcttggattagaggggagctgatgtgctttggaatgggagaagagaggagactgagggttgaagcagtgcaggagagctccccttgctggggctgccggctctgggcagggagcttccctggacaccgctcccgtcacgtcctcttcgccgctcccgggagagtcaccactctccggggacagacgcccctcggggcgccaccatcctggtcggggtgctgggctcggcgggagtccctttgaggagtttgctcccaggtaaaagggcagacgttgctcccgacctccccggagtctgcggccggaaaagcgtctccgtttcatggtctcggtccgag

SEQ ID NO: 7619 - DNA, 1672 bp, Artificial sequence
  DNA replication origin
taaaagggcagacgttgctcccgacctccccggagtctgcggccggaaaagcgtctccgtttcatggtctcggtccgaggcggagaacggagctgcccgtgcggggtgcgcgccaaggcgggggacaggacgggcccggcgtctgccgagacctaggctgcccgcattccgctcgcggctccccttctgcctcccgctctagcggcgccggagccgcgctggcccccgccccgcccggcagctcccgcgagtcagagcccggtgcccccagaccgcgggcagtcggggcctcattccgggccagagcaggaaagagcccgacccacctcctcggttcttccagggaaccccttctcggagggcgccctgggcctccgcgccatattcctggtcccccgctcccggtgactccggctccctgggtcattccgggagaggcggccatcccagttgcaggggtcccgctggggcgcggggggcgcggagggggacaaacggcagcgaagggggccgttcacttaccggggtcggggctggaggcgacgagctggctgccaaggctggtggctggcagtccgcacttactgcgcggagctgtctctctagctgggatgggaagtggtggtggcggcaaaggaaggcaggaggcagccgctgctgctgaacagctcctcaattattcagattgggcccccaccccccgaacccctccccgtgcctgctcgtcctccctccagctcgcctgtctccgcctccttggagtcacatggcctgcccaaccccttacatactgggcccaagcctggcaccagaccacctcccacctggcccccctgccttcccctctgtctgccgctcacaactcctcgctggccttctgagcctccagttgtgacctccagtgtcttatgtcaggctgcagggaggttgagggggccgtggatgggggcagttctttgccctgggaaagcagggaccagcaggactctgcaatgtctgtgcgttgggaaggcatctgccgcagctctgcccctgctagactgggctgtccagacctccttcctgccctctggaagcttccctcatcctctgcggagccttcgttgctcttaaacttccacatccctgagccctacaggaaagaaaaaatgagagaggttgatttctcctctcctcctaaagaagacaagacccacctctgtcttcaaagcttaagtttatcgttgggttcacaacatcttatgggtgcaaagatcatggacttgagatttgaagagccattaggattccaatctgtatgaccttggagcatttaactttctagcttttcttctctcgtctgtgaaataaccaccttgcagtattgtcatgagattgagaaatcatcatgttcttagaattgcctagcctagagttggacaggtatttggagctcaataaaggagagttctttttcccccacctttgttaaaataaatttcacaaggcaagaaggatgtgatgtgtgctaatacagtgaaagcatcttttaaacatggaaggaggcatctgtgaggtcaggctagacaagtaccagtctaaacggagacaagagtgagataaggtttctgttttgtattagctcctttaagatgagtgtcctagagccaggttatgtcccaaaaggattggg

SEQ ID NO: 7620 - DNA, 1279 bp, Artificial sequence
  DNA replication origin
agtcgtgttgtggggtttcagggctggaatttaatttttcgagttttatttaatgttaggagcagattgggtaataaaatgtatattgagaataagacggccttttgacattttagggtttagggctgtaaagcgtctcagggatgctgccgaatgagccatgaactgggctgggtttttcatatttgatgaaagagcctaaatgctcacgatttgggagaggtctgataaggaaaaaggagcattaaccttgactatgcctttagcttcagccacctttttaagaggaaattgctgggcaggtgggggagggctactcacggaatgaaactgtaaaccggaccaggtgtgaggaggggaggtgataaaaagattatagggtggaggagcggaggttgaggaagaattgggacctagctcggcctggcgaggagcagcctggggaggaggggaaaggtcagatgggtctgtagaaaaggaagattagaaagactcagtgaagcttggggttgggattgaggggacaggcgggagggaaaaaaggaagatttgggacgagttgcacgggcacagagactaggaagggaccaatgtgtaaaagaatgtctggtcgtcaggcacctcagaccgtttgcctattttatgacaagaattatttagatcttgcaggatggaaaaattgaaagtgccgttttctggctatttggaactactgtcgagtttgtattggggtcaagtggcattgcagaagaaaataaggcatttaggttttaggtcaggtgtgagttgaagagcttttaagtttttgagaacacaggctaagggagaagaaggaggaatggaaggtggaaggttgcccatagtgaaggaagcaagtccagagagaagggagagtagagacatggagggaagggattcgggggttcttaccctccagaaaagcaggaaaggggtcagggcacagagatacgaggtcagggcatggaaataaaggataggggtgcagagatataagaggttggggcatggaaataagggatcagggtgcagagatataagtagtcggggcatggaaataagggattggggtgcagagatatgaggttggggtacttgccactctcccagaaaagcagaacttgccactaagggtgaaggagaaggggttgggggtttcttgccccccagaaaggaggagaaggggtagagacacagagaaggggttggggtacttccccctcccctagaaaagcaggacttgccactaagagtgaaggag

SEQ ID NO: 7621 - DNA, 1226 bp, Artificial sequence
  DNA replication origin
cggaatttaatttttggagttttatttaatgtcaggagcagattgggtaataaaatgtatattgagaataagacggccttttgacctttcagggtctagggctgtaaagcgtctcagggttgctgctgaacaagccatgaactgggctgggtttttcatatttgatgaaagagcctaaatgctcaggatttgggagaggtctgatgaagaaaaaggagcattaaccttgactatgcctttagcttcagccacctttttaagaggaaattgctgggcaggtgggggagggctactcacggaatgaaactgtaaaccggaccgggtatgaggaggggaggtgataaaaagattatagggtggaggagcggaggctgaggaagaattgggacctagctcggcctggcgaggagcagcctggggaggaggggagaggtcagatgggtctgtagaaaaggaagattagaaagactcagcgacgcttggggttgggactgaggggacaggcgagagggaaagaaggaagatttgggatgagtttcactgggcacagagactaggaagggaccgatgtgtaaaagaatgcctggacatcaggcacctcagaccgtttgcccattttaggacaagaattatttagatcttgcaggatggaaaaattgaaagtgctgttttctggctatttggaactactgtcgagtttgtattggggtcaagtggcattgcagaagaaaataaggcatttaggttttaggtcaggtgtgagttgaagaggttttaagtttttgagaacacaggctaagggagaagaaggaggaatggaaggtggaaggttgcccatagtgaaggaagcaagcccagagaaaagagagagtggagacatggagggaaggggttcgggggttcttaccctccagaaaagcaggaaaggggtcagggcgcagagatatgaggtcggagcatggaaataagggatcaggagacagagatataagagggtggggagcggaaataagggatcagggcacagagatataagaggtcgggccgcagaaataagggatcagggcgcagagatataagaggtcggggcacagaaataagggatcggggcacagagatatgaggttggggtacttgcctctccaccagaaaagcgggacttgccactaagggtgaaggagaagggattgggggtttcttgccccccagaaaggcagagaaggggt

SEQ ID NO: 7622 - DNA, 906 bp, Artificial sequence
  DNA replication origin
cccgtctcttggaactgccgcggccgccaccgccgctgccggcgccgctgctgtaggggaccagcgcgggtgcgcagacgaaaggcgctctttgccagctgaaaggtgaagacctggggaaaagctggtggggaaaagctggtggggatggggccagagtgaggcagggccggggaaggcgcccagaactgagcgctgaccgagagaaagaaggagaatggatgggggaacagaggcgagcgcgggacccgccggggctcaggccctagtggggccgggccgggccgagctgagccctggatgccggcagaacagggggcgcctgtgcggccgcggcggcgacgttgaagggtggagggcggggtgcgcgccagctagcagagggccgggtgctgctggccaggttctgttaccccgcatccttcgcggggacctgcggcctgggctgggtcccccgcagtagggttcggggcggcggccgagggctgggcggcgggggaaggtcgccggcttctgcggtggggcgatgggggccgcaacctgctgtttccagcacggaggagcgcccagggcgggtgtccccaccctcagcgagctcctctgcgacttctcatcccacctccccaagcagtagctggaaaagtttgtagaggccagagttagaaagtggccactagtctagggtgggtgttccttacatgcagaaataacgggcccatgatgcttggcacataacttgtccgaaatgagacgtttccctgcctacatacccgttgttaaaaagcaaacacaaactttttgtgtagttcccacggaaaaactaccatctcccctgcccaccatggcagacgaaattgatttcactactggagatgccggggcttccagcacttaccctatgcagtg

SEQ ID NO: 7623 - DNA, 1093 bp, Artificial sequence
  DNA replication origin
gttatagattaacagcatcccaaggcagaagaatttttcttagtacagaacaaaatggagtctcctatgtctacttctttctacacagacacagcaacaatctgatttctctattttttccccacatttcccccttttctattcgacaaaactgccatcgtcatcatggcccattctcaatgagctgttgggtacacctcccagatggggtggcggccgggcagaggggctcctcacttcccagaaggggcagccgggcagaggcagcccccacctcccggacggggctgctggctgggcatgggctgccccccacctccctcccggacggggcggctggccgggcgggggctgccccccacctccctcccggatggggcggcttgtcagatggggcggctgccaggcggagatgctcctcacttccctgacggggtggctgccgggtggaggggctcctcacttctcagacggggcggctgccgggtggaggggctcctcacttctcagacggggtggccgggcagagacgctcctcacctcccagatggggtcgcagccgggcagaggtgctcctcacatcccagacggggcagcggggcagaggcgctccccacatctcagacgatgggtggctgggtagagacgctcacttcctagacgggatggcggccaggaagaggcgctcctcacttcccagactgggcagccgggcagaggggctcctcacatcccagatgatgggcagccaggcagagacgctcctcacttcccagacggggtggcagccgggctgaggctgcaatctcggcactttgggaggccaaggcaggcggctgggaggtggaggttgtagcgagctgagatcatgccactgcactccagcctgggcaacactgagcactgagtgaacgagactccatctgcaatcccggcactcaggaggccgaggctggcagatcactcgcggttaggagctggagaccagcccagccaacacagcaaaaccccgtctccaccaaaaaaatatgaaaaccagtcaggcgtggcggggcgcgcctgcaatcccaggcactcggcaggctgaggcagg

SEQ ID NO: 7624 - DNA, 899 bp, Artificial sequence
  DNA replication origin
cgtctctacccagccacccatcgtctgagatgtggggagcgcctctgccccgctgccccgtctgggatgtgaggagcacctctgcccggctgcgaccccatctgggaggtgaggagcgtctctgcccggccaccccgtctgagaagtgaggagcccctccacccggcagccgccccgtctgagaagtgaggagcccctccacccggcagccaccccgtcagggaagtgaggagcatctccgcctggcagccgccccatctgacaagccgccccatccgggagggaggtggggggcagcccccgcccggccagccgccccgtccgggagggaggtggggggcagcccatgcccagccagcagccccgtccgggaggtgggggctgcctctgcccggctgccccttctgggaagtgaggagcccctctgcccggccgccaccccatctgggaggtgtacccaacagctcattgagaatgggccatgatgacgatggcagttttgtcgaatagaaaagggggaaatgtggggaaaaaatagagaaatcagattgttgctgtgtctgtgtagaaagaagtagacataggagactccattttgttctgtactaagaaaaattcttctgccttgggatgctgttaatctataaccttacccccaaccctgtgctctctgaaacatgtgctgtgtccactcagggttaaatggattaagggtggtgcaagatgtgctttgttaaacaggtacttgaaggcagcatgctcgttaagtgtcatcaccactccctaatctcaagtacccagggacacaaacactgtggaaagcctcagggtcctctgcctaggaaaaccagagacccttgttcaattgtttatctgctgaccttccctccactattgtc

SEQ ID NO: 7625 - DNA, 937 bp, Artificial sequence
  DNA replication origin
aaagcctgggcggaaagggtgcgcgcccctcccccctccacgctggtgcagagggaccgggtcaggaagcgcggcctctccccagtccaagaccacgcctcctccgcctccccactcccccttcactcctcccaggaagcggtgatagacagttctgcgtggttctccacccccaccctccccctgctgagtggaggagttgatgtgtctcattataacagccaatgcagccgccatccacgcacaagcaaagaagcatgtcccatttaaatacacccacgcagccccagcgcccttagccgatcggggcgctcagcccacacgcaccgctgctcggggcttggagatccgcgcaggctgggctcccggacccggcggaccgacgcgcggaggatcgggatccggcgctgtggggctggggtgggcgggggaggctgggcccggggcctctggcgcgacacccgcatgaggacgcgagtgaaatagaccaaggtggaatttccaagggaaaagcttcggggtggttttggtccatttctccagcgaagaagtagacatggcgagcgactccccggctcgaagcctggatgaaatagatctctcggctctgagggtgagcaggacgttttctggtttctttccagtggtttgggttagggtgaatgggctcggtgcgtggactgggggctggggctggggcagggggacagcagcgggagaatgcgtcggggagggaacctggattcccgttttgattcggggttgctgaggtgctcctggctgagcccctacggcaggggctgtgcggtacgtgtcttcctctggccgtggcttaggctctcccgagggctcgtagagcttatgccagtttcatcttataccggtgtaagagcattaaaatgaaaggcgtgtgtgcgtgtgtgtgtgtgtgtgtgtg

SEQ ID NO: 7626 - DNA, 1094 bp, Artificial sequence
  DNA replication origin
aaacgggaatccaggttccctccccgacgcattctcccgctgctgtccccctgccccagccccagcccccagtccacgcaccgagcccattcaccctaacccaaaccactggaaagaaaccagaaaacgtcctgctcaccctcagagccgagagatctatttcatccaggcttcgagccggggagtcgctcgccatgtctacttcttcgctggagaaatggaccaaaaccaccccgaagcttttcccttggaaattccaccttggtctatttcactcgcgtcctcatgcgggtgtcgcgccagaggccccgggcccagcctcccccgcccaccccagccccacagcgccggatcccgatcctccgcgcgtcggtccgccgggtccgggagcccagcctgcgcggatctccaagccccgagcagcggtgcgtgtgggctgagcgccccgatcggctaagggcgctggggctgcgtgggtgtatttaaatgggacatgcttctttgcttgtgcgtggatggcggctgcattggctgttataatgagacacatcaactcctccactcagcagggggagggtgggggtggagaaccacgcagaactgtctatcaccgcttcctgggaggagtgaagggggagtggggaggcggaggaggcgtggtcttggactggggagaggccgcgcttcctgacccggtccctctgcaccagcgtggaggggggaggggcgcgcaccctttccgcccaggcttttgcgggctcctcgggccgaacccgaaggggctgttcctgaaccttgacttgttatcatagggacccaagctctatttttgtgtggccaattcgtgcactgcagcaaaatggcccttcagtcgcgtcttggggtttctcctcggttcaaatgctctcgcgctgagaaaaagccggaggaaaaaaaagcgacaccctccctcccccattaattatttgtggggccggagtaacgcgggctggtgcaaccggtgcatataaggacttgtgtgcaaggaaggggatccgcctccaggcgcggaaagagtagggaagaagcgcacacgcacagtgcacccagctggg

SEQ ID NO: 7627 - DNA, 948 bp, Artificial sequence
  DNA replication origin
tcttggactggggagaggccgcgcttcctgacccggtccctctgcaccagcgtggaggggggaggggcgcgcaccctttccgcccaggcttttgcgggctcctcgggccgaacccgaaggggctgttcctgaaccttgacttgttatcatagggacccaagctctatttttgtgtggccaattcgtgcactgcagcaaaatggcccttcagtcgcgtcttggggtttctcctcggttcaaatgctctcgcgctgagaaaaagccggaggaaaaaaaagcgacaccctccctcccccattaattatttgtggggccggagtaacgcgggctggtgcaaccggtgcatataaggacttgtgtgcaaggaaggggatccgcctccaggcgcggaaagagtagggaagaagcgcacacgcacagtgcacccagctgggcgcttcggcagtttgcagctgcggcggggtcgggtccacccgcggtccccggaatgccggacggctgatcccgggtgctggtcactcgccgattcggggctgggaaggtttgccagaagcgggaaagatgggagatctgagcgctctcttggcatcgccacacccaggacttgctcgtgccgcaattccccacggaaacaaccgagttgaaacgagaagcttgctctctgggtgcagtagctagaaggcttcaggtaactccaaagccaacactgggtgaggcaacacacgccgcctcaggactcagcatttctttcaggctgcgttttcgtggcagacctacccagattgatggagaaagtttggctggcggataagaagtaacgcggaagatgtgtacgtgagagcgatttcacttcactcactttctcatttaaaggttggatgttttacagtggtatacatgattctccttctgtaatcaagagtgggaagtcgcttcccccaatccccg

SEQ ID NO: 7628 - DNA, 942 bp, Artificial sequence
  DNA replication origin
gtccctcctccgcccaacctgggcagctggccgctccccgcccaacttggacgggatttcagcgagtgagtcggcggcggactccctagcgatccccaagggcctccctcgcacgccttcgggtggaattcctgcagggtgaaagctgacaactctggcacgcacttttgccgcgcgggcggctgcctggagcgcagagccgcgcaggctcaggctgaagcccaggcgtcctctgcaggatgcaccgcctcgccgccacagggcttcgggtgcagtgtgtgtggtgtccccaggtcatccgggcgcccttggttcgggtgcgcggtggcatgactgggctggtgggggcgatgggaccggcatcccgtaccaaccaggaagtgccgcgtcccaaggcttcgagcccagcccgcagagcacggtcctgggggtgtgatcacagctgctgaccgcggctcccgccgtgtgatgtgaccactcggaggtggggcgagggggccgggggccagcagcagggagtgtgtaaaaggtcttcttcctcacaatacgattgaaggtgtttgggacgtagggctcagatccaggagtgccgtcctccaagccttccataggattttgtgacgcccttgagaaccgcccttgtagactcagtcctgaactaccgccacgcctgtatttgctcctcctcatctcggattattgctttctttacttcctctgtgaagcactaaatactagtagctttttaagaacagaccacaacagtttcttcgtttgaccattactaagtctgcctccaaaatggggagttccgttaactttatcagccagccctgccaattttagttaagataagccttcgtgggcctccaaaggcctctgagagactaggtacccagagacctctgaggtatgttaaatggtttagttcgtggtggtgca

SEQ ID NO: 7629 - DNA, 1464 bp, Artificial sequence
  DNA replication origin
ccaggcagccgcccgcgcggcaaaagtgcgtgccagagttgtcagctttcaccctgcaggaattccacccgaaggcgtgcgagggaggcccttggggatcgctagggagtccgccgccgactcactcgctgaaatcccgtccaagttgggcggggagcggccagctgcccaggttgggcggaggagggacggagggcgagggcagtggaaacccggctcccacgggcgcccggtgatccgggtctcggcgcggctcctacctgcagggcgaaggggccgctagcacctgcgcgttggcggcggactctcagggctcgggtgcctctggcacagctggagctcagcgggagggagggagagagggcgggccggagggggctctgcgctgcgcggccggcaggaactctccgcccggattcgccccggattcgcaggggtggagcgaggcggtgccaggtcccggggcgtcgcggtgccggctggaggccccagcggggcaggtctcgcgactgggcctctgatcgcccgcgttccttgttctcttttcccaaagtttcataactcgaccgcatcaccctagggaatgctcgctattaggaccattatcaggtcctctcgagccgccaaggaccagccacctttcccggagctttgcctatgatatctattcttcgactactgcggatagtagccacaactggtccaacttataagtaaggaatcagcaaatcaaacggctaaataacttgcctgaggtgacataattaagagactggagctttgctggagtctttataagccttcttgcacctccttagggaagtgttatcgccaatttacaggtaaggaaatgaaggctcagaaccagcccgaggtcacacagcttagatggagggggacgggaatttgtgtcccgatgtctctaaaactggttataattcagaaatcttagcataaaataataaattgggagcaaaacagggaaaagacccattccacctatggaaccgttcaaacacggcaattttgctgttttcagtccacttagaataaagtcttaagaaaaagagaaccagttgtcatgtggcttgaatagcagccctttgggaatgtaattttgaatataggccagttccaacctcattacacgatattgcatcccgccaaagccaggggaagcaatggcctccccatgcaccaaactgctaataacgtcagccactttaaagcatttagtggatattacacaactgcgactgaccaagttacataatgtcttactgcacacatggcattgcatgaaatgaaaaatataatataccagtccaaattaggggaggggggccaaattatagtctggaactcagttttcctgtaacctacagttgctcagccctccttagaccacatttttgtctcttgagcacatcttttcctaatgatagaagagtcacacagccctca

SEQ ID NO: 7630 - DNA, 1220 bp, Artificial sequence
  DNA replication origin
caaaatctgctgggaaggctgggggtggggggaggccgcgagccactgcccaattttttttaagaggaatctacccgtttctttcactcctccaaaccctgaggcagggggcacaggcgggggaccccagcccagcaaggcgggggccgccccctcccgggtcccgtgttcccggggtgcccaggcgagcacggggcgccccagcactccggcgccaagtttttgccgggaagcccagggcgctcccgggacagggacgcactttggcggactcggcgtcaggccggggctttccagtgcaccgggacccggcgatcgcgctcggggtcccggtctcctctagtccccggctcttgcacgccttaccttccctagggctgaaacgcggggctctgggcgcgccacacaccgggtcgcccacgccttcccagccggcagcctggaggatccctgccgcccccttcgctgctcccgccgccgccgctctcctcctccagccgccgccgccgccgctcaaataactaccaggagggtttgatgggggattccgccatgtcaatgatgtcgggaccacatggggatttggggcccgcccattaccgtaaaccgccgaatataccggccgccacaatcgcagactcgcagaagctgttgtcccccggccctgcctagctaagcagaaactccttttggttcagccagactaaagaaacctgaggcttagggaactaacaactcctgaatggcgagggctgcgcgttctgcagatcgccaaagtaatataaaggcaatgtttactcagtgataattaagcctaaaactgactttttttcatttacacatatatttcgctttttgttgttgttaacccccacagcaaccttgtgagctatattactcccacatttcccacagcattttattcatacaactaacatagtatgagcaatttttattatacttaagttaaaatctctctttcctctttctttttgttttttgttttttgttgttgttgttgtttgttttggggactgcaggcacggggcaggcatgagccaccgcaccctttttttttttttttttttttccttttttggaagagagggggtctcaataggttgcccaggctggtctggaactctgtcgctcaagtgattctcccgccttggcctcccaaagtgttgagattacaggcgtgagccaactcacccagcctt

SEQ ID NO: 7631 - DNA, 1612 bp, Artificial sequence
  DNA replication origin
atgtgcattatgtttaaaataccatttcactctcttgaacctagtttgtaaatggcagcttgtttaaaggcccaaggatgaagtgggtgaatacatactgatgtctcaaatccagcgaagcagaaaaaggtgctgcttcttcaggacacttgactgctatttgtctgcaaattttcgtacggaatgggcagatgtatgatcgacaggatgtgagtgtcatcctctagaatagagcagggcataatctacacatgctggggccctgcagggattatccagggtgtgtgaaagtatagtgacgcggagggcaggggagtgaacaggtagaaatataaatttagtcaaactaaaaaaggattcttatccaggatctataatgtgatgtaacatttatataatcttcatcatattctgagtggcacgaaaatgttaaaatctaattaacctttaatgcactcatctgagattattatgtcaattttaaatggatcaaagtgaaggaaggagagcaaattcctggtccaagagtgttgagggagcggcatggctaaggtttaaatgtaattttctctagctctcggttggaagggcttgctttttcctcatctatccctggccaccaagatgagacttaagcaaagctttaagatccaagtggaaagtagcagaggctgaacatataaatggatttgaagaaggtttagataaattaatagatgacagacccatcatggtaaccaagtgacacctgaaaagcatccatgactattgtatgcagtggcagcaaacaaggatgtcttttaagggggccactggcagagttagagaactaggactcgggctggtatgtgtatgtgttgcctgtcaccctgggccaccctaaaattcctactaatgcctattaatgttctctctcccccctccctccatcacttctttcctttcatttccaattttatagtctcctgcaggcatagactattgctgcaaaagaacaaacagaactggggctttatttccaattgcctcagaaccatggaatgaatgttcagtgtgagaccttattcttgtctatttactggaacatctattatgatccttgcttttatagttgaggcctccttattgtctggaaaaaatagaaagggcaggcttactcaaatcctagtttcaatttcagcttccaaattttttcttccttcactgattgattgctttattgactgagtcattcattcaccaggagtaacgaagagctttcgtgtacaaaatatttgactggggtctctaaagatgaataaatcacagttcctggtctcaaagagttatgtattaataatgattatggtgacaactaagtaaaaatgataataacaacagctaacatatatggagagcttactgcatgttaggcactgaactaatttcattatgtacagacattaatcctactcacaatgatcccatggaatagttattatatcctttttatagacccagaaactgaagcatagcgagggtgaggggtgacagcgtgctggcagtcctcacagccctcgctagctctcggcgcctcctctgcctgggctcccactttggcggcacttgagcc

SEQ ID NO: 7632 - DNA, 1270 bp, Artificial sequence
  DNA replication origin
tcgcctccgaaaatcataggcggggaggtggctgcagatgcgtcccctgctccggtccccgccgccgccgccgccgccgccactgctacctgtagacacgcacacacacacgtacacgcgcgcacacacactgccaccttctctctctccctctcccctcactccgtggcgttgtcgggtgcaggagtctgaatcaagccagaccatcctccagacccaatcctgcccccctcagagccaggactccctccgctgcctccctctccccgcccggtttattgcacagcgtcccctcccctgcgcgcccctcccgccggtcggaggcgcgatcttggtgggggtgggcttcgggggcgcgggtccggcggtggcagacttggtgctggtgatggcccctccctttacaagttccgccctcctcccttactcctcccgcggcagccgagcgtcctccgcccgcagcttccgcagcgcccgcggcggcaggaggggtgaagggcccagggagtcacgtgtgaggttcgccaaaccactcagagcggcgtgtgagtgaacgggcacgaccgcccagacgcgaggcgtcggacgctctgagtttctgtcttctcggcgtcatcgtgctccggttccaggcgttttcgtcttggtgacggagagcgcggagttggaggcaacagccttccactgtgcctcttctttcccccgcccccctctttttggtaaatctctagccaccaaactcccctctctttcctctgcttcctctagctagaggcagagtaatctctgaattgaagcgttcgttggctgtagactgttccgtgcgagtagtgtgaacgcaacgccactgcctttggcctcttcctcctggctgtgcccacagcttctgccgctggataggtgattttaaaaaaatcacagctaatcattgttggcttttgtgacgggtgtgactcactgtagcacattgtttacacctacccgcttcccactagcctctctgtgtgaatttttaaatgtaagtaagttggaagatagggcggtgcctacagaaccactaagttaactgattgccacctgtaataatcgtaaccccaaaaggaaaacctagcagtagaaaaatcgctagaagtgacacgtgaactagagatatgttttttctcaccatttaagagcttgcttcatatttctcaatctcatgtatgctttaatctccacaattcaagtaaaagaaaggaactttaacatttacactgcaatggcccctatc

SEQ ID NO: 7633 - DNA, 928 bp, Artificial sequence
  DNA replication origin
atgattagctgtgatttttttaaaatcacctatccagcggcagaagctgtgggcacagccaggaggaagaggccaaaggcagtggcgttgcgttcacactactcgcacggaacagtctacagccaacgaacgcttcaattcagagattactctgcctctagctagaggaagcagaggaaagagaggggagtttggtggctagagatttaccaaaaagaggggggcgggggaaagaagaggcacagtggaaggctgttgcctccaactccgcgctctccgtcaccaagacgaaaacgcctggaaccggagcacgatgacgccgagaagacagaaactcagagcgtccgacgcctcgcgtctgggcggtcgtgcccgttcactcacacgccgctctgagtggtttggcgaacctcacacgtgactccctgggcccttcacccctcctgccgccgcgggcgctgcggaagctgcgggcggaggacgctcggctgccgcgggaggagtaagggaggagggcggaacttgtaaagggaggggccatcaccagcaccaagtctgccaccgccggacccgcgcccccgaagcccacccccaccaagatcgcgcctccgaccggcgggaggggcgcgcaggggaggggacgctgtgcaataaaccgggcggggagagggaggcagcggagggagtcctggctctgaggggggcaggattgggtctggaggatggtctggcttgattcagactcctgcacccgacaacgccacggagtgaggggagagggagagagagaaggtggcagtgtgtgtgcgcgcgtgtacgtgtgtgtgtgcgtgtctacaggtagcagtggcggcggcggcggcggcggcggggaccggagcaggggacgcatctgcagccacctccccgcctatgattttcggaggcg

SEQ ID NO: 7634 - DNA, 979 bp, Artificial sequence
  DNA replication origin
ttcctccatctgctcagcctccgtatttcgccaggaaaccctccccgctttctcgtaatctgttccttatttcttttgtacctctcagccgatttccatgctcttggtctctgtggtcccagggcacagctctagggtgaagagctgcagtgactggggcgccgctctaaggctttggaggcgactgcactccgcccgggctctggcagcgtgagcgccgcacagtcgctcgctcccttctctccggtctctccggctcggacgggctctcccggcctctcatcacccactccgactcgcctttcctgccgtgtctccccacgccagctccgcgcgctcggcgctggccgcccgggcgcgctctccgcgccgccgcctgatcctcggcttacagccgcggcgctcccccgcccgcccacaggccgggactccgaattgaagggtcaaccctccgcggggaggcggggaggagcggcgaggagagctggggcaagtggggagccgcgggtggggggactgacgggggaacgggagagtgaggccaagaagaaagaagatgcatctgctccgaagacgccaatgaagaaaggacagagggggcaggagtggagtgggggagagaacgcccaccaggagggtgggcaaaacgggcaatttacaaactgccggggctggagatgccgcgcggaggaggaaagaggttagcggcacagaagaagaaatgaggggaagttcccacatctccccaaaaggtcacgtttgaaaaccgtgtcccttgaacgggagttaaacaagcgactggccatggtgtaaaaggtggatttaaaaggaaatttagtgtcatgtacttatttagacacggcttcgtctcgctcaactctggcaaattaccctccaagtaaaatgtattggttttatgcagaaacggaaggcgaatctcctccactgtggactcctcctgagattggtttgtttgctg

SEQ ID NO: 7635 - DNA, 957 bp, Artificial sequence
  DNA replication origin
gaggagcccctctgcccagccagctgccccgtccgggagggaggtgggggggtcagccccccgcccggccagccgccccatccgggcgggaggtggtggaatcagccccccgcctggccagccgcccctactgggaagtgaggagcccctctgcctggccagccgccccgtccgggagggaggtgggggggtcagtccccctcccggccagctgccccgtccgggaggtgaggggcgcctctgcccggccacccctactgggaagtgaggagcccctctgcccggccagccgccccgtctgggagggaggtgggggggtcagaccccgcccggccagccgccccgtccgggagggaggtggggggggtcagccccccgcccggccaggccccccgtccgggagggaggtgggggggtcagccccctgcccggccagccgccctgtccggggggtgaggggcgcctctgcccggccacccctactgggaagtgaggagaccctctgcccggccaccaccccatctgggaggtgtacccaacagctcattgagaacgggccaggatgacaatggcggttttgtggaatagaaagcggggaaaggcggggaaaagattgagaaatcggatggttgccatgtctgtgtagaaagaggtagacatgggagacttttcattttgctctgtactaagaaaaattattatcctgttgatctgtgaccttacccccaaccccgtgctctctgaaacatgtgctgtgtccactcagggttaaatggattaagggcggtgcaagatgtgctttgttaaacagatgcttgaaggcagcatgctcattaagagtcatcaccactccctaatctcaagtatccagggacacaaacactgcagaaggccgcagggtcctctgcctaggaaaaccagagacctttgttcacttgtttatctgctgaccttccc

SEQ ID NO: 7636 - DNA, 1368 bp, Artificial sequence
  DNA replication origin
ggtggggctgacccccccacctccttcccggacgaggcggctggctgggcagaggggctcctcacttcccagtaggggcggccgggcagaggcgcccctcacctccccgacgggtctgttggccgggtggggctgacccccccacctcctccggacggggcggctggctgggcagaggggctcctcacttcccagtaggggcggccgggcagaggcgcccctcactcccggacgggaagaatggccgggcgggggggctgacccccccacctccctcccagacggggcggctggccgggcagggggctgacccccccacctccctcccggacggggtggctggccgggcggggggctgacccctccacctccctcccggacggggcagctggctgggcagaggggctcctcacttcccagtaggggtggccgggcagaggcacccctcacctcccggacagggcggctctcctggcgggggctgacccccacctccctcccggacgggatggctgccgggcggagatgctcctcacttcccagatagggtggctgccaggcggaggggctcctcacttctcagatggggcggctgccgggcggagggactcctcacttctcagacggggcggttgccagacagagggtctcctctcttctcagacggggcggccgggcagagacgctcctcacctcccagacggagtcgcagccaggtagaggcactccccacatcccagacggggcggcggggcagaggcgctccccacatcccagacggggcggcggggcagaggcgctccccacatctcagacgatgggcggccgggcagagacgctcctcacttcctagatgggatggccgccgggaagaggcgctcctcacttcctagatgggatggcggccgggcagagacgctcctcactttccagactgggcagccaggcagaggggctcctcacatcccagacgatgggcggccaggcagagatgctcctcacttcccagacggggtggcggctgggcagaggctgcaatctcggcactttgggaggccaaggcaggcggctgggaggtggaggttgtagcgagccgatatcacgccactgcactccagcctgggcaccattgagcactgagtgaaccagactccgtctgcaatcccggcaccttgggatgccgaggctggcggatcactcgcagctaggagctggagaccagcccggtcaacacagcgaaaccccgtctccaccaaaaaaatacgaaaaccagtcaggcgtggcggcgcgcgcctgcaatcgcaggcactcggcaggctgaggcaggcgaatcaggcagggaggctgcagtgagcccagatggcagca

SEQ ID NO: 7637 - DNA, 814 bp, Artificial sequence
  DNA replication origin
ttggggcacagagataagaggtcggggtgcagaaataagtgattggggcacagagataagaggtcggggtgcagaaataagggattggggcacagagataagaggtcggggtgcagaaataagggattggggcacagagataagaggtcggggtgcagaaataagggattggggcacagagatacgaggttggggtacttgcccctcccctagaaaagcaggacttgctgctaagggtgaaggagaaggggttgggggtttcttgccccccagaaaggcagagaaggggtagagacatggcgagaaggggttggggtacttgcccctcccccagaaaagcaggacttgccactaagggtgaaggaccaaggcaggcatccctgtgtggtctgacacctctgaaacatggctaaataatcagagaggcgtccctgcaatgattaaacaccaagggaaggctgccttcccagtctgtgacaggcgccagagttttgggtccacggataaaatgtgtctcctttgtctctatcagaaaatgaaaggaattgaaattaaaagaagggagagattgaagtgtggtgccaagactgaaaggagaaagaggttgagggatagtgagggaggttggagaagagagtaaaaagaggccgcttactggatttgaaattggtgagatgtttcttgggctggttggtctgaggacctgaggtcgtaggtggagctttctcatggagcaaagagcaggaggacaggggattgatctcccaagggaggttccccgatctgagtcacagaaccaaatttcactcacgtc

SEQ ID NO: 7638 - DNA, 1050 bp, Artificial sequence
  DNA replication origin
ctgtagaaaaggaagattagaaagactcagcgacgcttggggttgggactgaggggacaggtgggagggaaagaaggaagatttaggacgagttgcattgggaacagagactagaaagggaccgatgtgtaaaagaatgcccggacgtcaggcacctcagaccgttttcctattttttgacaaaaattatttaggtcttgtaggatggagaaatcaaaagtgccgttttctggccattttagagccattgccaagtttgtattggggctaagcagtgttgcagaagaaaataaggcatttaggttttaggtcaggtgtgagttgaagaggttttaagtttttgaggacacaggctaagggagaaggaggaggaatggagggtggaaggttgcctatagtgaaagaagcaagcccagagaaaagagagagtagagacacggagggaaggggttcggaggttcttaccctccagaaaagcgggaaaggggtcggggtgcggaaataaggggttggggtgcagagataagaggtcggagcatggaaataagggattggggcacagagataagaagttggggtgtggaaataagggattggggcacagagataagaggtcggggtgcagaaataagggattggggcacagagataagaggtcggggtgcagaaataagtgattggggcacagagataagaggtcggggtgcagaaataagggattggggcacagagataagaggtcggggtgcagaaataagggattggggcacagagataagaggtcggggtgcagaaataagggattggggcacagagatacgaggttggggtacttgcccctcccctagaaaagcaggacttgctgctaagggtgaaggagaaggggttgggggtttcttgccccccagaaaggcagagaaggggtagagacatggcgagaaggggttggggtacttgcccctcccccagaaaagcaggacttgccactaagggtgaaggaccaaggcaggcatccctgtgtggtctgacacctctgaaacatggctaaat

SEQ ID NO: 7639 - DNA, 1010 bp, Artificial sequence
  DNA replication origin
agggttgttgccaaatgagccatgaactgggctggatttttatatttgatgaaaaagagcctaaatgctatctgatttgagataaagaaaaaggagcattaaccttgactatgcctttagcttcagccacctttttaagagtaaattgctgggcaggtgggggagggctagtcacggaacgaaactgtaagccagactgggtgtgagaagaggtgataaaaggattatagagtggaggagcggaggctgaggaagaattgggacctagcttggcctggtgaggaggggagaggtcagatgggtctgtagaaaaggaagattagaaagactcagcaatgcttggggttgggactgaggggacaggtgggagggaaagaaggaagatttgggaggggttgcattgggaacagagactagagagggaccgatgtataaaagaatgcctggatgtcaggcatctcagaccatttgcctattttacgacaagaattatttagatcttgtaggatggaaaaattgaaagtgccgttttccagctatttgaaactactgtcgagtttgtattggggtcaagtggcattgcagaagaaaataagacacttagattttaggtcaggtgagagttgaagaggttttaagttcttaagaacacaggctaagggagaagaaggaggaatggaaggtggaagcttgcccatagtgaaggaggcaagcccagaggaaagacagtagagacacggagaaggggtggggggttcttgccctccagaaaagcagagaaggggtcgaggcacggaaataaggggttggggtgcagagataagaggtcggggcacagaaatcagggatcggggcacagagataagaggttggggggtggaaataagggatcggggcacagagataagaggtcagagttcctgtccctcccccagaaaagcaggacttgccgctaagggtgaaggagaaggggttgaggggttcttgctcctcccccagaaaagcagaga

SEQ ID NO: 7640 - DNA, 1056 bp, Artificial sequence
  DNA replication origin
ctggctccctcagcttgcagggaggtgtggagggagaggcgcgagcaggaaccggggctgcgcggcgcttgcgggccagctggagttccgggtgggcgtgggcttggcgggccctgcactcggagcagccggccggccctgccggccccgccgccccgggcaatgaggggcttagcacccaggccagtggctgcggagggtgtactgggtcccccagcagtgccagcccactggcgctgcgctcgatttcttgccgggccttagctgccttcccgtggggcagggctcgggacctgcagcccgccatgcctgagccttcccccggcccccgcagtgggctcctgtacggcccaagcctcctgcatgagcgccgccccctgctccacggcgcccggtcccattgcccacccaagggctgaggagtacgagcgcatggcgcgggactggcaggcagctccacctgcagccccagtgcgggatccactgggtgaagccagctgggctcctgagtctggtggggaggtggagaacctttatgtctagctcagggattgtaaatacaccaatcgacactctgtatctagctcaaagtttgtaaacacaccaatcagcaccctgtgtctagctcagggtttgtgaatgcaccaacggacactctgtatctagctactcaggtggggacttggagaacctttgtgtggatactctgtatctagctaatctggtggggaggtggagaacctttgtgtctagctcagggattgtaaatgcaccaatcagcgccctgtcaaaacagaccacctggctctaccaatcagcaggatgtgggtggggccagataagagaataaaagcaggctgcggagctagcagtggcaacccgctagggtctgcttccacactgtggaagctttgttttttagctctttgcaataaatcttgctgctgctcactctttgggttcacactgcctttatgagctgtaacactgaccgcaaaggtctgcagcttcactcctgaagcaagctagatcacgagcccaccaggaggaacgaac

SEQ ID NO: 7641 - DNA, 894 bp, Artificial sequence
  DNA replication origin
cctctctccccagtgttgagtgtctgagccgttggctgctccgaaccgtttggctctttcccttagtaacagcttttaccttctgcctcaattcctctccccgctcgcgcccttcccccgcgcgccgcctccccccgccgccggccgcgtgcgcccccgcccctccccccgcggcgggagcacctccgctcgccacctggggacccgcgccgcgctccccgcccccgcccgcccggcgcccatcccccgcgccctccgctcgctggggttataattgcctctcaccccccggaggggttattttgggggtggttggaggcggtggcggcggcggcgaggaggggaatttccttgtgcctccattcccgggaggggggagcggcgttggaggccaccgtttccaggtaagcgctgggggccggaccctggagtgggggcggccgggggcctgggcggggggcgcgggccagaggcggccgggggcgctgggccgcggggggatgggcgcgagtggaacatgcatttttcaacttggcccttgggggaactgggcttgcgtgggggaagggaaggcagggagggcacttggggcgcccccatccccccgttttcctctctcaggtttctttgaaatgctcacgtgcctgcccacccccctaccctttcccggtctcgggggatcctcaccctaattatgttgtccccgaaaatgtgcacctcggccttctccccctcttcctcccttcgtgcatttacaccccctttttgtgcgtgtgtgtttggggggggaggctttcaggaaaggatttgcagcaaattgaatcaaggagccatcatgaggccgactcctttatagcctatttttagcagaggagaaggagcttttcggtgcat

SEQ ID NO: 7642 - DNA, 952 bp, Artificial sequence
  DNA replication origin
gcacaaatgagctcgcgaggcccgcggcggcggcggcggcggcggccgcgcagcaaaacaaacccgagcggcctgcgccgggcgggcgggcgagcgggcgggcgggcgcgcgggggaggggccggcgggggaggggcgccgcggacgccgggaggcggcggcggcgcggcgggggggctccagcggccgcgctcctctccttcccggcccgctctggcggcactgggggctgggctgtgcggcgcattcttttaaaaatcaggcgagccccgcgggcactcgaaggcgcctcggggccccgggccgcccgccccgcccccaccgccgcgggccggcctgggtgtgctcgggtgtgggccgctgggcccgagacgggtgggggcggggaggcccgcgcggtggccggggtggagccgccggcgaagtttccccaaggacgccgcgggctcccgcgtgtccggggggcggcccggcggcgttgggggctgggcgcacacgcggcgggcatgtgggggagtgcggcgcggcatcatatggacatttgtttgtgaaaatctctgtgaacacctttgtgtgcgtaaatacatatggttctccgaagcgtacctggaaaggtgctttatctgtaataagcgactttcaaaatgtgatccagagcacgggatctggagagaaaacacgcacacaagaaaaggtttttgatactaaacacaaagctgtaattgaagtatttatgcccaaatgtactgtgaatcaagcatatggtggtatttatcatctggtgggtctgtttgaaaggtttgctcgatcagttcttatttcacaaaaataaaataatgtaactaaatgtttactaaatatatacctgcacagtggcatccacagtagaagtttatccactttgtgtactttttgcatgtgtgaagcacagcaaggcggtttataaagtata

SEQ ID NO: 7643 - DNA, 1064 bp, Artificial sequence
  DNA replication origin
ggtcccccagcactgctggcccacccgggccacactcgaattcttgccaggcctcaaccacctccctgcggtgggctcccgagaggcccaagcctccctaacaggtgctgccccctgcttgtggcactggtcccatccacggcccaagggctgaggagtgcgggcccacagcacaggattggcgggcagctccgcctgcggccccagcacaggatccactaggggaagccaggtgggctcttgagtccagtggggacttggagaacttttatgtgtagttggaggattgtaaatgcaccaatcagcactctgtgtctagcttggggttcatggatgcaccaatcagcactctgtatctagctaatctggtggggacttggacaacttttgtgcctagctggaggattgtaaacgcaccaatcagcactctgtgtctagctcggggggggggggggggggggggtggttcgtggatgcaccaatcagaactctgtgtctagctcaggaattgtaaacttgtaaacgcatcaatcagcactctgtgtctagctgaaggttggtaaatgcaccaatcagtgctctgtgtctagctaatctagtggggatttggagaacttttatgtctagctttgtaaatgcaccaatcagcactctgtgtgtagctcagggattgtaaatgcaccaatcagcaccctgtcaaaacggaccaatcaactctctgtaaaacggaccaatcagctctctgtaaaatggaccaatcagcaggatgtgggtggggccagataagggaataaaagcaggctgcccaagccagcagcggttgcagtgagctgagattgcaccattgtgctccaatctgggcaacaagagcaagactctgtctcaaaaacaacaacaacaaaaaaaagtgatgtgactggcagcaccctatgccttattcccagtttgaaagtaggtatagtgcctttctaaccacagcaatcaggtaagattgaaggcaacagtacaaaggaagagtcaagaaagacattatcctaatattgtaaatatacattgctagaagt

SEQ ID NO: 7644 - DNA, 811 bp, Artificial sequence
  DNA replication origin
cttcccggccgccatcccttctaggaagtgaggagcatctctgcccggccgcccatcatctgagatgtggggagcacctctgccctgccgccccatctgggatgtgaggagcgcctctgccctgccgcgaccccgtctgggaggtgaggagcgcctctgccctgccgcgaccccgtctgggaggtgaggagcgcctctgccctgccgccccatctgggaagtgaggagcatctccacccggcagccacccagtccgggaggtggggggcagcccccgcccggccagcggccccatccgggagggaggtggggggcagcccccgcccggccagccgccccgtccgggaggtggggggcgcctctgcccggccgccccttctgggaagtggggggcccctctgcctggccaccaccccatctgggaggtgtacccagcagctcattgggaacgggccatgatgacgatggcgttttgtcgagtagaaaggggggaaatgtgaggagaagatggagaaatcagattgttgctgtgtctgtgtggagagaagtgggcataggagactccattttgttctgtactaagaaaaattcttctgccttgggatgctgttgatctatgaccttgcacccaacccgatgctctctgaaacatgtgctgtgttcactcagggttaaatggattaagggcggtgcaagatgtgctttgttaaacagatgcttgaaggcagcatgctccttaagagtcatcaccactccctaatctcaagtacccagggacacaaacactgtggaaggccccagggtcctctgc

SEQ ID NO: 7645 - DNA, 1174 bp, Artificial sequence
  DNA replication origin
aatccatttaaccctgagtgaacacagcacatgtttcagagagcatcgggttgggtgcaaggtcatagatcaacagcatcccaaggcagaagaatttttcttagtacagaacaaaatggagtctcctatgcccacttctctccacacagacacagcaacaatctgatttctccatcttctcctcacatttcccccctttctactcgacaaaacgccatcgtcatcatggcccgttcccaatgagctgctgggtacacctcccagatggggtggtggccaggcagaggggccccccacttcccagaaggggcggccgggcagaggcgccccccacctcccggacggggcggctggccgggcgggggctgccccccacctccctcccggatggggccgctggccgggcgggggctgccccccacctcccggactgggtggctgccgggtggagatgctcctcacttcccagatggggcggcagggcagaggcgctcctcacctcccagacggggtcgcggcagggcagaggcgctcctcacctcccagacggggtcgcggcagggcagaggcgctcctcacatcccagatggggcggcagggcagaggtgctccccacatctcagatgatgggcggccgggcagagatgctcctcacttcctagaagggatggcggccgggaagaggccctcctcacttcccagactgggcagctgggcagaggggctcctcacatcccagatgatgggcggccaggcagagacgctcctcacttcccagacggggtggcggctgggcagaggctgcaatctcggcactttgggaggccaaggcaggcagctgggaggtggaggttgtagcgagccgagatcacgccactgcactccagcctgggcaacattgagcactgagtgaatgagactccatctgcaatcccggcacttcaggaggccgaggctggcagatcactcgcggttaggagctggagaccagcccggccaacacagcgaaaccccgtctccaccaaaaaaatacgaaaaccagtcaggtgtggcggcgcacgcctgcaatcgcaggcactcggcaggctgaggcaggagaatcaggcagggaggttgcagtgagcagagatggcagcagtacagtccagcttcggctcggcatcagagggagacc

SEQ ID NO: 7646 - DNA, 947 bp, Artificial sequence
  DNA replication origin
aggagcgtctctgcccagccgccatcccatctaggaagtgaggagcgcctcttccccgccgccatcccatctaggaagtgaggagcgtctctgcccggccacccatcgtctgagatgtggggagtgcctctgccctgtcgccccgtccgggatgtgaggagcgtctctgcccggccgccccgtctgagaagtgaggagaccctctgcctggcaaccgccctgtctgagaagtgaggagcccctccgcccagcagccaccccgtctgggaagtaaggagcgtctccgcccggcagccaccccgtccaggagggaggtgtgggggtcagccccccgcccggccagccgccccatccgggagggaggtgggggggtcagccccccgccgggccagccgccccgtccggaaggtgaggggcgcctctgcccggccgcccctactgggaagtgaggagcccctctgcccggccaccaccccgtctgggaggtgtacccaacagctcattgagaacgggccatgatgacaatggcagttttgtggaatagaaaggggggaaaggtggagaaaagattgagaaatcggatggttgccgtgtctgtgtagaaagaggtagacatgggagacttttcattttgttctgtactaagaaaaatgtttctgccttgggatcctgttgatctgtgatcttacccccaaccctgtgctctctgaaacatgtgctgtgtccactcagggttaaatggattaagggcagtgcaagatgtgctttgttaaacagatgcttgaaggcagcatgctcattaagagtcatcaccactccctaatctcacaaacactgcgggacacaaacactgcggaaggccgcagggtcctctgcctaggaaaaccagagacctttgttcacttgtttatctgctgaccttccctccactattgtcctgtgaccct

SEQ ID NO: 7647 - DNA, 1239 bp, Artificial sequence
  DNA replication origin
agtggacacagcacatgtttcagagagcacagggttgggggtaagatcacagatcaacaggatcccaaggcagaaacatttttcttagtacagaacaaaatgaaaagtctcccatgtctacctctttctacacagacacggcaaccatccgatttctcaatcttttctccacctttcccccctttctattccacaaaactgccattgtcatcatggcccgttctcaatgagctgttgggtacacctcccagacggggtggtggccgggcagaggggctcctcacttcccagtaggggcggccgggcagaggcgcccctcaccttccggacggggcggctggcccggcggggggctgacccccccacctccctcccggatggggcggctggccgggcggggggctgacccccacacctccctcctggacggggtggctgccgggcggagacgctccttacttcccagacggggtggctgctgggcggaggggctcctcacttctcagacagggcggttgccaggcagagggtctcctcacttctcagacggggcggccgggcagagacgctcctcacatcccggacggggcgacagggcagaggcactccccacatctcagacgatgggtggccgggcagagacgctcctcacttcctagatgggatggcggcggggaagaggcgctcctcacttcctagatgggatggcggctgggcagagacgctcctcactttccagactgggcagccaggcagaggggctcctcacatcccagacgatgggcggccaggcagagacactcctcacttcccagacggggtggcggccgggcagaggctgcaatctcggcactttgggaggccaaggcaggctgctgagaggtggatgttgtagcgagccgagatcacaccactgcactccagcctgggcaccattgagcactgagtgaaggagactccgtctgcaatcccggcacctcgggaggccgaggctggcggatcactcgtggttaggagctggagaccagcccggccaacacagcgaaaccccgtctccacccaaaaaatatgaaaaccagtcaggcgtggcggcacgcgcctgcaatcgcaggcactcggcaggctgaggcaggagaatcaggcagggaggttgcagtgagctgagatggcagcagtacagtccagcttcggctcggcatcagagggagaccgtggaaagaggggagagggagagggaga

SEQ ID NO: 7648 - DNA, 1117 bp, Artificial sequence
  DNA replication origin
gtcacgtggagggcagatggaaagagcatcggaaaggaaccgctagtccccggcgctccaggggctcgtcctgaaagctccgcggctcccaatcgcccgcacttaccggaacccccgggacgcgccggcagtctccgcgccgcgtccgcccgggacgcccgcgacgcccgccctgcgcgcccggctcggcccagctcgacccagcctcttctcggagcaactttctccgccggccgccgccgagccccctccgcagccgaaggctgactgtcaaaagtcagtccaacccgacccacagggaaacagctgcaggaagtgactgcggaaccgggaggcggtggaggaggagactgagggcgccggctcggcgtcgccactgcgcatgtgcttggcggagcaggcccggcagcggtggcagcggtagcagtggcggctcccgcatccccggcgggcggcgcgtgggtcaggtgccctggccgcgagcgcaggggcgcggggttaggccggcgtggggaacaaaggcacgagtgagaggcgggagggtcccgccgccaatctcagcagacagccccgaagagcagttcagcagatgccctggaaagttaatccttggtagaagcctgggcagagcttttgcaactttcatctccagtcattgggatccaaacattgttcattctgttcctcccttagcctgctggttggcggttaaggcggctgagtggatcctttaaactgctgcaacagaacctttaaactgctgctctccccacttccgccccaggatggaggaagaagagcgtggctgcctgcccagtatcggcctccctcacacaaaacgcccccacccacccacacacacaccttccctcccctacacgaaagtgagcaggagatagaggagactttctcctgacccccagaggctcacctgcaagacaggaaggaccaggaaaagagtggccaacgctaggatgtcacatccttcataaccaacctggacatcttcaatgttaacactgagtgatgagctgaggaaattccggctctaaacttatagcgtaaattaactcgtatgaagatctgctggggtattatttttgtgtgtggcaaacga

SEQ ID NO: 7649 - DNA, 1335 bp, Artificial sequence
  DNA replication origin
cctcagttcccagtaggggcggctgggcagaggcgcccctcacctcccagacggggcggctggccgggcggagggctgacccccccacctccctcccggacggggcggctggccgggtggggggctgacccccccacctccctcccggatggggcggctggccgggttggggggctgacccccccatctccctcccggacggggtggctggccgggctgaggggctcctcacttcccagtaggggcggccgggcagaggcgcccctcacctcccggacggggcggctggccgggcggggggctgacccccccacctccctcccggacggcacggctggccaggcggggggctgacccccccacctccctcccggacggcacggctggccaggcggggggctgacccccccacctccctcccggatggggcggctggcctggcgggggctgaccccccccccacctccctcccggacggggtggctgccgggcggagacgctcctcacttcccagatggggtggctgctgggcggagaggctcctcacttctcagacggggcagctgccgggcagaggggctcctcacttctcagacggggtggttgccaggcagagggtctcctcagttctcagacggggcggccgggcagagacgctcctcacctcccagacggggtctcggccgggcagaggcgctcctcacatcccagatggggcggcggggcagaggcgctccccacatctcagacgatgggcggccaggcagagacgctcctcacttcctagatgtgatggcggctgggaagaggcgctcctcacttcctagatgggatggcggccgggcggagacgctcctcactttccagactgggcagccaggcagaggggctcctcacatcccagacgatgggcggccaggcagagacactcctcacttcccagacggggtggcggccgggcagaggctgtaatctcggcactttgggaggccaaggcaggcggctgctccttgccctcgggccccgcggggcccgtccgctcctccagccgctgcctcccgggcggcgctccaatttaccagttctaatagttttttttgtagattctttaggtttttcccatataagatcatatcatctgtaaacaagggtaatttgacatcttcctttccaatttggatgctctttgtttctcttgtctgattgctctagctaggacttctagtactatgtagaatgatagtggtaaaagtgggcatccttgttttgtttcagatcttagaggaaaggctttccatttctccccattcagtatgatactagctatggctctgt

SEQ ID NO: 7650 - DNA, 931 bp, Artificial sequence
  DNA replication origin
ccccatccgggagggaggtgggggggtcagccccccgcccggccagccgccccatccgggagggaggtgggggggtcagccctccgcccggccagccgccccgtctgggaggtgaggggcgcctctgcccagccgcccctactgggaagtgaggagcccctctgcccggccagctgccccgtccgggagggaggttggagggtcagccccccgcccggccagccgccccgtccgggagggaggtggggggggggtcagcccccctgcccggccagccgccccgtccgggaggtgaggggcgcctctgcccggccgcccctactgggaagtgaggagcccctctgcccggccagccgccccgtccgggagggaggtgggggtgtcagccccccgtccgggtggtgaggggcgcctctgcccggccgcccctactgggaagtgaggagcccctctgcccggccaccaccccgtctgggaggtgtgcccaacagctcattgagaacgggccaggatgacaatggcggctttgtggaatagaaaggcgggaaaggtggggaaaagattgagaaatcggatggttgccgtgtctgtgtagaaagtagaagacatgggagacttttcattttgttctgcactaagaaaaattcctctgccttgggatcctgttgatctgtgaccttacccccaaccctgtgctctctgaaacatgtgctgtgtccactcagggttaaatggattaagggcggtgcaagatgtgctttgttaaacagatgcttgaaggcagcatactctttaagagtcatcaccaatccctaatctcaagtaatcagggacacaaacactgcggaaggccgcagggtcctctgcctaggaaaaccagagacctttgttcacttgtttatctgctgaccttccctccactattgtccca

SEQ ID NO: 7651 - DNA, 1065 bp, Artificial sequence
  DNA replication origin
gaaaggagagggagcggcgagccctcgcctctgcagctaggagaggccagaggcaggcgagggagagggtgcggcgatcgcaggcgaactccgccgcgggccgacgctgggagacgaccagcccgtagcctccgcccaacacggcgggcgcgcccgggagtctccggcacccacccggtccccattcccaccgcacccgctaccggccagtccgcgctctactcacgctcggggctcttccaggctccgcggctctaaccgcatcgggtcccagccccgcgggcggcggcggcggcgccgagggagaggagagcgggcggcacggcccccgcctcccggcccctctcccccgccgctccggagctgcccggccgggcccgagccctgcctcgccggcggccccagccccagtcccagcggccgcggcagcagcagcccgacacctcagcggccgcagcggcggcaccggaactgccgctttctacttctcgctccctctcctcgctagcccccgccacacgcccccgcccccgactcctttctccgtcgcccctgtttttttttccttttgtttccagaataaactttattggtctctttttccgctcacatcgtgtaaacaaacaacgaactcttccccaccccctcggccccccccctcctccggcagaagagggtaagagctgaggaggggcagagcctacaatcccccggaagcagatgcgcaaagaagcggaagcgaaattgaggcgaggaggagcagggagtgggcaaatagggtaacaatatgtgctactgcgcctgcgtcttgcttttccgcccgaagtttatgtacagttggggctgctcttctgacgtttgtttaatgatccgtcttctgcagtagtgagggtgttgtgtcatcctaggacagcgtacgtgtagtatatttgtttctacgagcagcaggcgagctggggtagagatatagaaaggaatattgggagcaagtgggttatttcacttttacacccatagaggaaacgagattagttcgggggtgagaggaggtgcggtggctaaccg

SEQ ID NO: 7652 - DNA, 1154 bp, Artificial sequence
  DNA replication origin
tgggcggaggctacgggctggtcgtctcccagcgtcggcccgcggcggagttcgcctgcgatcgccgcaccctctccctcgcctgcctctggcctctcctagctgcagaggcgagggctcgccgctccctctcctttctctctggctgccgcctcgctcttcctttgcttctactcccagttttggggacggggcggctggaggttgaggaagtgcgcccagggccgccgccccggccgcggtggctctgtctcccgcgccctgcacgcccacccagcccgcgggtggaggggctgccgcgaggactgcggctcaagggacgcgggcgcgaaaccgcgagcttttcttgaggggctgtcacgcccgaggactccggccccgccagcctggcggccctgcgtttgcctcttactgggtttaaatcgcccggcaggggtatggaaggaacaccgctcccctcacccccgccagctcccctcccacccttcctttcgaggttgttttttccttttagctgagacaaacgcttagatctttcattcatagacctgagacactgactcatgtgacttgtctctttactaagtgtattatgtgatgcctgttccatggctcttaagtggctcggaaaggtagggtagggcccgggattgggctatgtaaacaccagacgttcagccggcgtgtttttgacctcggctcgaggggtttattttaggatgctaaaggaatagtgatggtggccaaccgtgttaccagacttgggaatcgaaagctatttttttatgtcaataattgagactgtttacatggttaaataaagggtagggtaaagggagcgcaacaagagggtctttctagaaaacagtctgcatattctttaatgaattagagttgtgatttcatcttggtgaagcttcctcattccagcactgcgcctttgtgcacatgcaggacctgggttttcggaacgatgttttgaatcatagtttgtgtggccggggagaaccccttagaatacttgggtaggtaaattccaggttatctcaggggattatttctactgcgacttttgaaccactgagggcaatattggtcatatgttatcctgcttagaaattgaatttttctgagtatttgcttacattgcaccg

SEQ ID NO: 7653 - DNA, 1325 bp, Artificial sequence
  DNA replication origin
atgcaaattcaaaatttgaggtacagtttctactgaattcatattgctttcacaccatagtaatgtaaaaaaattgcaagtgtggggcggggcgggccatggggcgggcggaggcgcccgagccccgcttcccccgcgccattccacccccggccaggctcagcccgcggccacctacgccccgcccctgccggctgcgcccgagcccagtcccgcgagccgctccccggcgggctggctcttggccccggaagcgcgagcgttcacttcgcggcgagtggctccgtctccgcggacagagcgcgcgccccctggcccggcccgcgggggggggctccggcacggtccccgagcgtttcccgccgggtggagcgggccgagcccagcaggttgaccagccccgcggccacgcagagccgggagatctactgtttgagcgcggaagcgcagaggctggcggaggcccggctcgccgcaaaacgggaggcccgcgcggaggctcgtgagatccccatgaaggagctggagcggcagcagaaggaggtagaagagagaccagaaaaatattttactgagaaggggtctcgtaacatgctgggcccgtctgcagccacgctggcctttctgggtgggacttcctctcagagaggcagcggagacacctctatatccatcgacaccgaggcgtccatcagggaaatcaaggactctctagcagaagttgaagagaaatgtaagaaggctatgttttccaatgctcagttagacaatgaaaacacaaacttcatttaccaagttgacaccctgaaagatatgttgctggagattgaagaacagctggctgaatataggcggcagtacgaagagaaaaacaaataatttgaaagggaaaaacacgcccacagtatactgcagtttcagtttgctgaagtcaaggaggccctgaagcaaacagaggaaatgctcgagaaacatggaataatcctaaattcagaaatagttaccaatggagagacttccgacactctcagtaatgtttgataccaagatcctaccaagatgacgaaagaagagttaaatgccctcaagtcgacaggggatgggaccctaggaaagccagtgaggtggaggtgaagaatgaaatcgtggcgaatgtggggaaaagagaaatcttgcacaatactgagaaagaacaacacacagaggacacagtgaaggattgtgtggacatagaggtattcactgctggtgagaataccgaggaccagaaatcctctgaagacactgccccattcctaggaaccttagcaggtgctacctatgag

SEQ ID NO: 7654 - DNA, 936 bp, Artificial sequence
  DNA replication origin
gtgaggagtgtctctgcctggccgcccatcgtctgggatgtgaggagcccctctgcctggctgcccagtctggaaagtgaggagcgtctccgcccggccgccatcccatctaggaagtgaggagcgcctcttcccggccgccatcacatctaggaagtgaggagcgtctctgcccggccgcccatcgtctgagatgtggggagcgcctctgccccgccgtcccatctgggatgtgaggagcgcctctgcccagccgcgaccccgtctgggaggtgaggagcgtctctgccaggccgccccgtctgagaagtgaggagcctctccgcccggcagccgccccgtccgggagggaggtggggggtcagccccccgcccggccagccgccccgtccgggaggtgaggggcgcctctgcccggccgcccctactgggaagtgaggagcccctctgcccggccaccaccccgtctgggaggtgtgcccaacagctcattgagaaagggccaggatgacaatggcggctttgtggaatagaaaggcgggaaaggtggggaaaagattgagaaatcggatggttgccgtgtctgtgcagaaagaagtagacatgggagacttttcattttgttctgtactaagaaaaattcttctgccttgggatcctgttgatctgtgaccttacccccaaccctgtgctctctgaaacatgtgctgtgtccactcagggttaaatggattaagggcggtgcaagatgtgctttgttaaacaggtgcttgaaggcagcatgctcgttaagagtcatcaccactccctaatctcaagtaatcagggacacaaacactgcggaaggccgcagggtcctctgcctaggaaaaccggagacctttgttcacttgtttatctgctgaccttccctccactattgtcccatgaccctgc

SEQ ID NO: 7655 - DNA, 1496 bp, Artificial sequence
  DNA replication origin
ctgagtggacacagcacatgtttcagagagcacagggttgggggtaaggtcacagatcaacaggatcccaaggcagaagaatttttcttagtacagaacaaaatgaaaagtctcccatgtctacttctttctgcacagacacggcaaccatccgatttctcaatcttttccccacctttcccgcctttctattccacaaagccgccattgtcatcctggccctttctcaatgagctgttgggcacacctcccagacggggtggtggccgggcagaggggctcctcacttcccagtaggggcggccgggcagaggcgcccctcacctcccggacggggcggctggccgggcggggggctgaccccccacctccctcccggacggggcggctgccgggcggagaggctcctcacttctcagacggggcggcctggcagagacgctcctcacctcccagacggggtcgcggctgggcagaggcgctcctcacatcccagatgggacggcggggcagaggcgctccccacatctcagacgatgggcggccgggcagagacgctcctcacttcctagatgtgatggcggccgggaagaggcgctcctcacttcctagatgggatggcggccgggcggagacgctcctcactttccagactgggcagccaggcagaggggctcctcacatcccagacgatgggcggccaggcagagacactcctcacttcccagacggggtggcggctgggcagaggctgcaatctcggcattttgggaggccaaggcaggcagctgggaggtgtaggttgtagcgagccgagatcacgccactgcactccagcctgggcaccattgagcactgagtgaacgagactccgtctgcaatcccggcacctcgggaggccgaggctggcggatcactcgcagctaggagctggagaccagcccggccaacacagcgaaaccccgtctccaccaaaaccagtcaggcgtggcggcgcgtgcctgcaatcgcaggcactcggcaggctgaggcaggagaatcaggcagagaggttgcagtgaactgagatggcagcagtacagtccagcttcggctccgcatgagagggagaccgtggaaagagagggagaccgtggggagaggggagaggggacaggggagaggggagagggaccatcatctttacttccttctgttattaagctattaccattcattatccatcaatgtcaaaaacatcatttgctcattcatttattcatgagtatttgaatccctatcatgtaccaggcactgctcaaggctcaggaaaaacaatggtgcatgtaaaagacccaaatgtcagcctttgtggagcttattaagagttatgattcctggccgtgcacagtgaatcatgcctgtaatcccagcactttgggaggccgaggcgggtggatcacttgaggtcaggagctcaagaccagcctggccagcttggagaaaccctgtctcta

SEQ ID NO: 7656 - DNA, 971 bp, Artificial sequence
  DNA replication origin
aggccttgcgccgccgcagtctccttctgggcggggaagagcccctcccgagccccgagggcgatcccaccctctaggattactccacgccaggcggccagcgaatttatcccgcccgcctccaccgccccttcaagccctggggaactgggagaaacgtggcgcgcagcggcacctttcccacgctgctcctcaagggaaaggacgcgagtggtcttgcccaggttaggcaaggcagatggcatctcagaccccgaagtgtgccagccgcctgttggggacagagaggccgaggacctcgtcacggttttactgaggccacaccagagaaccacctagggctaggatgctgccctcagggcaagagggtgaaacctgaagactgcgagtcgttgttgagtttcacccgattccttggctcgagaaatagtggaatgaatgaggagttaagggggactggactcgacgatttaagtcctttctcgactttgactttctttgagcagctgtagaaatgattaaattacacgagcataaataaatttgtgaacatggttccataaatgatctctgtgcaagtgtggtgatatgtttaattcagtccttttgacaatgagttgaggtttttagtcacattttacaaaatggaaaagtaaatgtgtgagaagctaaagactgggtcttaattcattttggtagcctaaacccctgaggttcaaacggttaagaggatgactgagagccatgtggattatcaggtacccaaggtcactcggatagttagggctgcaatgatgtctctttgttcacgtccactgctttttctgacaaccacatgccaatcaaccaatcaatcgctggaaagtaataatcacagactttactctgatcccttcaccatcccccaggagataaagctatatttgaaagagacactacttgtttgtgaggctcagtttttatgacctcct

SEQ ID NO: 7657 - DNA, 1203 bp, Artificial sequence
  DNA replication origin
ctgcctccgctgccgcccggcatgccgaacagggcgccccggcgctgcatggcctcggcgcgcaccggagccgagcgagccgagccggagccggagcgcggggtctgccggcggcggcggcgccagcgagcgggctgacgggcgggctgcgcgggcaacggcagccggccgagccggggcgggcggggagagcgggctgcggggcgggagcgggcaccgcgggcttggggcggactggcgacgctatttttaatccaatggcgagtctccggcccagctgcagcgtcaggcggggctggggagcgccagccgcagcgtgccggggagggggcgctggagaggggccctgcgcgtgggccgggcgcggcggcggggggcggagggcgaacccctgaggcgttggcgcgggagctcgagcgggctggcggccgaacgcggcgcgggagggccccgggaaaacaccacggaggtgttttctatcccgaattgttggcttgcagaggggcaactccgaggaggccaacacaaagagcaggattgggggttttaaaaaccgcttgcttttaaaacagccgaagactagggcggtgacgtccccggattggataggggcgggactcgatgtgcaaatctgaaatctaacgtgaggcttaaatctaaatttgcgccatgcacttcagtgcttccccactaagcttcgttccttactttaacatccaaggctcaaaaatagagcgaatagaataagatcgagtgaggatagagggtgtgtgtgtgggggagggcggggtgtgtgtgggagtgtgtgtgtaataataatacaggttttcttacatattgggggaagtcagggatggtcaagattttttcagggcgtcggaaggctttctatttttctctgcctttggagtatcttctatgtgattcaaagttctcatgtcgaacattcagtggcctgatttgaggattttgtaggcaggcatacatattcctgtcttgatcatcagttcctcaaaataaatgatgaatggggttggcctcgggggttgatcatttgcaagcagagcatgtctcccagcatactctcattctctccaaaaaacccacaagacgggttcaatgacattgaggttctctaactacacccaacatatgtattcatgacagagtatccagtgatccctgccagttaatgaaatgcag

SEQ ID NO: 7658 - DNA, 954 bp, Artificial sequence
  DNA replication origin
gccccgtccgggaggtgaggggcgcctctgcccggccgcccctactgggaagtgaggagcccctctgcccggccagctgccccgtccgggagggaggtgggggggtcagccccccgcccggccagccgccccgtccgggagggaggtggtggggatcagccccccacctggccagccgccccgtctgggagggaggtgggggggtcagccccccgcccagccagccgcctcgtccgagagggaggtgggggggtcagccccccacctggccagccgccccgtccgggaggtgaggggcgcctctgcccggccgcccctactgggaagtgaggagcccctctgcccggccagccgccccgtccgggagggaggtggggggggggtcagccccctgcccagccagccgccccgtccgggaggtgaggggcgcctctgcccggccgcccctactgggaagtgaggagcccctctgcctggcaccaccccgtctgggaggtgtacccaacagctcattgagaacgggccatgatgacaatggcggttttgtggaatagaaaggggggaagggtggggaaaagattgagaaatcggatggttgccgtgtctgtgtagaaagaggtagacgtgggagacttttcattttgttctgtactaagaaaaattcttctgccttgggaacctgttgatctgtgaccttacccccaaccctgtgctatctgaaacatgtgctgtgtccactcagggttaaatggattaagggcggtgcaagatgtgctttgttaaacagatgcttgaaggcagcatgctccttaagagtcatcaccactccctaatctcaagtacccagggacacaaacactgcagaaggccgcagggtcctctgcctaggaaaaccagagacttttgttcacttgtttatctgctgaccttccctccactattgtcctgtgaccc

SEQ ID NO: 7659 - DNA, 1136 bp, Artificial sequence
  DNA replication origin
gacggggcggctggccgggcagaggggctcctcacttcccagtaggggcggccgggcagaggcgcccctcacctcccggacggggcggctggccaggtggggggctgacccccccacctccctctcggacgaggcggctggctgggcggggggctgacccccccacctccctcccagacggggcggctggccaggtggggggctgatccccaccacctccctcccggacggggcggctggccgggcggggggctgacccccccacctccctcccggacggggcagctggccgggcagaggggctcctcacttcccagtaggggcggccgggcagaggcgcccctcacctcccggacggggcggctggcctggcggggggctgacccccccacctccctgccagacgaggtggctgccgggcagagacgctcctcacttcccagacggggcagttgccgggcggagggtctcctcacttctcagacggggcggccgggcagagacgctcctcacatcccggacggggcggcagggcagaggtgctccccacatctcagacgatgggcggccgggcagagacgctcctcacttcccagatgtgatggcggccgggaagaggcgctcctcacttcctagatgggatggcggccgggcagagacgctcctcactttccagactgggcagccaggcagaggggctcctcacatcccagacgatgggcggccaggcagagacactcctcacttcccagacggggtggcggccgggcagaggctgcaatctcagcactttgggaggccaaggcaggctgctgagaggtggatgttgtagcgagccgagatcacgccactgcactccagcctgggcaccattgagcactgagtgaaggagactccgtctgcaatcccggcacctcgggaggccgaggctggcggatcactcgcggttaggggctggagaccggccgggccaacacagcgaaaccccgtctccaccaaaaaaatacgagaaccagtcaggcgtggcggcgcgcgcctacaatcgcaggcagtcggcaggctgaggcaggagaatcaggcagcagtaccgtccagcttcagctcggcatcagagggagaccgtggagagagggaga

SEQ ID NO: 7660 - DNA, 1036 bp, Artificial sequence
  DNA replication origin
gcgctgcgggctgccgggaactgttctccgctcggggtgctgaaagcggacgcgggagagcgcgcagagaaggcgaggagccgggtcggccaggctctcctgcaggcgcgggtcctgctcgcggggcgtctctagaactcactccttcttcgccgaactctttctcgcttcctgccaggttgcctcatgtctctctctctctgagctgcgaaccccctcctcccagccctgacgtgagcgcctacaccagccgccgccgcagctgccgagcggggcgcgcgccgttctcccagccgcgtgcctgccgagaggccgcgggaccgggcacgcgcgcgcgttcccaggggcctgggagcggcccgagggcggccccgggcggtgcgcgctccccgagcgcgtcctcggggctgcgcgcgcgcggcggcaaggcgaggtgccggcaggcggtggtcgcgctggtgtacaacgcccgcagcagcgcggcgttcaggtgcggcgtcggcgggcagggcgattctagcggagaggatggccggccggaagaaaggcgggaagacatgcatcgtctctccgggggccatccaccgcggctgagcctgttatcctacagacattataggctgagtgcaggggttgccgaagagtttacttcggttctgattcagctctcgaaagttacgtccgtatcacccgttaaataaagactccccgctcccctcatccccagttcatcgccgagcattctatttaaaacggcaaaccctagtccctgaggatctggcatgttttatttttttccctagcacgtaacatcacctaacatcctttatattttccatatttattttatgtactgtctgtctctccctctgtacaatgttatttccatgagatcagggacttttttttaggggggtggagtgttgcacttggttttgcacgtgtgtgcacagtaaggtatttagtacttcctgacacatggcaggcacacaataaatatttgctgaatgaatagacctttactactatacactta

SEQ ID NO: 7661 - DNA, 1508 bp, Artificial sequence
  DNA replication origin
tggtgctgtgctgggctctgagccagtggacttggggggtcatgcaaccgtatgtgtgtgtgtgtgtgtgtgtgtgtgtgtgtgtgtgtgtgtgtgtgtgtgtgtgtgtgtctattttaagctccccaggtaattttgatgaagattcagctctggaattcctattttggtaatggaaggttacaaagaaatttagcaaagaggggcatgattgggatttttttttttttttttttttttttttttttttttacaaagaccactcctgcatcagagtggaggttagatgaggactagactggaaaaggaggtttaaagaaggttgtaaccatccaagtgattgccggggtggccaaaggagtgcttatgttacccctcttccaaccccagacagcacagttcacagttccaggagagactacttccttctgcttgaggagaggagaggggaggagaggagaggggaggggaggggaggggaggagaggggaggggaggggagggaatgggagactaaagaaaactttgtttcacaacttggataccagctcagacacagtagaatagggtaccaggtagagttctgacacctgcattttaggccctagatcctggaagactttttttctaaatacaccctgggccaaaatggagcccactgacttgaagggaagaacagagtcctagcataatttatcacctgctgactaaagagcttttagttcccaaacagtcagctatggtagacaggctgtacttgccacaggcgttgggtaagactcagagctgtgctggcttcaggtgtgacgcagcacattcccagctatggtggctatggggagagacatcttccactagaggaaaggagagggaaaaataaaggggactttctctttcagcttgagtaccggctcagccacagtggggtagaggaccaagtaggcactttgggtccctgatactaagccatggctgttgaacagcatttctggacctgccctgggccagaggggagcccacttccctaaagagagagtcccaggcctagcagtcaccacaagctgactgtagagaccttggaccttgagtaaacattggcaatactcaggcagtactcatcatgggcctgaagtggtggtagtcatgaggagaacctcttctgtttgtgtaaaagggagggaagagtggaaaggactttgcattgtgtcttgggtgccaactcagccacagcagaatagatcacaaggtagattcctaagtttcccaaattgaggcactggatcccacacagcatcttcagacccacccagggccagggggagcttgctgccctgaaaagaaggatataactctgtctggatttgccacctgctgattggagagcccttggcccttgagtgaacatagatggcagccaggtactgtttactttgggccatgggtgagacccagtgctgtgttggcttgagatttgacccagtgcagtgccattgggggtagccacagaa

SEQ ID NO: 7662 - DNA, 1074 bp, Artificial sequence
  DNA replication origin
aaaaagctagaaaattggaattttattttaaatgaaattcagctccaccatagtgtttaaaattttgttgtacctttagtgatgtaaatgttgggtttgtttattaggatattttaaagcacattgttgaacaattcacttaaataaaactttttgtaccaaagataaaattattcacagccatatcaaataacctcaaggacccaaaagaaaaaaattaaaactgtgtaatcttttatctttgacctcttatctcacacagacaactacctatatttggtgggattgtagaaaattgccatttttgtaggtgaaaacagttcattatcaacaatttcatatagttcaacctaacggttataatacacaaaagaaacttagaggaggaggtggagtgagataaccaaatagaaacctccagtgattgccactccccctccacatgaacaccaaattgaacaactatccgtacaaaaaaagtactttcataagaaccagaagtcagatgaatgatcacagtacctggttataacatcatattcaggaaagaggcactgatagggtagaaaagacagtcttgaatcacctgcaccacccctcccccatcccccggcagtggccgtggaagcatggcacagagagagaatctgtacacaggggagggagaacacggtgattgtgggattttgcattggaactcagtgcttccctgtcacaggagaaagtaacaccgggcagaactcagtgggtacccatgaagggagcatttagatcagctctatccagaggggaattgcatcctagtggtcagaacctgagttccagcaggccctgccactatgggcaaggtgctctgtggtcctaaataaacttgaagtgcagtctcggccataagaactacagttcctgggcaggtcctggtgctgtgctgggctctgagccagtggacttggggggtcatgcaaccgtatgtgtgtgtgtgtgtgtgtgtgtgtgtgtgtgtgtgtgtgtgtgtgtgtgtgtgtgtgtctattttaagctccccaggtaattttgatgaagattcagctctgg

SEQ ID NO: 7663 - DNA, 1033 bp, Artificial sequence
  DNA replication origin
tccatgagtagcccaaggtgactaaaggtgaggaaacctgagatatcttattacttggatctattcaatcccagccataagaaagctgaaaaatccctcagttgacctcgctctcctgtggcagatcaggacgacatatttttttaggcaagtccgcaaaagttgtctcaaaaactgtaatgcaatgacatcccatctgacatagggaaaggcttcaacgtttaactaaaaaatgtagaatgtgaaacgcaaggtgcagggccaaactgacaaactgtcttgatagatgagggaatcaggaaccagtagtctacaactggaaagctgcttttaaaaaaacaaacaataaacaaaccaaaaaacacaaacaaaagcactttctgtatccggagggcagaaactgaggtgactgaccagtgcctctctagttggaacaaacacacatcacccagacgatgctgggttgtagaaatggctttctcacggggttgggaaatttatgggcatttatttagaggtggctctgaattggaaactttactgttcaaaagcgctctggagccaaagctgaaccccatattttacaagcgcaagcctagctggggagatgtggagggtggggttttcccctcaccctcagattgggacttcggtgaataaatatcattcagcagaaacgacctagattgaggaagaaaaagagaaaggggaaaaggagaggaggaaagaagaaagagagggagggagggacgaaagaaaggtaaagaggggaatttacaaaaagggaattaagcgggctaatggcagagaggatcagcaagaggggcaccgggacctgtttttaaatcgcgagtgctgcttataaggaaacacgatacgcacgatcagggtctggatgttccagggagccaatgaccacacacatcacgagtttcacacagatggcatcatgtcatgctttagttatcaactaccgtgaaagctgtagcttctctttccttaagcaatcaatcacgccctgactggccacttt

SEQ ID NO: 7664 - DNA, 875 bp, Artificial sequence
  DNA replication origin
ccgggccttgctgggctcccccttccccagtcccggccgccttctcccagtgtgcgctgcctgcacctgtgcctggagagcatcgaccccgcctcccaggccttgagcccctttgcggcgcagccccagccttgcgcggcctgggctttgcggccaccacaatggaaatctacggggaaaatgccagggctggttctgctggagtcctgggaactctgcgtgggagggagtttgtgactgcggcccaaaagccacctccatacagtgccgtgggatgccaggaagttgaaatcaccctcccccatcgcctgcacttttgagcgcccttccgtctgtgtctttccccagcccccatttgaaagccgcacgaccgaaacccttcttacggggaggcatgggatgggaatggggagtgggggcagacagtagaagcatcccctttgctacggttgaatgaagacagtctagtgggagatgtggctggggctaagaggaagagctgcagtttcctgggccaaagagctgagttggacagggagatggcagcttaccaaggcctgctggttctcagctctagagtctgccttatggtccgagcaggatttatttttaagaacagagcaagttacgtggaagcaaggaaggttttgaggacagaggtttgggtctcctaacttctagtcgggactgtgagaagggcgtgagagagtgttggcacctgtaaggtaagagaggagagcggaagagcgcagtacgggagcggcaccagaggggctggagttgggggggagtgctgtggatgagcgggagaacaatgacacaccaactcctgcactggctgtttccagaaatacgagttggacagccgccctgag

SEQ ID NO: 7665 - DNA, 903 bp, Artificial sequence
  DNA replication origin
aaagtgcggagattgcagcctctgcccagccgccaccccgtctgggatgtgaggagcccctctgccctgccgcccagtctgggaagtgaggagagcctcttcccggccgccatcccatctaggaagtgaggagagtctctgcccggccgcccgtcgtctgagatgtggggagcgcctctgccccgacgccccgtctgggatgtgaggagcgcctctgcccggccgcgaccctgtctggaaggtgaggagcgtctctgcccggctgccccgtctgagaagtgaggagcccctccgcccggcagccgccccgtctgggaagtgaggagcgtctccgcccggcagctgccccgtccaggaggtggggggcagcccccgcccggccagccgccccattcgggaggtggggggcgcctctgcccggccgccccgtctgggaattgaggagcctctctgcccagccaccaccccgtctgtgatgtgtacccaacagctcattgagaatgggccatgatgacgatggcggttttgccgaatagaaaagtgggaaatgggaaaagaaagagagatcagattgttactgtgtctgtgtagaaagaagtagacataggagactccattttgttctgtactaagaaaaattcttctgccttgggatactgttaatctgtaaccttacccccaaccccgtgctctctgaaacatgtgctgtgtcaactcagggttaaatggattaagggcggggcaagatgtgctttgttaaacagatgcttgaaggcaagcatgctcattaagagtcatcaccactccctaatctcaagtacccagggacacaaacactgcggaaggccgcagggtcctctgcctaggaaaaccagagacccttgttcacatgtttatctgctg

SEQ ID NO: 7666 - DNA, 1167 bp, Artificial sequence
  DNA replication origin
cgagaggccccgcgggggcggacgaatggaggtggaggggcgggggcacctaccagctgctgccggatccagcgccacattcccccgtcgtcgccgtccgggtcccgcggggcgcgggggccgcggggctgcaggtggaggccgacaagacagaggcgggagcgggcgagcccctcgggccgaagttccgcttaccgccgccgccgccactgcctcactccccgcgccgcgtccccatcccgcggcgtcggccccgagtcctacaggcgcggccccggcgccgcccccgcccggcgcagctgagcctgccgccgcgccgcagccaccttcattattgaccgttgtcacccaaagcacccccgcaaccccacccccgccccgccccgcccggccccccggctccacccgggaccgcccccggcgccccggcccgcccccggacgtgacgaaagggggtgcgcggaccgaggggggcctggcgcgccccgccgccgttccgagttggggggtttctgtgttgtgggtccgggaagaagcgagcgtggaaaggtgccgggttctcgaacgctgtttctgtccactgccaccctcctccccgttctgggagtgggattaagtcgtgtctgtgggtctggccatctccggagtctgcagcttggggccgattcctcggtctctacctcctgttgcaggtctttttcgggctctgtggcttctttggttcacgcgtctcccgacacgcatacgcacagtcctgaacgtatgtgactgaaagttaatccccccagaagtcccagtttgggttccatcaagctgtaagagctttcgtctcaacacaagtcaggcctcttctttagcaaatggctgagacggggctagggaaatcttgatcacacccattaagtgattcgaaagcgttgcaagtcccctgagcctggtacagcctggacccgtgtttctaggcgaatggatgagatattctgtcttgccgtgtgctaaattggacaggttcaggggaagataatttgtataaaaaggtagttctttactgctaactgccaaacttctgcaatcaaaaacacccgtagcagtaacttgacctaggttaaaaaagtgtgtggatgacaagctcagaaggaatatacaagcaactggaacaaggctttg

SEQ ID NO: 7667 - DNA, 1366 bp, Artificial sequence
  DNA replication origin
gtaggactcggggccgacgccgcgggatggggacgcggcgcggggagtgaggcagtggcggcggcggcggtaagcggaacttcggcccgaggggctcgcccgctcccgcctctgtcttgtcggcctccacctgcagccccgcggcccccgcgccccgcgggacccggacggcgacgacgggggaatgtggcgctggatccggcagcagctggtaggtgcccccgcccctccacctccattcgtccgcccccgcggggcctctcggcccggggtggcggggaaaggccggcggcgcggagccgggaggccagggcgtgggcgcccggctaggccgcagcggagacgggcgcggggcccagagccggagaagccccgtgcggctcccgggctcgtctcgcctccaagcccgggccgccgaggctggcgccgagcggccggaggcggccgcttctagccggcgcttctccgttacttcttcccccttgccgctccggggctgctgtggccagaggcgggagtcccgagcggggtggcggtgcccccagaggaaacagggcgagggagctgagcgagagtaggtcttggggagatgagagaggcgtgctcttcctgcctcgaacaatttgggacgtgtttgggtgaaggggaagcgaagaacctgtcttctgcccccactcgtcacggacttctggaagcgtgtcacgatccagagctgtgttgattcccgaggaggaggctgtcgtaggtgtctagccccctcagcgagagacgtttctccccaggacctggaaaggggaaagactgtgccagctgccggtctagcttcggaaacgatacgtattgtacgatagttacgaacgatacgtactgtcgtttccttcctacctcgtcctcaccccaccccgagtgaaacttttcgagtgtgaaccttacttttttcccgttctcctcaaggcagtttgaacgacacaggtttggaaggaatagttaactctccagtattattggaacatctggacaccaccaacaaaaaatcttagaaaagggtcatttaaggcctataaaaagtgccacctttcccagaattaattcagagagaaaaatcttatctgcctcctggcagctacagcgcagaaagtacagcattaaggcagctgtgacaattaggacagaaattgcccctggctgaagaagcctaaccttatctgtgtgatgaggccggttactatttaatttctaaatcgcattaacttaatgcttctacaagttggcgttttcatttactaattctaaaggcagtggtaaaatttagtgaaacaggaactatttttgtgggacgaaagcactgataactctttttcccttc

SEQ ID NO: 7668 - DNA, 872 bp, Artificial sequence
  DNA replication origin
tccgctcccggctccaataccccgcaagtctcccaggcagttttgcttggggcggggtatcagcccttttcctttctccatcacctctcgaggcgtcccatgcttttggagaaggagagtttccccggccagttggtggaggttatatttacctctctactgaaaacatgggagactgctgagcttgggggagggggtacggaagtgcaacctgttctcatttcataaaattagggaacacagactagcgagcgccctttcgagcacctattttatttgcttgggggtgggaggagtaattgctttattatagtagttaagggccatttgtgattttttttaaaacagtttgtcaagttactctccttttttgtttgggggggggaaaaagtcctctccaggcttgcagacccttgtggtcgagttgtttactttggtaattaagtacctgactctgctggacgctcttcgcgtttcagaagcgctgtttggcattgtacagtctgagcgtgagttgaattccgtgcaggttactgtatgaatagtaaaaatgatattgttgtcctttgctcgtggggaacataaaggcctctttgaggagggtgtgtgtgcgcgcctgtgttaagggaatgctccagtgtctttgtttttagttggtcttatttttgctgaatgacacttctagtcccatcctccagcttggcagtattttgttgtcatgtatggatatatggtttagtctgacacatatttaacacttatgttctgtggcaagttgtgtaggaatttacagtttgaattggtaagaaaactttaaagtgcaggttaatgtatagattagtattacagtgttcagagatccaccaggcagt

SEQ ID NO: 7669 - DNA, 922 bp, Artificial sequence
  DNA replication origin
ggccgccccgcactgcgcatgagcgggagccgggcaagcccgtgagaggagccgccgccgccgccgccgtccattcgctgcggagccggaggaggaggggagaggcctggaggacaccaacatggtgaggcactgcggccgcccgcccgccctgccggctgggggccggcgctgccgcgcacccccgccccggccgccctccgtcccgcggcgaccctgcagccccgagcctcggcccgcggcctccgtcccgctcccaggcgggggctctcctgcctgcctctcccttcctccttcgccccttcccgcccgggcgcagccgctacgcgagagccgaggaggcggagcggagccgggcctagtcgggagccccggggagtttggggcgcggggagcggccccggtgccccttgccggggcccggcgcgggtgggggaggcgttggggcggggggaggggagggggcaacggccttgcccctgcccctctgccggctccattgtgtctggtcggggactggggtctggggttccgggtgagtagcctccccccgccccgaagccggggcttccctctccgcccggccggggagaaggaaagactttcccggcgcgcctctccctcctccgctcccggctccaataccccgcaagtctcccaggcagttttgcttggggcggggtatcagcccttttcctttctccatcacctctcgaggcgtcccatgcttttggagaaggagagtttccccggccagttggtggaggttatatttacctctctactgaaaacatgggagactgctgagcttgggggagggggtacggaagtgcaacctgttctcatttcataaaattagggaacacagactagcgagcgccctttcgagcacctattttatttgcttgggggtgggaggagt

SEQ ID NO: 7670 - DNA, 1341 bp, Artificial sequence
  DNA replication origin
cgcctgggagcgggacggaggccgcgggccgaggctcggggctgcagggtcgccgcgggacggagggcggccggggcgggggtgcgcggcagcgccggcccccagccggcagggcgggcgggcggccgcagtgcctcaccatgttggtgtcctccaggcctctcccctcctcctccggctccgcagcgaatggacggcggcggcggcggcggctcctctcacgggcttgcccggctcccgctcatgcgcagtgcggggcggcccggcgcggcccgaggaggcagccccggacctcggggaggcggagggacggaggcaggcggagggcgccccgcgcggggcttcccccgggcgcgggggtcccccggggagtgggcgggggcggggggcgcggcgggggaggggcgggcgacgcaagccctccgcgcgccgacatcctcctgccgcgccgggcggtctctggtgggggcgccgggggacaccccacctccgtttcctacgcggttccttccggacgaccacggccgggtctacgcaggctggaagcgggcacgagcggcggcggataagttgagcagctgggggcggctgaaacggatggttgaggagcttcatccatcccagacctcccctccccatcagtatcaaaaaaagggagaagatagtggaaacacctccccctgccccgtgttttcttctttttccccccaatctcagtatcagacctacatcagttccctcgcgtgggcatcccaggggagaccttagtcccccccctgcggtggctgtcactccattagtgaggaccaggctctccccagacctgtctactgggagacagttggggtaaccctatagtgagatggggtggggtgcactgagacccaaggccgggctgcgggagtccaggttgcctgcctactgctagctctcagtatcccctcagttcggcccgcccaggataagtttcgggaagcaactacacattttttcactgagggtctagtcacgcagggcggacagtccaggtgtgacctgccctgggcgttaaatcaactgaggctgaggagcactaggattctgagctgaggatcaagtggacaaattcgtgctgcaaggaggacagaagactcctgtggagtaagtggtccttgcccttcagaaatgtagtatccagttggagagataagacaccttcacacaggaaggaaataaaacagctaagaaagcaaactcactcagaaagtcacatctgaaactgtaccaagagcttacctacgtttcagaacaggacccacctgagtagacccgttatcaccatcatcaccagcacaggcatta

SEQ ID NO: 7671 - DNA, 1314 bp, Artificial sequence
  DNA replication origin
cggagctggctccctcagcttgcagggaggtgtggagggagaggtgcgagcgggaaccggggctgcgcgcggcgcttgcgggccagctggagttccgggtgggcgtaggcttggtgggcctcgcactcggagtagccggccggccctgccggcccggggcaatgaggggcttagcacccgggccagcggctgcggagggtgtactgggtcccccagcagtgccggcccaccggcgctgcgctggatttctcgccgggccttggctgcctccccgcggggcagggctcgggacctgcagcccgccatgcctgagcctccccccgctccgtgggctcttgtgcggcccgagccttcccgatgagcgccgccccctgctccacagcgcccagtcccatcgaccacccaagggctgaggagtgcgggcgcacggcgcgggactggcaggcagctccacctgcagccccagtgccggacccactgggtgaagccacctggactcctgagtctggtggggacgtggagaacctttacgtctagctcagggattgtaaatacaccaaggtttgtaaacacaccaatcagcaccctgtgtctagctcagggtttgtgaatgcaccaattgacactctgtatctagctgctctggtgggggcttggagaacctttgtgtggatactccgtatctagctaatctaggctaatctccacgtctccaggctggggacgtggagaacctttgtgtctagctcagggattgtaaacgcaccaatcagtgccctgtcaaaacagaccactgggctctaccaatcagcaggatgtgggtggggccagataagagaataaaagcaggctgcccagagcgagtagtgccaacccgctcgggtctgcttccacactgtggaagctttgttctttcgctctttgcaataaatcctgcggctgctcactctttgggtccacattgcctttatgagctgtaacactgcaaaggtctgcagcttcactcctgcctgagctagtgagaccaggaacccaccagaaggaaaaaactccgaacacatccaaacatcagaaggaacaaactccagacgcgccaccttaagagctgtaacactcaccgcgaggatctgcggtttcattcttgaagtcagtgagaccaagaacccaccaattccagacacaaaacctcgtctctactaaaaatacaaaaaatgagctaggtgcagtagtggatgcctgtaatcctagctattcgggaggctgagccatgagaatcatttgaacttgggaggtggaggttgcagtgagccgaga

SEQ ID NO: 7672 - DNA, 1425 bp, Artificial sequence
  DNA replication origin
cgggcgctctggagccgaggagcgggggcgtccgcagggaggtcagctctcctgggcggaggtcctcgggcgcagcgccctcgcctggaaaccagccgtcgcccccgcaggagccagccggcccgtggacgccccagcgcgctcctcctcggtgctgcgggtcgccctgcaattccgagaagaaagtcagagacgccgtggcccaaagaggcgcttagtctttcctcgctcacactcacgtttcctcctcatcgcgttcttctttttctccctggctgctttctcccctctccaggaaagcagatttggaggaacaggtttcgtgactgtcgtccgactggaaaaggcccgcgagctggaagggaggggacgggtgcaccctcagagttattgctggaggctgtggccagaccgggcaaggtggtgactcccgctggcaggctgaggcccaccccagccctcccacctgggccacggggctctcagcgggagccccagttatgaccggacaccagcgcaccgccaaggagacagccacgtggggacatgctggactaggagggtcagagccagtttgagggtctggtgacctcggctccctggcttaaccaggtccttatgggtgagaatcctgaggagggggagagggatggaggctagggacaggaggcaggaggagctgatgaataggaaggagggaagaagatgaaagaaacaaaagggaagtaattacactcagagcactgctctccttttccatgtcttctgcgccttcacagtcttcaaaggtgtccatggagctaaactccctgctggagcagccttagggagagaaagggaaggatggggcctctgtggggtgggaggacatcccctctgcccatggcagggtgtagcaggcagtgcctgttgcaggcacggtcctccccatctctaactcctgctctccaagggcctgcactgcgctgggctgtgagggggtctgtgatctccaggctgcttttccagcgccgagatgccgtaattcaccgagaaggcgcgtccacatgctgttcatggccctacctccccgttcctccaagaaaacagtcattgttttttgtgtttgccagtcttctaaccacgcctccttcccttcctcctcccctgtctctttctcaccctcccctccttgcctccttttctctcccctaattaatgtccatttcccatctccctggcagcctctgccaagtgtcactgctccccataagggaaaatcagaggaacaagcaagtgcatccatcctgcctctctctgcagtgaactgattaattaatccatcagtcttgtctatggcgcacatgttacatccctggggcggtgttggacactgtggggaacagcagccactgccaaatactgaacaactgccctgtgcctggt

SEQ ID NO: 7673 - DNA, 1366 bp, Artificial sequence
  DNA replication origin
tcgcccggcgggtggcgccaggacttcaggtgggaacgcgcgcttgggccgggggcgcgtggctggcgtggacaccggatcggggcccgccgccctggcccggaccgcgcacggcccagcgccgggaagtcgggaagccggggaggcctctcccaccgcgggccccggcagcccgccctctgaaagcgcggcggagaaggaggctcgtcccctccccggaacgcctttgttccctccggcctgcccgcgcgggtggccagcggctgggacccaggccgggccgccgcccaggtgcggcaggtaggctcgggggccgggcagctccggttggggcggcttcccggggcctgcgggtccccgtccctgaggagctccggctcctcggtggcgggacaggcccgtgcgcgggagccgcgaggcgaacgccgcgcccaccaattcggttgccggccgggggccccaggcttgcggccacccgcctccggctggagggctgaattcgagtcgaaagcccgtgtcgggctggaaagaagaaaccgccaacctgagaacgctttcggcgagttactggcgggggaaatggggacagggaagtgggcaggcggggagactgcagccgcagatctccctggcggggaggtcgtggccactctttcctttgactctgcctcatttcattttgaatcctgatgtgacagaggcaattgcttgcttggataccatataggtaaaagtaacagttttcaactcgactcttgactacaccctgtacattcttggccggtgttggttttcttaggttatggatcatgttaaaggtacaccgatgtggtaaccgcacagtggccgatggtggcctgaggctcatatttatggtaattatctgatgaaagtacatccatcagaattggatttgtgcgtctgtgcctttattttgggaaaccttgcctgttccctgtgggggatgggagaggaatgtgaaaagccgaagttgacccagaaaaggatgattgaaggtagttgtattaagtggtggcaccgaaatgattccaccctgaactttctgaaagggtgattagtgatcagcagcagacgttataactttctcaaaataaatttatggtagattttctatctggtcacaagtgaggaggtgaaagctgctttttggggccaactctttgcttttaaagcaagctaaacgcaataccagaaaggtttccattctgtacttaacctgcttgtccttctcactcttccttatcctcccgcacacgctctgagcattgactgagcactctgaggaggaggctgactcaggctgacccttcccggccctgcaaggctctaaggtagaaccagtgtt

SEQ ID NO: 7674 - DNA, 887 bp, Artificial sequence
  DNA replication origin
atttttcaaacattcttgagatttgttaggctggctttgccccagaaaaactgactaagatacatttgaaatgttgcattatgttgggtgggcttcatccacaaatctgttattagaaacccatatgcagttggtcgtgtacgttcatgggttccgcatcctcagattcaaccaactacagatcaaaaacatttgaaaaaaaaatttatggtcgtgtctgtactgaacatgcacatttttttcttgtcattatgcactaaacaataccgtgtaacaattgtttacatagcatttatattgcattagttattataagtaatctagagatgatttaaagtacatgggccaggtgtggtagctcatacttgtaatcccaactacttgggaggcggaggcaggaggatcatttgactcaggagctcaaggctacatgcctctgcactctagcctggacaacagagtgagacccatctctaaacacataaaaataaaaaaaaagagtacatgggaatattgcataggttataatataaatgctgtaccattttatataagggacttgagcatgcatggatatcaggggcgggggggtggtgtcctgggactaattccccaaggatactgagggacaacaaactatggaccccaaaccaggtgctctgtgaatgaagagctttcctctgagatgagggaagcagggagaagatggaaactggggaaggctttgtgggagaggtggcaaatgagcaggagctagaacagaattcaaatgtgggtttggggaggaaaggaggaagacacagctcagaaagagaagtctacagccataccccgctgaatgcacctgatcctggctgatctcagaagctaagcagggttgggcctgg

SEQ ID NO: 7675 - DNA, 992 bp, Artificial sequence
  DNA replication origin
tctcgtttcttgcctggagagccaggaagagggcgagggcagagcatccttgggcggagatgcctttaaaaaatcatccaccgcagcggtagaaacagttttgtttggctttatttatacggaatggtttttcagtgaaatgctgtcttgcttaaaagaagagatgcctccccaggagctcacccggcgactggccacagtgatcactcatgtcggtaaacgaagctttaatttttcctgcgttttattaatggcgggtgaggatggtctctgggcttcatctggctcctggcctcacccgctgccccggggcagcgcgcttcctggggggttgcccggcatctgggcctcgctgctctgggtcctgcctgcggtgcccagcggggggcatccctggggcgcgccgctggtgggggtcggggggccgaggctggtgccttcaccaggtggttgccgagtccgttgagctccaaaccgagggctgctgggctgttaccatccgttagctgcttctgacgggagtagggtgggtgggaagttatgttctggttttggggatagtgagaaaggagagggcataagaggaacgaatgccagtgcttttcagcagaaatgattgccacgccactgaaggcttgtttataagaaagtgcagggagaggcaggttacatgggagcgcccctgcgcagctcggccgctaggcctgttttactgtgctgcctggagggttaagcacacccctgatgatccccgcgagaaatctctgcaagccaaggagactgagcaattttaatcttcttccctgagttgaaaagaggagcaaaacatgcattgcttgctcctgaaataagggttgtgatggaacgtcaggccccacagactaagtaagggcaagaggacattgagacagttcccagtcagttttttcttagcactttcttccccttggccttccctggacctccctcagtaaagacacacattcaggttc

SEQ ID NO: 7676 - DNA, 1351 bp, Artificial sequence
  DNA replication origin
ccccacctccctcccggacggggcggctggccgggcagaggggtcctcacttcccagtaggggcggccgggcagaggcgcccctcacctcccggacggggcggccggccgggcggggggctgacccccccacctccctcccggacggggcggctggccgggcagaggggctcctcacttcccagtaggggcggccgggcagaggcgcccctcacctcccggacggggcggctggccaggcggggggctgatccccccacctccctcccggacggggcggctggccgggcagggggctgaccccccctcccccctcccggactgggcggctggccgggcggggggctgacccccccacctccctcctggacggggcgaccggccgggcagaggggctcctcacttcccagtaggggcggccgggcagaggagcccctcacctcccggacggggcggctggccgggcggggggctgaccccccccccacctccctcccggacggggtggctgccgggcggagacgctcctcacttcccagacggggtggctgctggacggaggggctcctcacttctcagacggggcggttgccaggcagagggtttcctcacttctcagacggggcggccgggcagaggcgctcctcacatcccagacagggcggcggggcagaggtgctccccacctctcagacgatgggcggccgggcagagacgctcctcacttcctagatgggatggcggcggggaagtggcgctcctcgcttcctagatgggatggcggacgggcagagacgctcctcactttccagactgggcagccaggcagaggggctcctcatatcccagacgatgggcggccaggcagagacgctcctcacttcccagacggggtggcggccgggcagaggctgcaatctcggctctttgggaggccaaggcaggcggctgggaggtggttgtagcgagccgagatcacgccactgcactccagccttggcaccattgagcactgagtgaacgagactccgtctgcaatcccggcacctcgggaggccgaggctggcggatcactcgcggttaggagctggagaccagcccggccaacacagcaaaaccccgtctccaccaaaaaaaaacgaaaaccagtcaggcgtggcgacgcgcgcctgcaatcgcaggcactcggcaggctgaggcaggagaatcaggcatggaggttgcagtgagccgagatcgcagcagtacagtccagcttcggctcggcatcagagggagaccgtggaaggagaccgtggagagggagagggagagggagagggagagagccaatctttccatatctttatatt

SEQ ID NO: 7677 - DNA, 976 bp, Artificial sequence
  DNA replication origin
cccccgcccggccagccgccccgtccgggaggggggagggggagtcagccccctgcccggccagccgccccgtccgggagggaggtggggggatcagccccccgcctggccagccgccccgtccgggaggtgaggggcgcctctgcccggccgcccctactgggaagtgaggagcccctctgcccggccagccgcccggtccgggagggaggcggcgggggggggggggggggggtcggccagccgccccgtccgggagggaggtggaggggtcagccccccgcccggccagccgccctatccaggaggtgaggggcgcctctgcccggccgcccctactgggaagtgaggagcccctctgcctggccagccgccccgtccgggacggtggtgggggggtcagccccccgcccggccagccgccccatccgggaggtgaggggcgcttctgcccggccgcccctactgggaagtgaggagcccctctgcccggccacgaccccgtctgggaggtgtgcccagcggctcattggggatgggccatgatgacaatggcggttttgtggaatagaaaggcgggaagggtggggaaaaaattgagaaatcgaatggttgccgggtctgtgtggatagaagtagacatgggagacttttcattttgttctgtactaagaaaaattcttctgccttgggatcctgttgatctgtgaccttatccccaaccctgtgctctctgaaacatgtgctgtgtccactcagggttaaatggattaagggcggtgcaagatgtgctttgttaaacagatgcttgaaggcagcatgctcgttaagagtcatcaccactccctaatcttaagtacccagggacacaaacactgcggaaggccgcagggtcctctgcctaggaaaaccagagacctttgttcacttgtttatctgctgaccttccctccactattgtcctatgaccctgcca

SEQ ID NO: 7678 - DNA, 1085 bp, Artificial sequence
  DNA replication origin
cccctcgcctcagaaaggggccctgtagcccagctgcagcctctccgcagaccgccagtctggctctgagaggccggccgccgctggctgccctcccgcagacaccccggtggtcaggaccgccgtcgcccctccgcccccgaggactcagactctgaccggttcctcgcctttcggccggtcccggagctgtcacccccggtacctctcggcgaacactggaagcagccagcagtggctaaccccgcggtccctcagcggcgggcggcgcagcgcactctccagcgccggcgtctcctccagccaccagtctctgccgcagctcacaacaaaggaaacatgtgaccgtccgggccaaaacactgagcgtcagcgaaccctggccaatccgggtgggcgtcctccgccccggggaaccctgggagatgtagttcacgcttcccggtggcctccggggccacctggggctcccgccgtggggtgggtgtcgggtgcccaagaggacgagacccacccaaagggctgctgactcaaaaacaccttgttttaagcagagacagttaaaaaaatgcctcttgtgtaaggagccgagtgagaagccagagtcgtttctttccttccctcaaaggcccctgccacgtcccaaggaaaaagcccgcgatcagcccttcgactttaaagcttgggtcgaagcttagagagctttttatttgaccctttgatagacaatcggaaatcaggcctgagggcctgcagggtggacgagactaaaaccccagtccttagaaggagcaaggaaaaccacctctttttttttgataaagctgttactgtccctggtatcaaatcctaggttacctttttattttaaacgcacatgcacgtcgaccaaagctgtcacaaatccctgttttccaaggtagatggagttcctaaaggacattgtgttgtcgttttgtgtctgcaagctttttgttttgtttcgttttgagacagagtttcgctctgccactcagggtggagtgcagtggcgcaatctcggcccactgcaacctctgcctcccgggttcaggcgattctcccgc

SEQ ID NO: 7679 - DNA, 771 bp, Artificial sequence
  DNA replication origin
gagacgccggcgctggagagtgcgctgcgccgcccgccgctgagggaccgcggggttagccactgctggctgcttccagtgttcgccgagaggtaccgggggtgacagctccgggaccggccgaaaggcgaggaaccggtcagagtctgagtcctcgggggcggaggggcgacggcggtcctgaccaccggggtgtctgcgggagggcagccagcggcggccggcctctcagagccagactggcggtctgcggagaggctgcagctgggctacagggcccctttctgaggcgaggggcctccagggttcacctggggggtcttcctcccccgcttggtagctacagccctgagggagggcgcgcgcgcctcctggcactacggcccggaaccgcggcgcggctggtgcggcctggctagggcggggtggttgccgggactgggggtagccgcaggtgcggtaggctagtcgccgcggggccgggcgccgccgggggaggcggctgggcagacgggtgctgcttgttgccgatgggctgcgaacggggcgctgctttttatttcaggaagcccgggggagtgcgaccgcctcaaatccagccttcttgtttggtgggacgaccgtcggttctgtccgggaggaatgacggggtcaaggtggggtccccagggccgcgggcccgtgaagccccattaaagcgattgcgaaatgcactcggcactgtcacctgaccgttacccccgcccccgtcccctgcgagcctttgtttac

SEQ ID NO: 7680 - DNA, 989 bp, Artificial sequence
  DNA replication origin
gcggctccccggcccgcacctgggatcctccctgccctcccctcggccccggggcctcaccgggtcccgctgccgcgctgcctgccgatgggggaggggcgcgcacgtgcccgcgccgcccccgcccaaacaatgccccggagagcggggcgcgctcccggccggtcccttcctgcgcccgccaacactcaccctttctccgggtctccggctgcagcgcgggccccgccggccgccgcgagagagcacggcgaggtgagagagcgggcgaagccccgcggagctgccccgccacaaggccccagcgacccccgcaacctgcggaagcacacggcgcggtggagcccgcccggcgcgttccgccccgcacgtcagcagctgggcgcgtcggggcgcgcgcggcggcgcgcgcggcctcggggcggagctcccagggatgagggcggggcggggcggggcggggctggtccgggctgggaccccggcccgcgagggcacttcctgggcagtgtgggcgtcgattcttgcaaaggcacagtcgtccatcactttcctgccccagaagatggcgaatttcaaccccaagtttgacagaatattcattctgccggcgtgtatgagcttccctattaatcacaatagtgactatgatgtttgtgtgtgccatctttgtgccaacccatgtgctaagtgctgggtatacaaaataacagtagttatttctagcccattttacagatgaagaaactgaggcagggaaggcttgagacttatctcagtcacactagctagtgacaatccaagtccagttttccacctaaatatcacttgaggccaacattctctttcgttgtaactctaccaccctacccaagaccctgtaatctctctgcccaagactatgaatagcctcccaactggtcttggggaacttctgttccccttcaatcccttctcactgtataacgatttactactggagctgagtg

SEQ ID NO: 7681 - DNA, 1665 bp, Artificial sequence
  DNA replication origin
ggccggggtcccagcccggaccagccccgccccgccccgccccgccctcatccctgggagctccgccccgaggccgcgcgcgccgccgcgcgcgccccgacgcgcccagctgctgacgtgcggggcggaacgcgccgggcgggctccaccgcgccgtgtgcttccgcaggttgcgggggtcgctggggccttgtggcggggcagctccgcggggcttcgcccgctctctcacctcgccgtgctctctcgcggcggccggcggggcccgcgctgcagccggagacccggagaaagggtgagtgttggcgggcgcaggaagggaccggccgggagcgcgccccgctctccggggcattgtttgggcgggggcggcgcgggcacgtgcgcgcccctcccccatcggcaggcagcgcggcagcgggacccggtgaggccccggggccgaggggagggcagggaggatcccaggtgcgggccggggagccgcagaagcgggagcctggaattggaacgtgagttgggggcttcctcttcagcggggcgctgcgctgaggggatacgggaccccgagccacagcggccggagcttttaggatgttaagctcttggccttggaggcaagatttggccccagcaccagaaagtcgtgggtttaccgaaaggatcctggaatgcccctccaacctgtcgccatccccaccgggcctccctgggatggaggggaggggtcagagaggctttgggggtccagggatggggccggggccaacgcgccggagctgcgggcagtgcggggcggagtggaagcctcggaaagtgaggactcctgcaggaaaggctggcttgaagggctgtggccagactgcagaagacaatgaggttttctccatcatgaatgtgattatgttaagaaatagaaaccagaggaagagaaatgccatcagcaatcttacaggcctgacacatcatttttttttagtttgatgttggctagtattttcatctaagcattcagcagttacagagttgacccacgttttccattcccttttctcgctcacatgtaaaaaatgcggtataatattatatagaattcagcaatatcatttcccctttcttaatgagtagagggtattcagcgtagaaaaatttaaaaatacaagcaaagccagagaaaaatgcccgcagttttacgatctagagatactacccttggatgtatattcctgtttgtgtatactctttaaaagatagggcagatgatgccctgataaggagtttagtttttcccgggaagcctttgaaggttttgagaaggcgagtagcatgatccgactgctatgtagaggaagagggctggggaggaacctacgaggtcagttactgtgctctttgcagtagcttggactaggcccgtggcagggagatggggaagtataaacagatttttaaatgttttaaggtagaatgaacaagacttggattggtgagggaatggtgggaatctttgcttttttgatttttgttttgagcaactgagtaggtggtggtgctgtttactgagatgaagaatggaagagagaaatttgaggtgggaaaaacgaattctattttagatgtattaaattttagatgcatgttagttatgaagtcggtgtgttgagg

SEQ ID NO: 7682 - DNA, 1361 bp, Artificial sequence
  DNA replication origin
gcggaggatttgcccctgcggccgcccgcccccggtccgcgccccggcggcggatccttgggcccggcgggcgtggtccacaagccgaagtcccgctggtactgagtgagcggcacgtcccggccggaatcccgggcgcccgcgggaggctggcccctgcgcgaggcggcgccgcccgtgcccggctcctcgctgtcgaggtccgagtagccgtgcagagtgagcggcaccgccacgtcggagcggtccagctggttccagcgccgcgccaggcagcacaggcggctgatacagggccacgccatgccagccccggcgcccgccgccccgctcccggcgcgcggcgctcccggccgcgcctcctgcgcccagcgtccccgcccccgcggcccgccccgcgccgccgcagcaccgccccccggcacgagggtgggcgtcccgggagggggcgcactcggcggcagccccacttggccggggccggctgcgcacggctggagctggagggagcgcggatgggggaaaggctgcaccgtcgccagggggcaccggaaaccgcctgcattcatttacaagtgtccatctcgaagaatgcctcagaattgaatccaaagttccctcagtgtcatcttataaatggccccggcttcgcagaggccaagggcccgatggtcgcagctgggagcagtccgccagccgggaggttctccatgtggcctcgggacgcccagcgactgctgcatttgtgccaggctgcaccgcatggactccgcgggcacaggggcaggtgcagcaatgagggtgtcagagaagactcggggccctgcttcccggagaacacgtgtttcagtcagcctgtgagtcgccgcctatttgcctttaggatgctagtctacatttgtgacaaccaatccacttttcattagaattggcattagccaccaatcgacctttccctgggttctgaaattcctaattttaaagcatggccatttgcaaaagctttagtttgataaagcggccacagaactggccacaaggctatcaagttcctttcctcctgtgcatgcatggctgttttcaggcagagctgttgagggatcctccagcgtaaaggcaggtctgttcaatgcaggacaccgtctcaaacaactccctgaccacccacaaacgcttttctgaatatttgacacatgctctcggtatacactgcagaccaattactaataacactactgagacagcattaattacccagagctccatttcaaggttgtacttggaaggtatccagtctgcgcctgggaggggactgcagcacatccctggccagtcagaaaacagattcatctcccaaaaca

SEQ ID NO: 7683 - DNA, 1113 bp, Artificial sequence
  DNA replication origin
ctggagcaggggcgcaggtaggtgatggctgctgccgcacccctgccctccagctcggttgtcacggggatcacccctttgcatttcctcggggcgtggcgggatgtggccagggctgcgagcagttcgggggacactggagacttggggaacggcgtatggcctccccctggtctcctgccgccgcctcctaggcctgtgagcccggggtctggtgacggggtcgtgtgctggaagacaggcaggtaggatcgggatgagcgggcagggacgcgggctacgtccctggccgcggccgccagggggcgctgcgcccgcgggccgtgggtgtgggtcgcgctcgcctgggcaggccggagcgggctgtgggaacgccctagggcccgggcatcccaggcgaagcgggtctgagagaaacgcccacctgggaggctgtgcagcgggtggctcggggcaccctgctcaacccgcagcggagccgccagcgaccttcgaagtaagtcatccccttcgtttttgcaagcgggtaaatggaggtacgtgacataagcacgcgcagcaaagccgtggctgtgccgggaacgcagcccagatctctccacggtcatccagtgctcttttcgcttctgccacacagagccgcgggtggctttgtgtttatcacacaggggccatttggtttctgcacagacggagaggctggaggcaggtgggcacaggaacgacggggaaagtttcaggaggtcttggaggaggagatggctaggttttactgtggtccgcagcgtgtatgaaaggtgaggctgcttggagacgcaacaagtggattacagtgggtgtggtaaatacgtatccctttagcgtggtgtcttcctcgtgcagcttgagggcctggaggtgatggaaacctactcatgagtgttgggatgactgcagcttgcacacaccagtctggtaatcccgtgcaactctcctcctgccatgcagttgaatcagtatcattgtgcagggagagtgtctacacttttatcagtggaaagagaatcttggtaaaaaagggcagctgactaagtggcctcaaccctattgggcacttctttggggttctcccac

SEQ ID NO: 7684 - DNA, 1037 bp, Artificial sequence
  DNA replication origin
tagaggaggccatgaagagcaggtagaggcggaagagcatggcgtccatcgcgtggctgaactgcaaccacagctccactgagtgctgcttctgggcctcgtgttcccgctgggcccttgtccattctgagccccctgtcagctctgcctccgcagggcccggcatctgccctgctgatacctctggctccttcacacctacagaaagacagagactcagccatgggctgcaaatgtcacctgtggagggagggagacagggaaggaggcaggagcagagaagtggaggtgggggaagaggaatgtgacttccctcaccgggcaggtgggtgggggtgagacccgggcccttattttccttctggggcgcagtgggacagcatctccccgggctgttgcagtggagcagcagggagtggagccaccgaggcaggggtgggggctgggtggtggccacgtgcagcaggtgggtgatgaagatggtctccagcaggctgcccaccatcagggacaggcacagggcgaagtagacacctggagggaaggggggcctagtgagggccagaggcaccacctagaatttcttctcttccaatcccaccctggcaggcatacggcctcctttttccaaaatacctcccttcctgagttagttcccacccttctcttccaaaaggtgggaggagccataccgatgaggggggtgccactggtggggagcaagtcactcatcatgagcaggaagacgttgtagcccagcaggagcgttatcttgaatgggacacgattcccacttttcactggcaggtagaagctgagggcatcgatggcaaccagaaagccactgggcacgagaaggtttatgacatagagactgggcctgcgcctgatggccacctggtggggtaggagagggtggtaagtagttatggggtcagaggaaccctcaaatccaggaatagcagtgacaatttctgtctctgcctttttctttggcctgatatcaccctgggatctggagctgtggggaatgcagc

SEQ ID NO: 7685 - DNA, 1500 bp, Artificial sequence
  DNA replication origin
cggcgggcaggggcagcttcacaaggtacggcgtctcctgcccatccaagtggtagatgatcttggtctcgcccatggctctggcctcgggcccggcggcccgcgcgcggcctgctcgggcggccgggccgagcctcccagacggcggcggcgcgcggcgcggcccagcggctcaacccagctcggcggctgctggcggcgccagctcccttgttctccggccgctaccgggtcccagcgccgcccgccgccgccgcggccgccgcttccgctccccactctcccgactggactggcgaccgcgactcttccggtggccgcggccctcccggcccagggcttcgtccgggcccgctcccctcctccggcccggcgcggccccgccccggcgcgccccgcccccggccgccgcggagaggcgccggcgtcgcggcagatggcagggtttcccgcccactggccgggccgcggcgctccggtcccgggtccctagaaacggaaggggagattcaccgggatggcggcgttcccggacccctgaaggccctgactccggacccaagtgggatcggcgactcctctgcagtccaggaagagtggaatgcagggattgctttggtccccagaaatggtctggggaaagagggtgggtctgactctggatccctggaggagaatgacctcaacatggcccttcagtgtttcttgagaagcacaactgctgtcactgagtctactaaactgatctcgagagaaggacagcatccagttctgattcctccctataaccttagcgtccagttgcaaggtagtggtttaataaatgggttgaatgcggaataagtggggcccgggcgcggtggctcacgcttctaatcccagcactttgggaggccaaggcgggcggatcgcccgaggtcgagagttcaagaccagcctgaccaacatggagaaaccctgtctctactaaaaatacaaaaaaattagccgggcgtggtggcgcatgcatgtaatctcagctactcgggaggctgaggcagaagaatcgcttgaacacgggcggcggaggttgcggtgagccgagatcggtgagtcgagatcctgcctttgcactccagcctgggcaacaaaagtgaaactccatcccccctcgcccccccccaaaaaaaaagataagtggatgcatgcatgcctaagacagtaagtctcaaaccagaactccagaactaggtatagccggttcctcacagatctcctcaccccttaacttttaattcatttaataaatactgaaggcctactgtgtataaggcatatcgcatgagatatagcgatagcgagacagacaaggctgctctcaggaccttccctcagctggagggaagcacataggcttgtaaatacataacttcagagtgaccactgctatgaagaaggtaaaacaaagtgatgggatagtgacaggggaagccaggcgcaatggctcatgcctgtaattcc

SEQ ID NO: 7686 - DNA, 1476 bp, Artificial sequence
  DNA replication origin
atcattatcacaccaggagcaccccaccccagggcaggaacaacaacagaaacaagaatagttagaatctacaaagcactgcccactgtacaaagcactctcacacacatgatttcaggggctcatccaaccctgagttccagggcagaaggtgacagcaaaacatgccaggcattagacagaaggtgcttgcttcctagtgctaggtgggccaggggcttgggagagaagccagacagatgaacactggggagaagaatgtctcctcttggctgtggggcctcagctccaaagagcagtgcaggcctcaggctagggctggagaggcagccttcaggcctggaggggccttccccaccgcctccaggcccagcgcccagttagtgaggcggcaggcaagtgtgggcgcctccccctcccccagtctcctgggagttgggggggttcgagggggatcagccaggcccccctcttcccaggccagctgcttcagaaccttccggctccaacattccatcccctcttaaagggaaagtgactgcttccaaactgtgcctgtccagatctctgcagctgggtggaagggaagaccccaccagggaggggaagatagagaacaccaagaaactcttcctggctatcccacccaggccccaggcccttcctaacgtctctccactggccaccaactggaggaaaaaagcccgaattggaggaaagatcagcacctgggtcagtgaggactactccgcaggggtcaggctctctgttccggtgacaacacccacaacagcccacaaaggagagggcaggcagctagataaacatcagatctgcagaccccgctcgcggccaggcgcccgagcacccccgacacccctcccccagctcaaagtcccagcagagccctcagatgcagcatactccaaatatggctgggagctgtgctgctgaaaagatgaagggggcgaagaacgagggccacacgacccaagtctgtgcggaaaaaggtggctctggctcctcggcaggaggaggatgggggactcgggctctgaaactaggtggagggggggtgtgtctgtctctgtgggccactggtctctgaagaggtaaggggaccgcaccggcaggaactctgattgctagtggggaattggacgtccccttaaacaagggaggccaacgtcccctcttcagaggtaaacgggagttgctactggggctggaaccaaaggggcccaaatgggccgagtcgcccctagaagtcagagcggggctaggagccggtgtagcgaggcaagtcgaaacggaccgcgtcatcccttagaagccagagcggccggggctcccggaggcggggcgggggccatcctcacccgaaatcgtcgtccatagacttgaagaagaacttatagctgggtcgctgcaaaacgcccttaaagtccgccaaggtgacgcgctcggcgggcaggg

SEQ ID NO: 7687 - DNA, 1016 bp, Artificial sequence
  DNA replication origin
ggaccgtagctcgggtgtgtgtggtggctgcgaaggctgctggccagggaatggtggctgcggtggctgtgctcgctggccgccggccctgagcgctcgctgggcgcccgctcccgcggcccccgcaggctgctgcgtgtggtgtggtccgattcgctgccgctgcccccggacttggagtccccggccttcgggtccttctccttcctccgatcgctgccgctacggttggagccactgctccgactgcctgtaggaggcaaacagggccggggtggggcaggctgagcgggcgggggaagcctggggcccacctatagccttcctccacggcccctctaccttaccttcgctgtgctgactgctggcgctgcccccgccgtagctgtagcccagctccgggaagcccgggtgcgggttgtatgggtgcgggggtggcgggtactggtacgggaaagccatgggccaaggggcggcccccgggtgcggcaaaggggccagtgtgtcctggtcagaggcgccactggagccatcgtgatcgtggagagacaggttggccatgtctgtgaaggggagggccggatggagctaggtctttccggagagaggtccctagcctaggtcaggtgggctctggatgagagagaccgtggtagtttctggctagaatgagaggaggcacagcccagagagctccccccttctgcagaccccctttgccaccaccagagccagccccggggagacccttctcaggacaaccctgagtcatcattctaggttctcagccaaagctgtacctcccaatcccttgaaggccctggccaagcttttgcactttctctgctggcctcagtgggctagaagcggcaaaactctttgagacggagtcttgctctgtggccaaggctggagtgcagtggtacagtttcagctccctgcaacctcttcctccctggtttaagcgattctcctgcctcagcctcctgacagggttgcaccaccacacctggcta

SEQ ID NO: 7688 - DNA, 1520 bp, Artificial sequence
  DNA replication origin
gtcctggaagtctccttgcccaacctcaactggcctgtgggctcctgtgtccttgctctgggatgccatggtgaatgtgaaaacaggggaggttgtgtgtgggggtgggaatggcctgtcggttgcaaggcgagtcctttgctgagcccagcctgagacccagcttatgggctttatccaggtgagaaaatgctggggacatgtgtgcgaggtttaaggtctaccaggaaggggagaagggtgtcaggggaccagccccacaacctaggagaggattaggagggtccagccctttgggcagggaccagccctgaggcttaaatgaacttgcataggcacctgtgtatgcatctctgtgcatgtatgcatacatgagtgagagagaaagataaagagagctaaagaggcccccctccccccgccgcaggctgccacacgtggtgcgatccgattctctctggaaaggaggagagtctctcatgcatgggtgaagttgggccctccccagaagcctagtgactcattatgttaacgtgtgggtgtgggggctggacatccttgggaagccctgaggggctgctgaagcagggttcctggtctcctcggaggctgggcctcccctcgctgggggctcacagaaagtcaaacagcccgaaattcttggctgctccaggcccagggtaaattgggggaggaaaaaagaaagaaaagaaatgtttcaggcctggaggtgagatgagcctgctggttagtagggttaggggtctgaaggaaccagcacgcagggcaggcatggggcaggggtagagcagagatgctccctggaagccaccagctgctcaggcaactgagggggccctctgggcctctgatctaggcacaggcagggatggcatggatggctattggaggcgactacagctttaggttgcaggactgaggcagcaggcagggggatggttagtaggggcagatgaagcaaatatattttggtttcagtaatgtggggtaaagtcaagaggtttgcacacgtgcctgatggggtggggttaatagagggatgatgtagctgaataaatggtgaaagggagctaaaggggaaacgagagaatgagggagtgagcgtgccaccaaggtcattgctggggtcaactcccaaaatgggggttgcagaggggagtaaggggtagcaccaacaagtctggtcccagagacaaaaggggtcctgggaagtcctgcgcagggattagtgggcagaggaaacgaactggggccagaggcaggttagggggctgcagagccaatcggtaggtgcaccccaccctcgcagcaccctgcgagcagttagcgcacctggatttagttccttttatttccctttcaggtaccagacaaagtaaaaaagacggacggatggagagaggaacgcagccggctggggtgggagcggaatggagctgggggaggggccctgctcacatcacatccacaaagaactcactggggtttcccatggccat

SEQ ID NO: 7689 - DNA, 1705 bp, Artificial sequence
  DNA replication origin
ccctatgctttttgtggagccattcacctgtctctccctccatttgcctcagctaaggagaccttcctagcaagatctcagggttggtccagctttgcagcaaagtttgacttctgccagtgtgtgtgtctggtctctgatagggatgctatcttcctgggaggctgtcttacatctaagctctcctcaggaccaaacagaaggacctctttttccatttccatgtgtcggagacctccctaatgactgctatttgcaacctcatgtttgtccaagggctacatgtagctcttggttcatttgtagaaggggcagagcacaaggtgcttgtggaaaggtggccactgcctggacctttgtgaggccctcagggccagggctggtcctacctgaggccctggatcacctggagggaccatcagcccatccactgtttctccctaggcctgaaagagggaccctcgttcaggatgaagctgagaacagactcagtagagaaagggggagagaggtgaatggaaccatgacccaggtagtatggaaagagggctaggacccagctggagctccctgtgtgttgggtacgtgtgactgtgtctgtgctccctgtatcattcctgtgcatttccacccatgaaattccctgggaaaaggtcaagctctctccaccatgctaagtagggtgagcaaaggagatggttggggttgagggctcagatactcaaggaggcagggatcccccggggggatgatccctggtgatagtgattgaaatcagaaggagagagttaatgcggaggagtgagaaccatgggcccgactcgaaagctcacttcctactggctgtcctccatccccagctctcctcaagctctctctgcagaatctcagtatggcatctgccaaaaagcttacatggatgatccccaaacatggtcatctcctctcacttccccagggctctcagactcttccttgggggacctgggagaggttttccggaccttcctactttttgacagcataacactgtcaagcacatgcaaagtctgccaataacaaggggccctcctgacaagcagagatgttttctcttcagggctgcggtgatgggtgggggtcactgctatgaggggacggtctgcagccataagaaggctcttcaggctagaaggcttcactcccaaggcccgcacagctgaagagaccaaggggttataggctgagggcgctattgtgcacaccctcccaccccagcagaagtggttggcactgcagcgatgccaaggccggctgcttgggggtgggaggaggtcgctgcagtgatgaggaatccctgcttggagtgagtggtcactgaagtggctgcatgaactaaaagtacctgcagggatgggggaggttttctgcagtgatgaagagcactttgcaaaggaaaggggccagcttcttgggggaagagtcctgcggtgacggtgatggggggctggggggttcgctgcagtcaggagggagggtctctgcagcgatgggaagcaacccagggcagggggtggggtgggctggggaatgggatgccgtcgtggtaatgggatagctggggtcgcggcagtgtcggtggcacttgcaggacgcctgattcctgaagaatggaaagggtggggtctctgaggcctcggtcctgcagtgacggggatccgtgcgg

SEQ ID NO: 7690 - DNA, 770 bp, Artificial sequence
  DNA replication origin
ccgggcatggcgccgggaggccggccctgcgggaacgggccggggaagctgggcgcagggtgacgggacgcccaccccgcgctccagaggccagcgcgagagtctcactccagcacccggacggggcctgccggggcgcgaggccgagcgggagctcctgagggcgacaggtggcgggggagataagggggcggcaggcgtggtggcgaggagggcatcctcacgcgttacctgggcagccgggccgcggagggttaatgattaacgcgcgcttcggcgcccagcagtcccgccgcggctcccccgggggtgggggcggtcacagctgttccaccgcccactcccaacctcgcagccacccccgtacctgccggccccccggggccccccgcggccgccagctgtcggaagcggcgcgggtggagatggaagatgctccgggaaggcggaggtttaaagggcccgaatccccccggaggcccccggccctgcgagggatcgcgggggcagggtggatggggcgccgaaagggccttggtctttctctccctggtgcctcatccgacgggggtgctggccggagtggaggggttaagggtgggaagaacgagctgggaaagcgaaaagagggggtctttgggaggcaagcccgggagaggtgtcgggccagggagagtccgtgggagccgccaggttaccgctccctaccccggcagagctgatgtgggaggagggggcacctgcagtggccgcggcccgcgcaggggatg

SEQ ID NO: 7691 - DNA, 1138 bp, Artificial sequence
  DNA replication origin
aagggggattatcccccttccatcccccataacaggaagaagcctgcattacccactacttgggattcaaatgaggtgatactagcgattgtaaactgtaaatcactataaacatgagatattttattgtcattacccactgtaacctacttataagcatttgcttatactgttgcccctaccttccacttaactgagtcctaccctttcttgcagtcaaatgctggctctacctccttctggaacattcctggggcctcagcccagagctcactctagcctctaaccacaagcccctaacgtgctgggcttatgccagctctcaacaccactggattctgttcctcttcttcttacctggattgcaaatcccctgggcaggaatcaaagccatgtatgaatgaatcaatgaaagaaccaggtgcaagcacagcacacagcacagggctgggcttctgtcccttccccgggcactcgctgggcctcatagtgccaggttctgtgtgaggtgctgggatttggagatgctccagcggggagacagacaggcagatctgtgacaatgactccccctgtaagtgccataacgagggggcacaaaaggctggggagccaggaaacagtgcagctatttgtgggagagtcagggagggtttccctaggaatgacgtttagtggatcttaaaggacaagtaggaatttgctcaatagaagatggaaagacagagcagagagttgggaaaggacctgtcagtcagtgtggccagcggcagcggtacctggtgtatggggtcgctgggagagggatggaatggggtgagagcgagggccttggctgctaggcacaggagtctacacttgattcactggcccacgcggggccggattgaggtgtgcagcctaaaatagtaaggggccggaggggaccaccaggggagaaggctccctttgcagccccctagagagaccggtctcctgggctgtaagggttgctggcgcccccgcaagccctgtgctgcctgctgtgtctgtctcccaggctgtgaacctccgggccatgttctcccagcacctggcgcaggtcaggtgcccagcccacgactgctaaataccaggatgagccaatgaatgcacaagg

SEQ ID NO: 7692 - DNA, 997 bp, Artificial sequence
  DNA replication origin
gcgggcagggcctgagaacacgtcccgaggggcagccagctcctcccaggccagcccttcctcctgaaggctgcccaccccgaagcagctggtggggctggaagggagcatgaggagggtcactgggccactgtgaaggcccctaaaccctccggctgactggccccagcccttcctcacccttcccatccctgggtaccctgccagtgccccctcacccgcactagacccagagaagccgagggagggacgaagagaatcaccataggcccaacctgtcgtcacagagccccggaggcctggggggccccggcgggcctggcggggccagcggggtgagcacagtgggcagggccacatgcagcaccccgtcaggccttgagggcagctcccggctgctgtgcagggtcaccgtcatggtgccagccgcggcgataatgcctgtgggcagcaccaacgtggaccgggcctgggccagatccaagacaagatgacctatgatgggtgagaaatggggtcagagcatgctggaagcagaggagagggaggaagctagatgtggaagcaggcattgggtcagggagcctgggcaagggggactttgcgtgttggcactaggctaatgcattggtgacgcaggatggaggcatgagatgaatgatggcaggagaggcagactaactgtgaacagatctggctgtcatcaggcaagagcagcagtgacatccttgctaatggaaggctgaggagaaggggccatgtccactctcaaggccctgggaatacccacaccctctgcccctctccccctgcctgcctctttccattcaacccttggccaccatcccttgtggatagacatctccctgtggcctgggaccccactctgctcataaatttcctgctcctgaaccatcaggagctcccccattgcccactaaggtggctccagaattctctactcctcccgggcaggaggaatagagaagcaggaagc

SEQ ID NO: 7693 - DNA, 1391 bp, Artificial sequence
  DNA replication origin
gctgggcccgcagccagcaatcagccttggccgctgtcagttcccactcgtcgaaggcagcggcgcatcggtgctccagccaggcgagtgctacggcagtggcccaggtccggccccgcaggtcggtgccgcccagcccttccgccccctcggaggcctcggtgtctgagccccgcccactgtccacctggcctggcccctcagagcccgagctgggggacgggctgcaggaggccgtggcactgtcaccctggccaacaccagggcccagaagtgcccagggcaatgaggccgaggtggggctgaggctggcgcggtgcacggcaaagggcgaggcacggcagaggcgctcctgcgagatgcgcacagcggcgcagaagggcgcgtccaggcggaaggagcctggtgcctcctgcagccgcacctgaggagagaggaggtggggggagaagcgagctgaaacagcgcccggccccggcggcaccaccctccacctcccgagtcctcaccaagggcaggtagtcatggtcgctgccttcactgttgttggcctggcccgggtcagggctacagagtttgtgacggcggcccatgctgagccgacagggaggacggggaggtgggcggcgaggaccttccgtgggagtggcagggtcccccaaagcacgcttggagttgccattttggtccgagtcccaggcgcctgctggagagcctctctgaagtcctgcagtggggatcatcagtgccagggggcggtctctaagcccaagtgcccctaccctttccctacctttgggtgttacctttagagtagacaacagtgggcagaggagctgcatctagatggctgtgagaggcaggaggggttcctgggggctcagcgggctctgcaggggcacatgggacaggagtcaggtttgtccaggagagtggccagtgaggtgagagctgcacctgagaggtcaccagaagaggcccctacctgagctgcacacctgcagggccccaggcaggacctccctagtagtagcatccacagctacagggcaagtgaagcaggagggggcagagctgaccttacttgtctgaagggctcgaagccagcacctccgggcatggcctgtggaaccaaggagcagtctgtggagcccccaccacccaccctctacagagggctcatagaaaaaattgcagtgttctccccagcttctccctctatcgactttaacagagtagattgccttgctaggcccagaaccagctcagactccccaactttgacaagaagtgatcaggctgaatcttcaacccatagcagagcaagagccccctggctgcccagaaattcagcactctggacaacacccagaggaagcattagctggcac

SEQ ID NO: 7694 - DNA, 1623 bp, Artificial sequence
  DNA replication origin
cccccacctcctctctcctcaggtgcggctgcaggaggcaccaggctccttccgcctggacgcgcccttctgcgccgctgtgcgcatctcgcaggagcgcctctgccgtgcctcgccctttgccgtgcaccgcgccagcctcagccccacctcggcctcattgccctgggcacttctgggccctggtgttggccagggtgacagtgccacggcctcctgcagcccgtcccccagctcgggctctgaggggccaggccaggtggacagtgggcggggctcagacaccgaggcctccgagggggcggaagggctgggcggcaccgacctgcggggccggacctgggccactgccgtagcactcgcctggctggagcaccgatgcgccgctgccttcgacgagtgggaactgacagcggccaaggctgattgctggctgcgggcccagcacttgcctgacggccttgacctggccgccctcaaggccgcagcccgagggctcttcctgctactgcgccactgggaccaaaacctgcagctacacctgctgtgctacagcccagcgaacgtgtgaaggctgccccctgctgcttgggctggcgccccacccaacacactcaagtcactgccgcccagggctggcctcttggtgctgggaaagtgtaggctggtgccagcctgtcccccactgcttcttactccctccctagagccctcttgcccccacaaaaagtgcctgcctgtgctctctccctctcctcccaccccactcacactcccctccatcctctgagctccctgcaacacagtggaagggtagagagccacagtccccaaatcctatgcaataaagtgcctcttaggactgcttgagtgaattctttatctgctccatacgtgtccctcacagcctggaccaggcatcggctgcccccacctccatgtaggttgcacagagttggacttagcaaggtttatttggaagggcagagtccaaccaaccccaggtcctgagggtagactcaggtcctgagggaaaggggtggacttcagtgggctttcttgctgtgttgggtgctcttggggaaaggctgcgggcccagccagagctgcagcaggatgacggcatggcatatgtgcagggcagcagagctgcaggatgtggaagggtatgtgttccaggagagctcgatgagccccagcaccaacaacctggagatgagaaacaggttccacgtttcatccagttgcaaggcctgcagacctgcagctcctcatgccctagacataaacccccaacaggaactccctatcccttcccactcccccaggttgtcccagctggtacctgagcaggtgtgtgagccagcgtgcaggcatggcccacaggaggtagggcagtgtgtggaaataccagacgtagaactggtagtggagggagcggctgaagcagatgccaatgaagttggaggtgaagagggtagaaacgatctgtatgcggtggtcaaggccaagggcaggagtgtgtgtgggggggactatcccaaaacagaggggcaatagtttttaggtcacatagccctctggctctgccattccttgatgcatgcctttgggcaagtttat

SEQ ID NO: 7695 - DNA, 1077 bp, Artificial sequence
  DNA replication origin
gaggtaggcaggaatgttgcttttctggacattcgttctaaattagcgcctgtgtacccagggctgggtataaactgaggagtaagacattgtccctgctcctatggagcgtggagtgcatcagaggagacaaatgcagaaaaattacattttagtggagtaaatgaagactggctactcggatcggcgcttagcctggtgggacgccaggcacgggaagcggaacctaagtgtcgaaggttcgggtttccgggggtggtgggcccacacaagcggcgcaccgttaagatggcggctgggctgcggaaacgcggccggtccggttccgcggcccaggcagagggactctgcaagcaatggctgcagcgcgcctggcaagagcggcgcctgctgctgcgggagccgcgctacacgctgctggtggccgcctgcctctgcctggcggaggtgggcatcaccttctgggtcattcacagggtggcatgtgagtgcgccgagggggaggggaggggagggagggagacctgaacccgcgacccaaactggatctcagacctggaactccaaaccagactctgtatccactcactcgtcaattgcgaacccatccatatcccttacctgagcgccaagcctgctctacagaaaaccggatcttaatctgcccgcatggcagaggtggataccctagagattggccttctgcactgaacttacagcctgcaaaccagcttagaagtcagatttgagccaaaattgttgtactgctgctgctgctgcttttctctgtggctttggacacctcaggtctcctcctggatctcagctttttccatgtgttcagttctgtgatctttgaacgtcccttctcaatgatggcatcttgtgaccacttgagtccattaggcattattggctactcctttccaggctgaaactatactctaggcttaaggcacttggctttcttgctaaagactcttaattcaacaaatatttatttagtgcttattatatgcctagcattatgctggttaccagagagaggtacagtggtgaataagagatgcatttctg

SEQ ID NO: 7696 - DNA, 923 bp, Artificial sequence
  DNA replication origin
ctgacgcgctttctccctgcgcagtggtgatcgaggatgaccggatagacgacgtgctgaaggggatgggggagaagccgccgtccggagtgtagacgcgccggctcgggcggcgggctccgggcccagcctcgcagcggccaggagcgcgggccggcgatgcggctgccggcgcccccccgccccggcccaggcgcccgcgggcgggggctgcagggccgtgccgccgccgccgccaggcactccggagctgtccgcttcagcaccacggcggccgcggtagcggcggcgcggacccgcccggaacccgccgccgcgctcatgcactttaaaacctcgggccgcagccccaccccgcacaccggaacggacacggagacccgcggcccccagcccccggcccgccccctcccgcacggctcccctgccccgcccccctccggccagtctggtctgcagaccgggcggccgccggtgtcggaccgcgcgcggccagggatgtttggctgcgtacttgcatgagctttccacccacttgagcccagtcctccgggccgttcctcgcccccacccctgtctggcgtgaccccagcctcagcctctttctaagggacttcctcagcacatttgtatttttatatccgactctttgtttactggctctgctcatggttcctgccctcccctcagtctcggccacgctcttctgcgcctggcagataggatgggtgttgaggctgggatgagacaagcccccgacacggttaccaaccacatggccagtctgcccaggcctgaccccaggaggctttctggcagaccccttctccccaaggtatcatcaccttccaagggcccagatccgattttaccttggacccctgcgtcttgcccctgggaacccaaatggggactgctctgaa

SEQ ID NO: 7697 - DNA, 987 bp, Artificial sequence
  DNA replication origin
ccgccgcccgcgccccgccgcagtcccgctcccgccccgcgcccaccccgcgcccgccatgtccgagatcctgccctacagcgaagacaagatgggccgcttcggcgcagaccccgagggctccgacctctccttcagctgccgcctgcaggacaccaactccttcttcgcgggcaaccaggccaagcgaccccccaagctgggccagatcggccgagccaagcgaggtacgcggcccgggcccggagtcgccgcctgacccagaaaccctccgccgggcgccccccggctgccgttccccgccgagtgcccgcagctcttgccgcagaccagcgcaccagccgctctccagcccgggctggaggggggggtccccgctgcagtgtgtgtccccctcttcccttctcccgggaacacggtgccccggattcgatgctcgccacctctggaagcagagccctggcacccgggcgagggggaggggccggtcggggcatttggggctgcacggaagtgggagcacggggtaacgggctgattctttgggatcaaatactgagtcggtggacaatacgaagaaccttcgggtcgagagggacgtctaacaagagagggcaggaggccgggggtccgcttgtcttggttgtttgcatggggaggggagctctgttggtgccaggatcggaagaggggttccagcggcgagagggctcaggttgaggagagggctggaccagctggatactcggtttgagccccatttgagcagggggatctgttgaagtgcgggttgaagagggggattccgtgagcaagaggtttctgatcaactcagagggaggaaggctcaggtggcaggagggctcgcactgggagggagaatagctggagcctttggaagaggggcgttccgccatcgggaggggagggggtctaggcttggcggcgggttgggtctccagaagagttcggacggggaggacaccg

SEQ ID NO: 7698 - DNA, 1236 bp, Artificial sequence
  DNA replication origin
gccgcgtacctcgcttggctcggccgatctggcccagcttggggggtcgcttggcctggttgcccgcgaagaaggagttggtgtcctgcaggcggcagctgaaggagaggtcggagccctcggggtctgcgccgaagcggcccatcttgtcttcgctgtagggcaggatctcggacatggcgggcgcggggtgggcgcggggcgggagcgggactgcggcggggcgcgggcggcgggcttgctgccggaccggccctacctcagcaggggagccggcggaaggatgaagtcatgcagcatccggggctgaggagccaagcggggcctcctcccccgcgcctccgcctcccgggccgctgggcaggcggcggcggcggcggtggcggggaccgggcgggggcgggggcggggggcgggggtggcggcggcggcggcaagagcggaatgacgatgagcgcccgactgcggcagagcacggcgggcggggcgcggtggaggcggggcgggcactggccaggggaaagaggcggggccgggggcaggagcgcgcccagctaccccgggaacagaggcagctggagtgggaggttcccgcactgtggcggggaatggccagcacgtgggtcttggggaatagtaccagccaacccggccgggacctcgcggggaggggcgggaccgaaggggggtgggatcgagcctggtactggaggagcttggaggagggtctgacccctaggctgggagaggcgtgcaagggggactgggagcaggagggcaaaagctggccgggcgcgttggggcgggaaggcggccgcagggctggcaatggaaagcggggagcgggaaatgcgcggggaggagactcgggtacagggtgactggggaaggcacgaacccacagcgcgggaagagctcgggccagtgggatggtgcccttgccgctgacgcgctcttgtactagttgctctgctggtcttaagtagatcgtcagggtccgtgcgcctctgagtgccggtctgtgtctctgtctccgcctttgtgtgtgtcagtccatctctaagtgtctgtatctctctgtctctgtgccccgtatctctttcgctgtgttatggcctttgtctatgcctgtcccttaagtgtctgcctttctctatctatctccattcttgactcctgtatctctgtgccagtgtctccgtctcctgaatctgggtatttcagtctctcctagga

SEQ ID NO: 7699 - DNA, 791 bp, Artificial sequence
  DNA replication origin
cctttctctatctatctccattcttgactcctgtatctctgtgccagtgtctccgtctcctgaatctgggtatttcagtctctcctaggaggggtctatagaaactgggccgacgcgcgcgcaccagggcagacacccccagccctagtccggtggctgtagccccccgcggctctggagtggtgcgctcgcagtgtaggaggaatgaatggcggcgtcgcggggggcgccctgggctgcgggtgacgcggggaagctcggagcacctgaggacgcggagcgcgccagtgtgtgccccgagggagtgcggtagagatggagggtgccccccgccctcgttgctttggaccacgggtgagttctcgcctcaccgatgggaacatgccctcttctccccttgcctcccgcccccacaacccccgccctggctggccgtcacccgcggcgtcacctgcttgccagcgcgcaggagctctggcgcaatcactggccttggggaggagggggtgtctcacatgcggcgacagtgacggcagcgctgaaaacggtaatgatcaccctgtacgttcattccacactccaggcgaacgcgctttccttccttaatctggccaaattaccaaatcacacagctggtgaggctgccttgtagtgggtctccttccaacactttctcgccaggtgttaataccggagacacagggacaaacgcaatggtggctgcccagggaactggatggggggggcggtatgccacaggataccttgatgccagcctcactcaagggccc

SEQ ID NO: 7700 - DNA, 996 bp, Artificial sequence
  DNA replication origin
aaagaaaggaaagaagagagagagagaaagaaagagagagagagaaagaaagaaagagagaaagaaagaaatggattatgtgtttgctacccactcaagccttctcaggtcaaattcttgtactttctcagtgggggtggaggatggggagaggaagatgaagcgcactctcttttccttttttttttttttttgaattgtaaaacactaggcacttttcagtgcaacagactgcaataacaccaggcctgattaaggaatgacaatatggaaggcagatggcagatgcatgggtgccacactattgcttttcagttaaatattgcttggtgttagttttttttctccttgtaaatctcccaaataaaacggtttgctttccccaagttagaagtgttagcacgtcttttctttaaatatctgtgcatggctgtttttttccctgccaatttgtcaccatctgtaaccctccctttatgagacgatctgatgacagcagttatcttggagagtagaagtgtggtcttgaagcgccatggaagagtagagtcagtgtaggctgtgtgtgtgtggagtgtatgctccccctgcacttggtgtgtgtacatacagaaacacagtgtgcgtgtgtgttggctctgggtgtgttgtgcgtgtgtacactgtgtgtgagtatgcagtgtgtgtacattctgtgggcatctcgtgtgtgtgtggactgtgtgctgggcgtcgtgcctgcccgtgtccttggcgccttggcgtctatgcgttctctgcacataggtaggtaccacgtgcacaccctgaatgtgagtgaactgcctgtgtgctatgtatttgccggctgaagaggggctgtgtggactactgggggaagacgttcctcaggagggcataatttctctaaagtgcttaaaggggatggagagagcctgaaatttgggggaagtaggccaaggagtattagcaacgtctgggcctggttgaatttca

SEQ ID NO: 7701 - DNA, 2162 bp, Artificial sequence
  DNA replication origin
gctttccccaccatgggaacctgaattcccgagcgggggtaggggtggggccggggggtcagcccagcctgcctgtcacaggagagggaagtctgggctcagcaaagtgtccctaagtctctccccaccctttcccagctcatcacctggataacattgctgttggaactcttagagtcggcactgatgtagacggtgaagaatggggtggccctgtaggtccctgctactgccttcaacacctccataaagttgtcctggtcccagggccccgtaatgttccaaccaccaatctatgtagagaccataagtggaatgattagtgcaggagctcccaaagcgttcctgggccatctcctctctcaaggcctctcctgctcccctgccctcaaccggctcagtggccctaccttctcaatgaggtctctcagtggctgggctcccagctcctcaatgcgctccacctgtaggcaagataggtagaagcgctgtgtcttctgctcagcttcactgctggagttgaaggtggtgttttctgtggggcagaacacaggatccaggtggcaattacgttaactgctgagggggagtccctggcccttgctcggtttctctccttgccttgtcaatgagcagtcctgctaacgcagacccaggaagagtgtctgaaacagcaagccgtggcttcctctccctgtccatggagacccaaggatatctaagcagtacaggctccctggtgtctaccacaccacgacagtgctccaaacagagtgcagagaagcggccctccattgtacccagagttctgcccccatcaaacccatctgcacttctcaatagtcccctgctctctgcctccccaccctctggagtgttcacagaaccatccacttcctcattcatggacactgcctatttgctaagtgccaggccctgtgctgggcacaaggcacataggtggcccaaggcctccctaacagccccactcaccaagcaggtgcttcagtatggcctggttttggtcccagaggctgttgaaggtgttccagcgagaacgcccatcgggcagggggttcctccgaatccagcccccacaggagaactggtaaaagtcctcacaggggctcacccctcggtccagggactccaggatttttccagccactcgaatgcaggcctctgtaaggcaggtgctgtgggatgggtctgtggtagggaacatggccggagggtaggagactgtcagtctgtctgtctggaagaggcaaactctgcaagggccatgacagcaggaaggttgggaagagaaagcaaagccgggggcttttctgcagggaaggcttggttcccacaagtgaaaatcttagaggcccttaggcctccagaacccctagttatgaatactgacgaagagtgtgggcccacctacctctgtggtactggacccctagggccacaaggcagcccagaagcagtgcagccagcagtagagaggcacctgctaagaccagctccagctgcgtgcgtgagcctaacagctgtcttgtccccttctggaatcccacctggggaacacagggggacagagagtgactgagatgcagggcagggatccaagattaccagagggtgaagccacaggcagttttcagagccacagggttaactctgggcccgggggcaatgaggccagccagtgagttgagccttgagtctgttttgtgcaacgtcacggcttagcatcgcctcaccatagtcctagagcagaggccagagatggagcggaggtgggggcaggtgaccctccagaacagcccagagctcctgggtgtgccaggcgtcatgccagggctggggcctggtgagaaaggggaagcccccttgcccacctccatggcgtccggggaggccccgccctctacgggggtctcgggtgcgtcttcatcccgaagcgtggcccgtttgtactccaccatctgccagacagtcggggttgccaaccgaggtcaggcagagagggctatttgcccacgaccctgccccagtgctccctgcctcgcggacccctccgccctgctaagagggcccttcccttcccacctgccctgctctcgggcccggggtctctctatcacccctccaccaggcccgggaggcag

SEQ ID NO: 7702 - DNA, 830 bp, Artificial sequence
  DNA replication origin
gcctcctcgggtcaggccgaggtggcatttcgcggcgacgaacccggcgccctaccagcccgcggggcccgcatagtccggccctgcgctccccacccccacccagcagccaggcccggccgggccaggcacacgtgggccggggatcgggaccctggcgggccggggccctgggtcgggccgcggggccagggcgccggggcggcggcgcagggtggccggtcccggcccggatggcggcggatgcggggggagggggtgggggggccgggtcgggcccggacatggcggctttaccttcagtctccttcagtccgcgcggccgagccccacgcagccgcacagacgtagtccacaaccatttccggctccccgcacagatcccgctcggcggccaccgcttctccgcaggcgcagccggcgcccccacgtgaccggcgcagggggcggagccgcgccgggcgatctgcgccgccgagcacatgggatttgcccccgccccgtcacgtgacagccacagcccgcccccgtgtcccctcccgaactttgaaactcccagaccgattcccctctgtgtttctctctgttccgcgattctttagttcattcatattttaagcaaccatttattgagtgcatgctaagtacaaggcgaagtgctggttgagggctgagaaactgaaatcaaagtctcggcaaaaaaaaaaaaaaaataagcggggcgcggtggctcacaccttaatcccagtactttgggaggccgaggtgggcggatcacgaggtcaagagatcgagaccatcctggccaacatggtgaaaccccgtcttta

SEQ ID NO: 7703 - DNA, 1003 bp, Artificial sequence
  DNA replication origin
ggggtggggagcgcagggccggactatgcgggccccgcgggctggtagggcgccgggttcgtcgccgcgaaatgccacctcggcctgacccgaggaggcccggcagcccacgggcgcaggcaccacggctcccggcccgccgccccctccccccttcgcggccaggccgccgggaagtgacacgttgttctttggcactggcccgcgctgcgcagggagggcgcaggggagggaggcggtggcggcgggcagggaggagcccccggccccgcccgccctccgggccgaccctcacttgcctgaaaccggctcctcgacggccgccgcccgcctggccttttagggcctgactcccgcccttcctggcctacactcctgggcggcggcaggcctagcttctggcccagtgcgggttccccggcggcaggcgtatcctgtgtgcccctgggccaggcccgaacccggtgtccccgggtggggggtggggacgccacggccgaagcagctagctccgttcgtgatccgggagcctggtgccagcgagacctggaatttccggtctggttggtctggggccccgcggagccaggttgataccctcacctcccaaccccaggccctcggatgcccagaacctgtaggccgcaccgtggacttgttcttaatcgagggggtgagtgaggggtctgtttcagtaggtcaggggttggttggaagtgatgcgggtttgacagcatgttggtggggacaggctgtatcttttctgcttcaccctcttggcatctctgggactccgtatgggacccagcccttgcatcaaccctttcaccgccccatttgccttaagcttgggtcccttcctcttcctgagcgccactctttcccaacaggtgctggggggaccctgatgtggcaccaaatgaaatgaacaaagctccacagtccacaggccccccacccgccccatcccccggactcccacaggtaattagggaggaattag

SEQ ID NO: 7704 - DNA, 972 bp, Artificial sequence
  DNA replication origin
ttagagagcaaaatgccctctgggtttcattctttccttttacgtttgtgttgtgttgttcctacaagtggaaggagttagacacagccttgaagggtaattgcctgttttgtgcctagccatgtgtttgatgccaacagtgcagaggtgataaatgataggatcttcccagtaccgtgtgcccccacggcgtggcacagggctgaaatgctttgcttaccttgcctcatgtagtcctcacaaatgttgtttagggtggatggtattacccctattttccacatgaggagactgaggtctcagtgaacatgtctcaggttatgcattcagaacataggtatgtgtcagggcattggcatgctcacagagaggaagccgagcaatttcctgtgctggcctggagttagtactggcgtgagcaatgagcctgggaagacgggtgctctcggagggaggacacctggtctgaggggtaatgagtggtaattcactccacaacaactgggaaggggagggggagaatgtttgaagcgaaggcactatgtgtgttctttctacctatggtaggaagaacttgacacagggaaaagaactattaaagaaaggccagtgtgggagagcacagcaaccagtcctaagtgaggcaagatggggccgaagagagggatgtgggcctgaccacacagggccgggtgtaagccatggccagagtctggggctttagcctgggggcaagaaaacgcctttgtgggattttaagcaaggaataaaggaatttgattttagtttttagatcatcttggcaatagagggaagagtggtttggaatggggtgagagtggatgtggcagtgttagcaccagtggctcagccttgctggtgatggtggagaggagtaggcagatcaagagatacttaggaaatggagttggcagcttttggttacactggtctggggagggggccgtgaga

SEQ ID NO: 7705 - DNA, 2040 bp, Artificial sequence
  DNA replication origin
agatggggccgaagagagggatgtgggcctgaccacacagggccgggtgtaagccatggccagagtctggggctttagcctgggggcaagaaaacgcctttgtgggattttaagcaaggaataaaggaatttgattttagtttttagatcatcttggcaatagagggaagagtggtttggaatggggtgagagtggatgtggcagtgttagcaccagtggctcagccttgctggtgatggtggagaggagtaggcagatcaagagatacttaggaaatggagttggcagcttttggttacactggtctggggagggggccgtgagagattagaagtcatggatgactcccaggatggtttttaaatcacagtgggcttagaggccatagtgtgatgtcatttgctggggtaggcaacggtggatcaagttgagttgtggtccttgagtaagggaatcgagatgtcagctcaatagctggggtatctgggtccttttggaaaagaagagatcagggcaggaggcagctttgtgaaatgccggcacagggtaactcatgtgcaagtcataagaggatacgggcttgcctgagggagagtgataagggcctgagatacagccccaaggaggtagagcggacatactggtagggaccaaaggaggacaggcccctctgaaccaaggacagagaaatttgaggagagggatgtggttgataatgccagatgctgctgtgagcgtttgtaggagtgggcctgaaaatgcaggatgtttggaatataaaaacatagaggccaccctggcaaaaacagtatttagtggggcaggggacagattctggattggaaaggactgagaaatacttaagtgagacagaaagaagggaaaacatcaagtgtagacaaaatattttattagctgtaagatagtggttgaaaacagggctttttgtttttaggttagagaaacttgggcttgaaaatacagggcagagtgcataatcgattggatggggtccctgggtgggtatgtgtgggatttggagtgtaggtacgggttaagtgaaggttctgccctgctatggcccattgctatggggtgggggtagcaggtgactgtgcccctaggcagtttgtgactttgaggctgggcatgccctgcagaacatcctggctggcagcatctcatagatggcttagaagtgtaaggtttggtttggaaagactggtggtgccttgtgggcactggggtcggttgtgtttcaggggttataggacacgttgcttgggaaggctacccagcagctaggggttgaggagaaagagggcccgaacaggtgatgcttgagttgagtcctgaaggaacaagacacgaggaagtttccggcaaaggatatagcatccacaaaagtgtcaaggccagagaaggtgtgtatgtacaggaaatgtgtggggaaggaagggaaattgagatcaggagttgtcaggatctgtttggggggcagtgaatgttcaggttacatgtaggatatatataggactttatgtatgatatatataggacttttagcgatttcctgaattcaggagtaccaattctgaatatagttttctccattaaatacatcatgggcagagaggtttcaggctgccaaggtgaggccaagcaagtttgtaaggtttttctgatggccaagtgactcattgctgtgcagcagtctcagatcatgagattagcatcctgtcagaggcctagtcactctggaatggccacaaatgtcaggctggtgcatcagggccttgtttgaacagtggaacttgggagggttccctggggtgggctggggtggcggtggccagtcacctctaactgctgtcccgcctgcttgcagacctgctgcggatgttctttgacgcactgtatgacgaggacgtggtgaaggaggatgccttctacagttgggagagtagcaaggaccccgctgagcagcagggcaagggtgtggcccttaaatctgtcacagccttcttcaagtggctccg

SEQ ID NO: 7706 - DNA, 1260 bp, Artificial sequence
  DNA replication origin
tgcagcagtctcagatcatgagattagcatcctgtcagaggcctagtcactctggaatggccacaaatgtcaggctggtgcatcagggccttgtttgaacagtggaacttgggagggttccctggggtgggctggggtggcggtggccagtcacctctaactgctgtcccgcctgcttgcagacctgctgcggatgttctttgacgcactgtatgacgaggacgtggtgaaggaggatgccttctacagttgggagagtagcaaggaccccgctgagcagcagggcaagggtgtggcccttaaatctgtcacagccttcttcaagtggctccgtgaagcagaggaggagtctgaccacaactgagggctggtggggccggggacctggagccccatggacacacagatggcccggctagccgcctggactgcaggggggcggcagcagcggcggtggcagtgggtgcctgtagtgtgatgtgtctgaactaataaagtggctgaagaggcaggatggcttggggctgcctgggcccccctccaggatgccgccaggtgtccctctcctccccctggggcacagagatatattatatataaagtcttgaaatttggtgtgtcttggggtggggaggggcaccaacgcctgcccctggggtccttttttttattttctgaaaatcactctcgggactgccgtcctcgctgctgggggcatatgccccagcccctgtaccacccctgctgttgcctgggcagggggaagggggggcacggtgcctgtaattattaaacatgaattcaattaagctcactgcctttctgctttatgccctgctccctctagagaaggtgtttataggtggggatccttcccagagctggtactgtagcgctgttccctgtaacctggcacccctcctgcctcttcccctgtccatgattgcagggatctgaggtttcctggaaggttgggccctcagatgggcttgataggtgccttcctggtccggagaaaagggagattagtgataggacatccttgctaggctctgctctcctaccagaatgattcaagcccctgtgtggggaaggcttttgggtttcgggttgtttatagctggagaatccctttatggcttgaaggtgtcatctgtaaaatgaaggggctggatgcatgaagggaggttttgcgaccccgtgtagtgtgactgggctggcttagtgagtgttcgccgcccctgccttcaggtggcagtc

SEQ ID NO: 7707 - DNA, 850 bp, Artificial sequence
  DNA replication origin
ggacgcgcggctcccacccctcccctctcacgggctctcccctccccagtgtggccgcgaccctaccctctgcaaggcgatggcccgcgccccgagcgcaggctagcgtgcctgggtgcccggccatgggctgtatcggctctcggagcccggcgggtcagggtaagaggcggaggccgggtacgggttggggagtcgggctgcggccgccggtgcgcgggccgcgggtgggtgggggccttgaggagggggccggtgtcgggagagggaggagcctgcaccgggaggcgggccaggcaacaggagggagcgggaatgagcagggaaggggccagaccgactccggttcgctcccacggcctgcctgccttggggttttgcagggcagacgcatggtctcgccgctggctgccgtgtgcccactgctcagggtggccggagacgcacagccccgggaggggctgggcagcccgatgcccccaccactccagccctcggcgactggccttgcgcgcccacacacacactcccctccgcctacacctctgccttcacagtcctgggagtggccctgtgctgggaacctgcttctcccagccgtgtccccatcttcttaaagaggtagcctttcggtcctggctaagcaccctaccacagaatttttgtcggacattgactcccctcttcagtcagtcggcgaagggggactgaggtcccgtttggggcacctgtgaacactgaatcacctctcacctattacagttgttttaatgtcctgcccccactcagcaaaaacaaatcactctactctgtggagggaaagaggaacccagaggcaggccatcagggc

SEQ ID NO: 7708 - DNA, 1382 bp, Artificial sequence
  DNA replication origin
tcctaagttaacctcgtggcttttgaagctgaggagcagctgactgctctgatctctctggccctatcaaggcttggagttcaggaagtcatcaccttctcttgtcaggggtgagtttggctgacctcaggactggcctcgagagccctggttaggtaccagttgggggccagggatggcctgtaacctcctgttttccttctggttggtagcatttctggggaccaacagctggccgaggctcagggatagagacggctgctccagctaaaggtcagttgtgatgtacattgcctgttggcactgtctagggaatgggcctcagctccccgagtcccagagagcttggctgagccctggtgttcccacctcctcagagccatgaggcaggaatgttctccttatgtgactaggcacaggttccaaatggggaggggactggctcagcatccggagccaaaacaggaatagaactgggagctgagcctggagcggttctgggcttttggttctctgcatcaacacagccagcatgcctatgatttctgtgctgggcaaaatgtttctgtggcagcgtgaagggcctggaggacgatggacttgtcagacaagtcgcagaggtgagaccagggatcatggatgtgatctgggagatgatgggaagctgagcagtagggtgcttaggtggaaaaggaaaattactctggcttagatattaagaaccaggctgaaacagggagaaccaggctggggccagacagggcatcaggaaacggcttcaggggacaggggtgaaaatcagaaaaaatatcatgagttcgtcagaaaagaagagtaaagagctgtggaccagctgaggctggcgagaggaaagaaggcagcaggaagagagaaggaaggcaaccctcctgcaaagggtccagggtggcggtggtgggggggacagtgatggcggaagaactcagtgtgctttccaagaggaatgggtaggctgggaaacgggaaggagagtcagaatttatcattgtttggtttcaccctagggttttgaggcaaaatttatccagagcaggaaggtggcaagtgggctgccacagaatggccccaggggcccgagggtcagtgatgtgtgggatgggggcttttagagttgaggagagcactcagtgggcgctggtcttctggaaggtgggggaggggccgagaaatgatacggcaatactggatgaaaatggggatctctgcagaagtaggggcacagctcaacagcctttccccttcctctcagtgtcctcggaccccgcttgggctgtggagtggatcgaacttcctcggggtctctctctatcctctttgggatctgctcgaaccctccgaggctg

SEQ ID NO: 7709 - DNA, 1177 bp, Artificial sequence
  DNA replication origin
tcctctttgggatctgctcgaaccctccgaggctggagcaggtcctcccgcccttcctcggtggacagtcaggacttgccagaggtgctgggcccctggtggtggggggaaggaggacgtcatccatataaaggggatctgcagcccccacccacgcctggccagccagcttctggctcccttttccggcgggcggaggcgctatccggcggcgggccgggaggccgcccccgtgccggtctgctctgctcggcgctgtgccagcaggcggagagctcgcgccttccgcgctgacgtcagcgcatcccgggccgtatcccgggagaccctgttgcgtggtgatgggttgccagggagacatacaccttttctctgggcctgggccgcagctgcgcggagcgccgggcacggatggcggcggctgaggggagcgaagcgagggagggagagcaagctaagaaacacccagcaggtgctcccccgcctaggcctggctggaggctactggcgccaccctgggggccctgtcagccaggtacccaaggggagggatcgagggtgggcctcaggtcaaggggcagtgttggctgcccttgtgagggacgggaacgtgatagaagagagctgggcaatgccggggagggatgtgtgcctccaacttcattaagtgagggaaacatttgctggggcttgtcagggagccctgagccaggtacagggtggagttaggaacttacgtgcatcagacttaggccttgccatcctgagctccctcgggagacagacaagggcaatgatgggggcggggtgtgtcagagaaaagaagaggctgtcggctgaaagcattatttgcaggtgacacttgagatgggccttaagtgatggcaagcattttttcacgtaaggatggcattcttggcccagaggaaagctgagttccttttcctggaggcaggcgggctgcttgctgacagggattggtggagaagggtttttgttttttgttatttatttttatgtatttatttatttgagacggagtttcgctcttgttgcccaggctggaatgcaatggtgcgatctcggctcaccgcagcctctgcctctggggttcaagcgattatcctgcctcagcctccagagtagctgggattacaggcatgcgctgccacgcccg

SEQ ID NO: 7710 - DNA, 720 bp, Artificial sequence
  DNA replication origin
cattatttgcaggtgacacttgagatgggccttaagtgatggcaagcattttttcacgtaaggatggcattcttggcccagaggaaagctgagttccttttcctggaggcaggcgggctgcttgctgacagggattggtggagaagggtttttgttttttgttatttatttttatgtatttatttatttgagacggagtttcgctcttgttgcccaggctggaatgcaatggtgcgatctcggctcaccgcagcctctgcctctggggttcaagcgattatcctgcctcagcctccagagtagctgggattacaggcatgcgctgccacgcccggctgattttgtatttttagtagaggcggggtttcaccatgttggccaggctggtctccaactcccgacctcaggtgatccgcctgcttcggcctcccaaaatgctgggattacaggcgtgagccactgcgcccggcctgagaaggggggttttattgggcagaggagatcagcagtggattcaaaggaggcttggaaggaggcaagggtgtcacagagtgggatccttcagggcctgggtatgatgcctgcactaacctcactggacagtagcgtaggctagacaagattttagagatgtgttgtgaccagctgcactccaggaaaactgtttacattatatcttacctcattcatccagcctttgcatttttgtttgcttgtttt

SEQ ID NO: 7711 - DNA, 1141 bp, Artificial sequence
  DNA replication origin
gctagaggtggctgtagggggatctaggatgccctctgcccttcacccacagcccccttggcacccagccctccgtactggtggcggccccagccgagctcaggcaggtagggcagtttcttgattcggatgatgctgtcatagagggagggctgcagactctgggcgacagcgttggccaggatgacggcgatcatgacaggcaggatgtgggcaatctggcctgtgagctcgaacacgatcacagccgtggacactgtgtgtgtcaccgctcctgccagcgcagctgcccctggggacagtcacactcagtctcctcagggtgcccaggtcccagaagaccctccacaaccagggcaggtcctgagtgggtccctcagggctgcccaatacagtcctgggattggacctgtgcatctgagggaagcctggtttctgccagcagggggcaccagagtctcggaccctgtggctggggcgtgggtgggggggtctcccaaggccgatgggacctgaggcactcaccgaccacagcgtagcccccaggcacaatccggtaggtgctgctgtccgtatgaattccatctgggaaccaggcagccatgctttcacccaccagacgcccaaatgctgctccttcagggaggggggtgggaagagaaagaggcagtggagggggagggcagggggcactaggaagagagagggtcagagggtgagggaggggccaacgggtcattcagtgtagggcacagccctgtggggtcagggttcgggctagggctggaccaaaaacccgctcttgggcagagggttggctgggggggtggccagaggctgaggaaggtgcaggctgggtgagcaggcagctgagaactcaccaatgacaaagacaggcatgaaggccccacagggaactgggatggtggtggccagtgcagacatccagaactgcaggcagggggtggttcaaaggcgaagaggctccacctggccccaggcagcccacagcgccacccaggagaagtctacctcgctgatcaggtgggcgtaaccctcccagccaccccgtaaccctcctagctaccctgggacccccaggcctcccaggtgatggcaaggggaaggactctggaagcag

SEQ ID NO: 7712 - DNA, 1852 bp, Artificial sequence
  DNA replication origin
acccccaaagagggagaggaacttgctgagaagggcagcacacatgcttgcgatatgcacaaaagggccctgcggggtggggcaggcggtgagtcgggagggggcccgccctgaccttggcctggcctcctcttccaccaggagggactccttcattccccagcctgcagttacctctttgccaagcggcatcccgctgcctagggcgcaggtcagcccaatgaccttagctataaaggtcttgagtgtgaggtattctttcagcaccactccccgcaagatggtcttcatctcagggatgccagagcctggagagggaacagtctcaggagaggcattcgatgcacccatttcaggggtcccgcctctgccctccccttctcttctaacataccgacagcctgaggggccaggatctgtgtgaatccggctgagaaagtgatgaggacaacagggtaggtgacccaggccaggtactggagcaagatgctggtgttcaagccccgggacatccactgctgggctgtgggaagaggacctgctggacccccagtgcacacacccactgcctgcctggccagtggaccacgctgatacgacaggctgtcccagggagtaccacacagagtcagggcatgggtgaaggaaagggtccctgagggtattcactgggacaaagcgcaatctaggcaagaggatcacttggagaggggatgcaagaagctgtgccctgtgggagtggccgagatgatgcctgaatctgggcagtcagactggctggggaaagtggtcagtggccaagaagccaagacgccttcctccatgtctagacgagtgtggcatggacgcaggaggtttattcccagtcctccccctgccagctgtcaccctcaccttgcagacaggcagcaatggcatagtccatgacccagctgaccaatgccatgagaagccccagcaggaccaggaagatccaatcttcaccaaccctggatactaggaacttgtggcagcggacagaacagactgggtgcagggaagggaagaagggggaggatggcaccaaagtgctcctaccccttttactgccccctcaactgtcccctctcccccatcagcagctctaatggcctctgcttccctcagcacagcacagccaggtcccctgcccccaccccagttctcaccgcggcatcgggcgcaacggctccgtccatattccaagagctctggggcagcccgagaggaagggggacctttccagggttcaggccctcccaggcgaatccgagcagcttcctctttggcaaaggccccaaggtcctgagtgtaccggccatacatctggagcaacagaggggatgggggcattcgaggtcatgggctgagtgggaacgcagggagagttcttagagcctccactcctcttctcccagcccccacactggatatccctcttgaacgcacagttcccactctggcccgaggtgtgggaacaatgcacattgcagactgtggaggctgtcctggccagagtgatggggacagccaaggtacagggacacagctctgggggtggcagaataatcggtcctcttctcacaggcctggggctggggcactgaagaggagtgagagggaagccccagaagaggaaaaggtggaaaaacctgtggcacagtctaaaagtgggaggcgggaaggccagggagtaagggatgatcaggggcacatgggcaacaataagagcctcgtggagctcggggcagctgagttgggcccaggagcaggcgcagccccaatccttatcacgttcctgctgggcctccggcctgtgaccaactcagctgca

SEQ ID NO: 7713 - DNA, 2172 bp, Artificial sequence
  DNA replication origin
gatgtagacagctccgcagcccccagccccaacccctacggagctcaggcgtctgcagcccctcctgcctgggcacggggaaccgcgaacccgggccggcccctccacgtgccagtagacccgcccctcccgggcgcccctctccgacccgggcatccgcagggagccggcgcgggcttgcgccttcccagcgccccttgccgcctctcgggaggccccgcgcggaccccagcctggctgggccgtcccctccggatgggccggcgggcggagcagcgcagagggcaccgccctcggcccgcccgccggggaggggacgcgagcgggaggctgcgccagcggcgcccgccgggggcccgccgcactctgctctcggcctcccgggctgcggggacgggacggctgccggcgcggactttgcgggccgggagccgagtccaggacagagccggaaccgccgagggaggcgagagggcagtgcgcggagatggcggccgcggcggcggaggaagggatggagccacgggcgctgcagtacgagcagaccctggtaagtgaagctgagctgagccccaggagtgcgctccgggacccctgctccaggttaccctgggaagcgcgaggaccaggggcctaccctaatcctgtcctagcattttgagctggggaaactgaggcttggaagtctgaggctgcagggccgaagggatggaaaactgcatgctggtttctggctgaggctgagggcctgcagaggacaaggacaccaggtacttgtctcaggtgtccttcccctcaccccacaacatgcacgttttctttgcacctccccttcaccacctgggcccaagtctcagcaccccactgccccttccgcggcaccattcacaccattgaactttctctacgccactatctccaccacccaagacattctctgtgtccctgccatgtgcatggcaccatgctaagcatagaatcgagtgtgtagaaagatggtcagccccagaccctacctctggaggctccacacccagcgttggctccaggagcccctcagttgactctggaaaaaggtggcttgccactctgggggacaggagctttagggagggtgggtgaagcaggaatgggtgtgggaattgggacctttgtctatgctgatgcggggtatccagcccccacccaccccagggtgtgtcccctgacctcattagaagcaggggtcctgggctctgagctgacttatcgcccccattgttacttggtgtttgagaagccacgtgaccctcctcatgtcactggggtggaagacccaagccctagggaaaggaaggggcccgtggttcctttttaccagcttgggctggaatttgcccaggaaggtggcagggagggaacgtcttggagaggagaggctataagtctgggaggtgcccagttaggagaaagtagctggatgaatcaggatgtcagggagaggtgggagtagagcaagggtagaggggccaacccttgggatggggtaggagacacttgccaatctgcccagaccaggataggagcatggtcaaggaagccaggcacctggcctctgaaatggtgcctcttaacaccagccacctctccatctccgtcccttccagctgtctctggaatgagctctcagggtcgagctctgtcccgggcactctgtgctccagcctgctcccgccccccttcaccatcctatccctttgtctttctctcccactctcacctccctcctcctacaccgtgcttgcctcttaatactctccattctcttcctcctccgtacttcttcctctctcatccccttctttctcttctccatcccttcgccttccctctcttttctcttctactttctcctctctagttccctctcttctctttgctttccctttcctatctctcaccctctctctgtctctatctttccctccctccctcccccccatcccagccccaacaggagccctttgtgtcccgaagctctgcgggtggcagccagaatctactcctccccgccccccaacacacgcccagcttggcaggtctagccatggttcaggcgactctcccgtcccatcaccccagcatccacagtcacagcccagccatcctcagcctccgctgtcccccaaccca

SEQ ID NO: 7714 - DNA, 1444 bp, Artificial sequence
  DNA replication origin
tccgccgccgcggccgccatctccgcgcactgccctctcgcctccctcggcggttccggctctgtcctggactcggctcccggcccgcaaagtccgcgccggcagccgtcccgtccccgcagcccgggaggccgagagcagagtgcggcgggcccccggcgggcgccgctggcgcagcctcccgctcgcgtcccctccccggcgggcgggccgagggcggtgccctctgcgctgctccgcccgccggcccatccggaggggacggcccagccaggctggggtccgcgcggggcctcccgagaggcggcaaggggcgctgggaaggcgcaagcccgcgccggctccctgcggatgcccgggtcggagaggggcgcccgggaggggcgggtctactggcacgtggaggggccggcccgggttcgcggttccccgtgcccaggcaggaggggctgcagacgcctgagctccgtaggggttggggctgggggctgcggagctgtctacatcggactcctccgggtcagcccgttaggagccgcctcccctctgcccctccgaagagacgagcggcccagacaggcctgggaaggcccctctgccccgtcaggggtgaaaagcaaagctggaaggattcggagagggttggggccgtcttcctcatccttccttttctcggggctcccgtgggtaggtgcacttggagcaaccgggcctgcggggtgtgcgggggtggaggttggggagggcaccggaaggggtaggccggagggaagggagctccaggtgccgggaagtctactcctgggacgcgggcgtgggtcgcttctccctggctgggcccaaggaggaacccaagtcgctgcttccatccctccgctttgggggaactgcctgctggtgttctgggttctctatcaggggctggggaaggatagaacagagggcggagcgcgcgcagggtggatgggcagcgtagagatagtgtgagaggagcgagggcagcgcccaggaaacgcacaagtgtgcgggagagccagcaccaggagtaaggggcatttgggaggcagaggcggggctcagggggcgggagcagtgcccgggaagggggggccttgtgatagaagccagcactcaggaggaagggccagtgtgagggaagagctggtatccaagggacagggcagtgccaggctgaaggggcacggaggggatccgtgtccaggagaaggcagtggagggggaacgcgcagcactaagctggaggggtaatgcccgggggaggggggtggcgggagcccggctgaaggggcggtgtaggggaagagagcagggcctggggggaagagggagggcagtggtgggagggtgcagtacgagaggaggggacaatgcaggctttcctcttctccatagcgacgtcatggcaaattcccaaactggacgg

SEQ ID NO: 7715 - DNA, 1129 bp, Artificial sequence
  DNA replication origin
aagccagcactcaggaggaagggccagtgtgagggaagagctggtatccaagggacagggcagtgccaggctgaaggggcacggaggggatccgtgtccaggagaaggcagtggagggggaacgcgcagcactaagctggaggggtaatgcccgggggaggggggtggcgggagcccggctgaaggggcggtgtaggggaagagagcagggcctggggggaagagggagggcagtggtgggagggtgcagtacgagaggaggggacaatgcaggctttcctcttctccatagcgacgtcatggcaaattcccaaactggacggatccggctcgggttacgtccagcagggccgagccggcccaggccggccccggggtcctcggtgccggctggaggggctgggcacctctggggcggggttctgctccacctgccctcggcgcggactgtgccctcggcgggcacgcggaccggcggggtagggctagggcccggcttctctgggccaaggatcaaggtccctgcctgggttaggcccccacgcattccagtcttcggaacccggcctctgaagagggcgcagtagggccccagcggagcgcgagaacccgctctacagcctattgcttccccgccctgggcagagccacctggacatgagacccgccctcaatgccgaagcctctcggaagcaatctttcgggacggaagttaagtagccccgagcgggaggctgtggcggaagtggtcgcgttaccgcttgtttgtgcgcatgcgccactctcgtctggccgccgcgctttcaggaggtgcttttggttctctccggtcttgtccacgctagggggtgcacgtactcccaactgtggtcgcgctctcaccccttctgctgctctcgtggccccctcgcgatggcgggcatcctgtttgaggatattttcgatgtgaaggatattgacccggagggcaagaagtttgaccgaggtaagtaaggtatgtaggggcggtttggaggaagaggctaacctcgcggacatgcccctgggccccgtgtccacccagctcttgtggcctgcccctaccagcaggtcctggtgtagggacctccctcagtaaacattttatgga

SEQ ID NO: 7716 - DNA, 857 bp, Artificial sequence
  DNA replication origin
aaatttggatagccagggagtgaaaaccccaccaatcttaaacaagacctctgtgcttcttccccagcaacacaaatgtcctgccagattcctcctggaaaaaaacttctgctcctgtccccctccaggtcccaggttgcccatgtccaggaaaagatggatccccctatccaaatcttctccgtggtgtgtgtgggtggaggagtggaccctggtccaggcaggggctccagggaagagaaggcgtcacttccgggggccttcaccagtgtctggtggctcccttctctgattgggcagaagtggcccaggcaggcgtatgacctgctgctgtggaggggctgtgccccaccgccacatgtcttcctacccatctgctccccagagggctgcctgctgtgcacttgggtcctggagcccttctccacccggtgagtggccagcagggtgtggggttatgtgagggtagaaaggacagcaaagagaaatgggctcccagctgggggaggggcaggcaaactggaacctacaggcactgacctttgtcgagaagagtgtagccttcccagaatgggaggagcagggcagagcaggggtagggggtggggtgctggtttctgagggactgatcacttacttggtggaatacagcacagccctggctggccctaaggaaaggggacatgagcccagggagaaaataagagagggagctgcacttagggcttagcaaacacagtagtaagatggacacagccccaatccccattcttagctggtcattcctcgttagcttaaggttctgaatctggtgctggggaagctgggccaggcaagccagggcgcaaggagagggt

SEQ ID NO: 7717 - DNA, 1775 bp, Artificial sequence
  DNA replication origin
cggggccggggcagtgccgcgaggggctcgtcgggcggccgcagagtcggcgccgggccgggcggggcgggaggagcggccgggaggagcgcgggcgggcgggcgctgacccgggccgtacgcggctctactgccccgggcgccggctccggcccgttttatgccccgcgcccgacgccccggccgggggcctcctcctcagcaaacggggcggcggcggcagctcggcgaggggccgggctgagcccggggggtccgacccagcagcagcggcccggatcgcgggtgggggaggggagggaggggctgggaccgggcaggggaggagggaggggcgggaggggaagggggagcgggggagggggaggggagggaccagggggcgcgaagagggggaggagaggcgggcccggagccccccgctgctggcggccacagggcggctggaccaggaggtcggtgtccagcccaggaagggagcctcaggctagggaggggcagaggctaggcctgaggcctggaccgctctgtgagcgaggacccggttccgcccgaaggatgaagacttgtctttaaagatgacaacgtacaggaaaggtccatcagccgatctccccctgcctgggcccacagcgccccccaaaccctcaccaccctctctcactgcctagcctgcctccctaccttctctctgaggtcgctcctcattcttgtgttacccaggacagggacctagccagaaaccggcagcattcccccttctgtggagtgacagtatctccctctcattgtaacttatcctcaggcgcattcgacagtcccctcttgctttctcacccccttccttcacccaagggaccctctgcctctccagcccactcccagcctcctttctcttggttccctggtcatgcctgcctccctgtctcctgtctctccctcccacacacacccactatcctcccagctatcccagcaccctccttcctaatcttgggagacatctcgtctggctggacgggaaaattccaggatctaggccacacttctcagcagacatgcccatccttggggaggaggaacaggagagagcctgaggaagttctgggggacagggggatgatgggatcaaggtcaggccaggaagcccctgaggacagagactgtggggagactgggactgggaagaaagcaaaggagctagagccagggccaaaggaaaaggggggccagcagggaggtatttgcgggggaggtccagcagctgtctttcctaagacagggacacatgggcctggttattcctcttgtcacatgtggaacggtaggagatggaagacggagacagaacaagcaaaggagggccctgggcacagaggtctgtgtgtgtagccatctaagccactggaccccagcagacgagcacctaagctcaggcttaacccagtgcacgtgtgcgcacatacatgtgccccgcacctgacagtccactcaacccgtccaaaccctttccccataacaccaacccataacaggagatttctctcatgtgggcaatatccgtgttcccacttcgaaagggggaatgacaagataggactccctaggggattacagaaagaaaagcaggaaagcaagcatcctgttggatttcagcagcaggtatgatgtccagggaaaagaaatttggatagccagggagtgaaaaccccaccaatcttaaacaagacctctgtgcttcttccccagcaacacaaatgtcctgccagattcct

SEQ ID NO: 7718 - DNA, 933 bp, Artificial sequence
  DNA replication origin
gctgctcctcgggctgctgctgctcggctcccggccggcccgcggcgccggcccagagccccccgtgctgcccatccgttctgagaaggagccgctgcccgttcggggagcggcaggtaggtgggcgcccgggggaggcgcgggcggggagtcgggctcggggcgagtcagcgccagcccggagggggcgcggggcgcaggtggctcggcgcggcgggcggcccggagggtgggcgggggcagaagggcgcggtgcctgggacccgggacccgcgggcagcccccggggcggcacacggcgcgagctgggcagcggcctccagccaagcccgtccccgcaggctgcaccttcggcgggaaggtctatgccttggacgagacgtggcacccggacctaggggagccattcggggtgatgcgctgcgtgctgtgcgcctgcgaggcggtgagtgcaccccgcggccggcccgggccctggcgggtggggagcgccgggtcgcgcgggcgtcggagtggactcggagctgctgagaaggagcccagtcggcagatgttggggatatttttctggtggaggaaggggaatcagcccctccaattcttaggtgctgttactgatcgcccactctgtgtgaggctctgtgccaactccgtttcgttccctgctcatctaactctcatggcagccttgctagatagagagtattattatccccattttccagacagggaccttgaggcccagagagatgaagtagcttgtctagggtcacgcagcttgtaagtggcagagctggctgactctgcgggacatccttgcctgggggggtctcatcagttggcatcttgcactcacttgggtttcccgccttttccgggagcagcctcagtggggtcgccgtaccaggggccctggcagggtcagctgcaaga

SEQ ID NO: 7719 - DNA, 2040 bp, Artificial sequence
  DNA replication origin
ggcccagagagatgaagtagcttgtctagggtcacgcagcttgtaagtggcagagctggctgactctgcgggacatccttgcctgggggggtctcatcagttggcatcttgcactcacttgggtttcccgccttttccgggagcagcctcagtggggtcgccgtaccaggggccctggcagggtcagctgcaagaacatcaaaccagagtgcccaaccccggcctgtgggcagccgcgccagctgccgggacactgctgccagacctgcccccagggtaagtcttgctccgccctgcggggagggaggcagggccacgatactaggtcccgggccacttggatggggcgtcggactggcctttcccatggccagctgaagcccgtgttcttacccccccgcccgcagagcgcagcagttcggagcggcagccgagcggcctgtccttcgagtatccgcgggacccggagcatcgcagttatagcgaccgcggggagccaggcgctgaggagcgggcccgtggtgacggccacacgggtagggggctggcgaacagcggggttgtggttgaggctgggccaccaaagcggcgtttgacagtgctcaggccatcttcctcccgtcccagacttcgtggcgctgctgacagggccgaggtcgcaggcggtggcacgagcccgagtctcgctgctgcgctctagcctccgcttctctatctcctacaggcggtgagaaaggggaaggagcaaggaggggtcagctgccggggcccgggagggaaactgggagagctgggaggggctgcttttggctcagtccggcctcacccgacctctcattcccaggctggaccgccctaccaggatccgcttctcagactccaatggcagtgtcctgtttgagcaccctgcagcccccacccaagatggcctggtgagatgatgccatttatgagcacttgcccagtctgggcactgtgccgagagcatgctctgcattgcctcccgtggtcctcaccacagcccagtgggaggaaggcactgacattatgatgcccattttacagaagggggaactgaggctcagtaggataatgtgatttgttcaaggtcacacagctagtaagtggtgcagccaggattggaacccaagcatctggctccagcgttctttcttaagcttcctagggcaccctggaggttcctttccatgttcctttttcataagccctgcctgggcatcctaattggcctagcctgcacagtgtctgagcgtagggccttcttgtctctctgctccaggtctgtggggtgtggcgggcagtgcctcggttgtctctgcggctccttagggcagaacagctgcatgtggcacttgtgacactcactcacccttcaggggaggtctgggggcctctcatccggcaccgggccctggctgcaggtagggagcaaagagccccgggcgtgaagttctgagtcttctctatcacccaggaaagggggggagggtttctgacgggctctcatcatcgtcccttccccagagaccttcagtgccatcctgactctagaaggccccccacagcagggcgtagggggcatcaccctgctcactctcagtgacacagaggactccttgcattttttgctgctcttccgagggctgctggaacccaggagtgggggtaagtgggatgggggcaaaacacgtgagaaggttagggagagcacctgtctcagaaaggcccacatgtgcggccttgcaggactaacccaggttcccttgaggctccagattctacaccaggggcagctactgcgagaacttcaggccaatgtctcagcccaggtgagtggggatctggctctcgctgccacctgtcttggcctcttgctattgcccatcacaccctgctctgtccccaggaaccaggctttgctgaggtgctgcccaacctgacagtccaggagatggactggctggtgctgggggagctgcagatggccctggagtgggcaggcaggccagggctgcgcat

SEQ ID NO: 7720 - DNA, 1125 bp, Artificial sequence
  DNA replication origin
ggtgggcacaccaccgggtcacagatcaccgttcgtctctgcagagaggagcagaggcattgacgggagtgtccaggccccttgctccagatcccaggacccagtgtgcccttccaggacctcctacctggcaggtgcagagtgagcagagcgggtcgtagttgggcgcccagcgagccccgtgggggcgctgctgcccctcgaagaagcatgtgttggggtctcggggccgcccaggaccaccaggtttggcgggcgctagggccgggagaccaggcaccacaggcggcgcagcagaggctgtatccggagcccccagcgcccgcaccccctcggccccggccgcctccaggcgcagtccgccaacctcacattggttggctatgtgcacctgggaggagaggccaactgaggcagcgctggggctccccctcgcgtctttaccagcggcagctggccagccagcaggagacacctcggccccctgagcgctgcagtggcccaggaggatgccattcgctccacaatcatctcagctgccagggatagggtgccgggctgccagcctcctcatgtagctcatcctccccaccagccgggggggcgctgtgatacgaccacccccaggactcagagacagcaagtgactagtgcaatggcacacagtgcccctccaactctgcaccctccccactgcccccactgcccacactcgccacctacctgccctcggagctcccctctggggctacccttggtggtgatcatcagggaggccatgccttttgccaggtgccgcagcagttccggctccaggtccttcaccacaccctgggcctgcacatagacaggacaatggataggaataaggcactttagggctgagcctactgtccccagttcacagatgaagaaactgagagccagggaggttaaataaagtcttcatggtagcaaagcccattggcaatagtgtggagcttggaagccaggtctctctgaccaagtccatgagaactcaccccacttgaagggcttagtccatcccacctacccccctgaggtccaggatattacatactatccaagacaccccaccaaaaaaagacttagaaaggagaatga

SEQ ID NO: 7721 - DNA, 2161 bp, Artificial sequence
  DNA replication origin
tctctgagtcctgggggtggtcgtatcacagcgcccccccggctggtggggaggatgagctacatgaggaggctggcagcccggcaccctatccctggcagctgagatgattgtggagcgaatggcatcctcctgggccactgcagcgctcagggggccgaggtgtctcctgctggctggccagctgccgctggtaaagacgcgagggggagccccagcgctgcctcagttggcctctcctcccaggtgcacatagccaaccaatgtgaggttggcggactgcgcctggaggcggccggggccgagggggtgcgggcgctgggggctccggatacagcctctgctgcgccgcctgtggtgcctggtctcccggccctagcgcccgccaaacctggtggtcctgggcggccccgagaccccaacacatgcttcttcgaggggcagcagcgcccccacggggctcgctgggcgcccaactacgacccgctctgctcactctgcacctgccaggtaggaggtcctggaagggcacactgggtcctgggatctggagcaaggggcctggacactcccgtcaatgcctctgctcctctctgcagagacgaacggtgatctgtgacccggtggtgtgcccaccgcccagctgcccacacccggtgcaggctcccgaccagtgctgccctgtttgccctggtgagttccccgcaggggagtggagggaggagttggcccagtgcggacaggtcctttggggagggaatgagggtggtcactctctgctttcaccatttctttggctccacagagaaacaagatgtcagagacttgccagggctgccaaggagccgggacccaggagagggtgagctggaagggtgcgtgcagggtgggaggccccagaggagccattaggttgaaccaggagggggacaagaaggggagagtatatagggggtggcctgaggggcacagattccaagtgatgcctgacaggactcattagtgttactggcccccaggtgggcccttggcttaggctcgtgtgggggtggcctgaggctcaagccttggttgtgggcccagctgatgagctcatactaatggctgctgggccctgttccccaccaggctgctattttgatggtgaccggagctggcgggcagcgggtacgcggtggcaccccgttgtgcccccctttggcttaattaagtgtgctgtctgcacctgcaaggtatggccacccaatcttctctggtgccataacccagcggggtctgcagagatggggaggggctgccaggtgaggaaggcccgtccttggtgaggagggctcaagaatcaaaacgatatgagaaaaggcccttgcgctctgagagtcggcttcctgtgggaaaatgaacagggctgacctgggtgtggattctggctctgccagctaactagtgccagtgaccctaggcaccttctgtccctgagcctcactttcctctcctgtaagcagatatgatggcacctaccttgcagggttctgatgaggagctgagtttaggtctataaagccagtccgggcctctgagtaaaaggccacagagagactgcatttgaggtgtggaataggagagggagtgggcaggaggcttatgtgccccctgcctgacactccttgctcaatggatccctacaggggggcactggagaggtgcactgtgagaaggtgcagtgtccccggctggcctgtgcccagcctgtgcgtgtcaaccccaccgactgctgcaaacagtgtccaggtgagagaggtggctgagcactgaggcctcacctttgggttgaggcaggctttgtcctgggtgaggggaagggtgctcagttaattgagcattatactgagcactgctctgtgcctagcctggagccaggactctaaatgcagtggaaagaatgtgatatactagtggggtatgatgggttctggttcctgctccatccatccgtccatccatccatccatccatccatccatccatccatccatccatccgtccattcatctatctatccacccatacaaccatccacccattgatgcatccatccatgcatccatccatccctccatccatccacccatccacccattgatgcatccatccatccatccat

SEQ ID NO: 7722 - DNA, 895 bp, Artificial sequence
  DNA replication origin
gggccgagccgccgccccgattccggcttcacccgcccgcagcgcgcggcgccccgcgctccattcgcgctacctggcggctggcaggctgccccaccccaccgcgggccacacacagccagggtgggaccccggccgctttctctttcccagggagaggactggaatttgggggggaggtgggaattgaggaagtcgggaagggaggagtagagaggtgggtgagaagggggaggatgcttctagaaggcgggtgagggagctggggaggccaggaaggggaggaaggggtaagaggtgcgggagggcctaacggggagactccgggggcaatcagtgggtattcacagggagctgggcgcgagcatcagcgggatgaaaggcaggtcagggcttgcccgtcaggtccggactgcgccctggaggggctcccagtagagcctgcgcaggagcgcggggagcgcgcagcccaggcctctggccaggtggagcaagaggagggcggaggtggacagcgcatctcgcccgtggaggacgggcaaggacgccgcctgcccagctgttggagtctcctgggcacggactgagggggagggtctgaagagcccagagatcccagagggaccagcttcttgttacagggaaaatcctcaccaccgagagatgcaatgagtgaatcacggtctagccctgtttgggagactctgtggccattaaaaatggcgatgctccccagagtgtgtggggcacaggaatcctctagggggcttacgaaaatgcagattccggttcgggcctgacattctgctcttctcacaagccccctggctcctgctattgatgtagagctagctttagattgtacggtaaagggaaaaccagtaggtgtgggatg

SEQ ID NO: 7723 - DNA, 871 bp, Artificial sequence
  DNA replication origin
cttttccccttttaaacaagttacttgtaacatatctgacatacaagcattcatgtctttcttccctttctacatggataataagggaatctgtggaggcatttctgcctgaaaagaagagaaagcagaggaggaggaggaaggggagaggaggaggagggggaggaggaagagaagcagaggaggaggaggaaggggagaggaggaggaggggggaggaggaggagagggaggaggggggaacaggaggagtaggaggaagaggagtaggagggggaggagcaggagggggagaaggaggaggagaaggaggaggagggggaggaggaggagtaggagggggaggaggaggagggggagaaggaggaggaggggaggaggagtaggagggggaggaggaggagtaggagggggaggagtaggagggggagaaggaggaggaggagggggaggagggggaggaggaggagggggaggaggaggaggagggggaggaggaagaggaggaggagatgcttcctaaggggtcgctgcctatattcaggttccattggtttctctccaccatcactgaaatgggcatttccacctcacagttcttattgctagaggtacaggaataactgtacctccggactcccaacatcagtctcctccccagcctgaccccagcctcaccctcacacagcctcagctcccactgagccccactctctgcaaggcggagggctgaccaaaagcgaagaaggccaggcggttggattctcagggccggcttacctgtcaaggacaagcggaacctcaaacctagagaagttcagagaaaatccaccagagggcactgcagcactgccctggaaagaacatcccg

SEQ ID NO: 7724 - DNA, 1366 bp, Artificial sequence
  DNA replication origin
gtcagctgcgggcccgactgggatccggggcttcgggggcgcgcgccgtccggggtccgagctgggatcttgctgcgccgctcacgtactcacttctgctgtccccagcgctggcgcggccgctctgggcgagaggggtgggacggcctgcctgcccgtcaacgctgaggccccgcccctagcggctggccacccactcacagaccgccaggcccgctggttcggcctcgagagcactcagctggagttcagttggcggtgtctccgccaggcccaccctcggggtctcaggggccggagtgggcggggctaaggaaaagatgaattagattgggcggagcgatgctgtccatcagagggagaaccccgcctcctggcgcccattggcgattagtaacctaaactgagtccgaggaggtgccaaccagctaagacggaccgggggcgcccccatgtggcccgcgtctgccctgcgacgccctcatgtggctgtagcttagtgctacttggggggacccccaccgcgatgtatcctgtgacaagggacttcatcgtttcttcattctttcactgggctgcgtatttagtcattcattcagcacatctttgtgagcgcccacaatgtgtcagactgtagtacctgcgggtgctaccgcaatggacaagacagaggcttgtgttactagcttagcagtggaggacgtgggattaagtcatcgctgtagagtgtaaggagctttattgcagaggaggaagagttcctcgagcgtacgtgagggcgacggccagtgtccggccctgaagaactggcattcaagctgaaataggaaggatgagtagtgagtggcggattgtgtgttccgggggagtgaggaggggagcaaatactctttgtgtgaagacctaggggcaaaagaaactgattcactggaggaatccgaaagaagttcagaatagcttgagtgtaagagggactgaaaggagttcttagaagtaggtgttgggggaagaaggaattttttttggactcatgataaggccttcctgagagctagggtttgaagtaggggcatgaccttggatgatcatggctgctctggggagcatgcatgggcagaggccatggtggcagcaggagaccagtgagggtgctgtgcagtgcgcaggcaagggaagatggtggcttgggctagcgtggtggccctgaggagggagagaagctggcaggtgtgaagtgtatgtaggaggtagagttcacaggaatttgtgattggttggtggagagatgtggtaggtgaggacgtcaaggagaacagtaggtttctggtttgggcaaatggacttctgccccatttattccacaaac

SEQ ID NO: 7725 - DNA, 1049 bp, Artificial sequence
  DNA replication origin
cggcctccccaccccatccctgggccccggagcgggcgccggtggcggggcctcctccgacgtgcgctcaatccgggtcggacccacgctgctagcccgcagccccgcgaccccaggcaccttgttcccgggcgcgccccccgacgccgctcaccttccagcgcccggcagccggcgggcagcagcagcagcggcagcagcagcagcggagggagcagcggcagaagccccggcggcggcgacggcggcggcggcgggcgggctctggccatggccgtggcagctctaggagccgagccgggccgcgccgggccgggccgcgccggcggggctgcaggcacccgagagagggtgcgctcggcgggctccggggcaggctcgcgtcgggtcccaggagatccaggagaggagggaatgcaatccaggcgggcggctccgggaccgaggcggtgcaccgagcccggcggtcctggggatgcggacaggtcggtcccgcgggaatctggacggaccggtccaggaggatccggggcgccggggagctgggtgcctgaggacttggggggcgggccggggcaggagggtgcaggtggtcgtgattcgggatgcacagtaatctggcggtcagctgcgggcccgactgggatccggggcttcgggggcgcgcgccgtccggggtccgagctgggatcttgctgcgccgctcacgtactcacttctgctgtccccagcgctggcgcggccgctctgggcgagaggggtgggacggcctgcctgcccgtcaacgctgaggccccgcccctagcggctggccacccactcacagaccgccaggcccgctggttcggcctcgagagcactcagctggagttcagttggcggtgtctccgccaggcccaccctcggggtctcaggggccggagtgggcggggctaaggaaaagatgaattagattgggcggagcgatgctgtccatcagagggagaaccccgcctcctggcgcccattggcgattagtaacctaaactgagtccgaggaggtgccaacc

SEQ ID NO: 7726 - DNA, 1945 bp, Artificial sequence
  DNA replication origin
tcctctcctggatctcctgggacccgacgcgagcctgccccggagcccgccgagcgcaccctctctcgggtgcctgcagccccgccggcgcggcccggcccggcgcggcccggctcggctcctagagctgccacggccatggccagagcccgcccgccgccgccgccgtcgccgccgccggggcttctgccgctgctccctccgctgctgctgctgccgctgctgctgctgcccgccggctgccgggcgctggaaggtgagcggcgtcggggggcgcgcccgggaacaaggtgcctggggtcgcggggctgcgggctagcagcgtgggtccgacccggattgagcgcacgtcggaggaggccccgccaccggcgcccgctccggggcccagggatggggtggggaggccgcccctggagccgcctcggaggctggagctggctcggaggcaggcagcccgcgggttggggggtcgcggggagctagactcgggacgaacgtcccccagagtcctggccctgctgtgagctttcgcgggagtcccccacactcacggcagagaagtggggctcccggcaccccccgaagtcgaggacgtgtgggcgaccccccaggcaaggcgagggccgcggggctgtggcgggtgggggcgaagcgggactccccgggttggggggcgctaatgaggagcccgttggagttaactgtgagagtgtgagtgcgagcaccccgatttgtcaggggaccgctgcgggggcggacaggcgggggcctgttattgtttatggtttaccgggcgccaattacacccgaggtgctgtatgggcgggcccccgcaccctttgtggaggctccctctccgcctgctagagcagggcttgggtctccatttgaacccctgaagttgcgggatttgccccaggtagcagcagagcccggcgccttcctcagtagctggtgggaaaaggccaggcttctcaataggttctgtgaaacctgccaagactgctgtggggggcagctccaacttccaaatgattgtacttggatgaacagcccggcgttgttggcgctggcaggagagctcacacgcatgccacttgacacaagcttgccgcggacagaggccccaacaccagccacaaacaatagggaggcccacacacactcacgccccgtttccaagaatttcggagccattaaatgagagagggtcagaaccttccctaaagtggagggagggacgccacagaaattcgagggcaattggaataaaggcagtacttatttggggtatctttaacagatctagttactttcttagtttaggaacgaaaacacgaactctgtggaacttggcttgttcttatgttcacagtcggtaaacttaaaggttggaaggaaaaaagaacacagttcagagagaaaggcatcctctggtgcgttctaatgttctccagaggaaagacctcctatgatcccccaccctcctcatctctgagcctgctgtgctgacagatcgagtcccacgggtggacacatgcaaattcagactgacacaccgaggtctcgcccacactcgcacacactcacccacatgtgtgtgataggatcgcaggcgtgagaacccagtgtggggctttgttgttgattgccttgagggtgtgagccagggagcctgttctagttgccagatctgtgtctgggtctctgtgtcgtagtccaggagaggcgacactggtacacacacactcatacacttacggggctatgtgtcacctgtgtgtgtcgggccacaaggcccttgttgtgggtgtggtgggtgctggtgctgagtgtggagtgggagtgtggtttgggtcaggtgcacaggggctacctgaggaggctcacttctccctccccccttcccttcctttctgtctttcaaccctcatcacctact

SEQ ID NO: 7727 - DNA, 1986 bp, Artificial sequence
  DNA replication origin
gccacacccagaatcatcttcatgcccctgctccaccccagcctcgtgacctgactgacagctcctgcccaagccaggacaacaggaagcagggctggggctgtttccctacacctctggctaaggctgccccagcacctctgcttcccttgcaagagtggcccatgtggctgccctgcctgagcgagaggcaccagagtgttgggggcaggatgaggggtaccaccctctcccagtaactcttcctctaccccactggaagacatcccataaacagaaccatgcttgcagggtgtgtgtgtgtgtgtgtgtgtgtgtgtgtgtgttgcgggtgcatggaggatgcacctctgaggctttacacaaatctaggtattgatacttacaccatgtcagggtgctcctttgcaggggctgtggcatatttcagtgtcattggacatctgtgactttgcagctgattgtagtttgtgtgactaaaagcatgtcgccaagtctatacagggaaactggtgtttgtgtttgcactttacaccgaagactgtgtgacttgcagctggtgatagcatgtgcaattgggtgtgtaaggagaacatactgcagggttgggggtgagtgccctctgtgtgcgcatatgtttcaggaaatctgcacataggtaggctggaagcgtgggtccgcctaaggcaagccagatctctgtgtaggaaagattcactgtatatgaatgtctaaggaagactaatctgtttgtaccatatgcatccgtgtgtctgagaaagacagaccatggctctgtgtgaagctgggtgtgtgtttgtgggcggctgtggctttgtgtgtttttgtccaccatatgtgttgacttgtcactctttagccccagtggcggggagtgagcccagcccccaggactggatgctgcgcgtgcatctgtgtgtttgtgcatgggtgagggccacacagctgctgccacgtggctgctctccatggccctgtggaaacctgaaagaggtattgcttagctcctgagcatcaaagctccagtccccgaaagaccccaggcctggtgactacctccctggtgactttgctgggcagttgtggtttcctgcctgacacagcccagtgtctagggtggccagcctcttctcccctctgcctcctgcagatacatggcaggacggcgagggatggggtgcagcaggcagctgggggagttgagaacttgctcactcactcctcttttgtctttacccgctgcccctcatacccccgtcccaacgtgtgtatgtacaacacacgtacacacacgtgcacacacatgcacacgccgcacacacagcacagaaaaggtgggctgggtctctttctcccaataccacggacagatgggttctatgaccccccccccacatccccctcacctcctgccgaaggcagggaccaggcaccccagggctgaggagggccttgccccgtcctctgtgcctgggcaggctgaagggagcaggctcctcctctccccctgagaaacggggaaaccgagagcacgcggccccctccccaccggagtgaccgagcccttcctcgggcacacatgactcgaaacccaagtcctctcttcattaatgggaaaaatgtggcgagattgagcgatggccaaggctgagcgatggccaagggccgatcccctccctccctccctctctcgctccccagaaattaaacagaaatgaagagcctccctgcctccctcgctccctccctccttcccgccgccgcctctccgccgtcccctccctccgctccctcctcccggagccagcgcagggcttgttttaaactgtggaggaatctggctggagggggagggggctgaatatttgggtttaaacagttccagatgggtttggcacaggctgagcagaaggaagtgagggagagggaggagggaggcggcgcgagggagcggctggagccccg

SEQ ID NO: 7728 - DNA, 1123 bp, Artificial sequence
  DNA replication origin
gctccgcacatccctccggctccgtgccgcccaccgcccgccagctccagtcgctgccccgcccgcctccctccccgcctgtctctgtgggccccggcttctgagcatctcggcttccctcgagtaccccccaggccgaatgtctgtgtctgtctgtctgtctgtctgtctgccagaggccaggatcgctccccttacagccgggccctcaggggaccaggggctgcggcagcgggaggagcctccctccctgcagtgaatggctgctgcctgcagcccctttgcctgacatggcggggggctggggtcacagctgccttgtccacccacggggtcctccgccgtcctcggctcagacccagcctccgggaaaccactgaaggctgcaagcctgtggccgcggggtttgggcttttccccacttgggcacccagaggggatgatgtagaggcctccagaggtcctggggcaaccctgccccattccagcttcagagctggctgcactgtcttccaggccacgggaaaggagttggcacctctttccttcctttcctgacccaggtctaatctgggggtcacactgtctttcagagagtagggacatccagccagagcgcagaaccaggttcctaagggagcaagtgtatgtcagaaacattaacgggcccctcctatgaccaaacaaggtgaaacagacaagaaaccagctcagaacacaggccgggtactgtgacaaagcccctggccctagatgcacaaaggagggcatcttaccctgacttggaggttcacggaaggcttcctggaggaggcaacagctctgttgggacttaaatgataggcagttttctaggctttctttcatccctcctttacagaggggcatattgcagtcagagtgcaagggattaattatagagtcagatacacctgaacctgatccacccttgtcccctcaccccaagtcctagcaacttcaccttaggcagtgtattttctttgtctgggcatcagtgttctcttctgtaaaagggatacaccaacagtaccttcttccaaggattgcaggaagaattgaactaagagctggtttggggctttggtggtcccctctccaccct

SEQ ID NO: 7729 - DNA, 1530 bp, Artificial sequence
  DNA replication origin
ccactaggggaggaaggaggcctcggcggagaggctgcgtcccttcccctcccctccccgcgtccgccccggggacgcagagagcttagccgtgcggggcgcccctcccccgggccggctgcggcggcgcggctgggctccgtggggggaatactaaggagcgggcgccgccgagcagccccagcgcgggagcgcgcggtgaaggacgggggcggcctgaggagcccgcgccgccgccagctgtgccagggccgctgccagggccgctcccaggctcctccgatcgccgtcggcttccgcggccgggagtgcgccacgcagcagaccctgcaaccttcgcccgcggcctcctccgcgcggcctccctgggccttcaccccagagcctgaaatcacggtcgcatgcttccaggcctgcggctccgcagacccctaggtgcagcctctcgcttagatttcccctgggaagctctgcgctgcctggacgcgtccagggagaggtgtggggccgcgacacgtgaacctctcatctacatggcgtggtgtctgtccatgcctctgtgcctacccagggaccctacccagggtatgcaggtctctcggaaagcacaaagctttgctgcccaaggatgcctcccgatactgggaacatgactgcacttcccccctcccccgcctgttcctgcgtccgaagggcctctgagggccccccaccacgctttctcctttgacatttccagaagctgttttcctaaccctctccccggttcttgttatttatcctctgaacctttcaagtatgcaggcagtctctgggtgggaatcacagccgcgggcctcacttactggctcagcgactttgggcaagttacttaacctctccttttcctcttctgtaaaaagcagttaaaaatacttccttgcctggctgggttgttgtgagattaaataagatccgtgtataaatggagcatttagcccagcgcctgggcataggaagcctcagtgaggagcagccgaacttccgggcctcagcctctgaacaccagtggctctccttccctttgtccttggtcatgtgaccctgggaactgatcaaccccctctaccctcagctcccttaaagacaaaggctgggaaccgactcagtaaaacaccatccagacacaagagcctgcccccaccccaggaaggtctctgccttagaaggaaggagctctggggtagttagctctccgttgccactgacccacttccaagaagtgcgttaggtgttcaaagcagtgagggccaagcacaaaggggaaactgagcctggatgggcccagatctggtttcccaatgcctccagggagttgcgaagggttggcagccagggactgtgaactctgaatcagggaatcttgctttgggaggaggaataagaaggggcaagagaatcatcttattgcctttattctgctgtcggcccagctggccccattgtagggcacagggccaagcttttacacgctcacccatgctctctgtg

SEQ ID NO: 7730 - DNA, 1627 bp, Artificial sequence
  DNA replication origin
cgaaggttgcagggtctgctgcgtggcgcactcccggccgcggaagccgacggcgatcggaggagcctgggagcggccctggcagcggccctggcacagctggcggcggcgcgggctcctcaggccgcccccgtccttcaccgcgcgctcccgcgctggggctgctcggcggcgcccgctccttagtattccccccacggagcccagccgcgccgccgcagccggcccgggggaggggcgccccgcacggctaagctctctgcgtccccggggcggacgcggggaggggaggggaagggacgcagcctctccgccgaggcctccttcctcccctagtgggggggaggggctgtgcgggggcaggggcgggcgatgcgggggcccaaggtggcccttggactaggcgccggagctgtcaacggggcgaggtgtggcgggcggccgggggaggggacgcggtgccgagtggcctcctgcacagccgctcagcattccccggctgcaggcgcaaataaagcggagggggcgcgcggagctcctgctcaagggtccacttcctactctcgaagctagggaatggggagggatccgtggcccgggagtcctgcgaagccttcctcgccatcctgtgccatcgccctgacctttatagcgggagtctgggtggagggcgcggagatgctggggtgggggctccactcgcataggtgtgacatcgccctctactgggtccgcagggagggcaagatcgtggtcgtttagcgccaaggcgggaggggccctggaaaccacacgatcaggggaactcttggactgtgcgccccaggtcgaggatctcgagggatgtcttgagcccagaggtccgggggaagtaaggtactctgtcggctgtgccttgtgcagccaccacgcatacctcgctcctcctgtatccaggtatcctcgcctgcatgcgtgccctctcctgccacttgcccacggaaacagctgacaggcacacttcactgacccaagctacagcacagcacagcccttactccctcactcacggtcattcgtcctcagtcacttgaccctctaggccccaccttccaagcccacacgccctaagagtctcccatggcagaacgggtaggggaagggatgcagagagggaagaaaagccatccccttcctggaaggcgcctcccgcccccagcgcacttcctaccggaaccgcttcacctaactaacctgtgtctcactggaaagggctgggaggagtcctcagaacccccagcaggattgcaaggagggagggctatgattaaagcagaggaagagacagaagagagagggcgcctcaggagttgtctggctcttctggggacagataaggagtgagagggaatgagattttagtaggcctagtgttggttactttcacacttcctgggggcagaaaattagatctcccaagttagggctaaaaggaagtcggtgggagtgaggggttgttgaggcttaggaaggggctgctcccccttgattccctcattccacttgccccatgggggcagttatagccccaaaggaaccacttcttgccctcactatgcctgagctcagagagtaggaacagctaggg

SEQ ID NO: 7731 - DNA, 1926 bp, Artificial sequence
  DNA replication origin
aatggccaggaggggcccgccgcccccagcctcccctcccgccccgcccgcgggccccagccccggggctccccgaagccgccagccgcggctgctgcccctgtaatccaagtggcctgcccggaggtgcggccgccaggagcggcggggaccaccggcggcggagccggcccccggcccgggcggcagactgggaggtcagcccggagggagggcgttggggagcggggtaccccggggaggggggctctcaggctcttaatccccctgaaggttgcagatcaaaggtgcttgtacgaggccgaggcggggcgggtgggtcgggggccggctcgggccgcagccttccccttgctctgcgggctggggctcccgggccaaggaccccagaccgacagccctcgggaggtggctccggctgcggcgaggactgtgggcctctctggctcgggttcgcctgcgggaaggtggccaaggcgcccccacgggccttcgtggaacttccccctacccgggtcgagggaagggtgtaggtgcctgcctccccccaccccagaacagaacgctacagtgccaggcacttgacagatattctttcatttaatcctcactgcgatctaatgggtttttaaaaaattgttattattattagctcataaacgaggaaacaggtttctaagaggttaaagccgcttgcccaaggacatacaccgctagaaagtgacagagctagcattctaccaggctcaaagccccgcccttcccacctggctacccccgcagcccctccactctttcctcttctctcccaccctcttcgtctgtcctctcaggctccttcagttccacaagaacaacccacccacctgtggccctggcgagtgaggcgggggtggggggagcagggcagtgccaagggtgcggcccatgtggcaatagctacaggctaaatgtgagggatggggctgggcaagcatgtgcctgggttgaatctgtgctgaaagaatgttcgtattccccctccccagaggtggggctccctgctcagaatagaaccgagcaagtcagagctagaaggggccttcaagactgtgggatccaaccctgtctttgagatgaggaagctgagacagggagaggtaatgagtcctgcccaaagtcacacagccagttggtgagagcaggaatgagaggtcaggtgatcagtgagtgcctgtgtggtgccgggcactgggatagctgccacactgcaaagtgggcactatcttctccattctagagatgtggaaactgaggcttagagaagctaagtgtgcccagggtctctcaggtagaaagtggaagagctggttttgaacccagatctttctgactccaaaacgccttccctttccaccatcccaagaacactgggctaaggagtagagattggttgagagagggtcatgcactgaacaactctagagacaggagggaaaggggatgcaggctgaggagcattccattctgcaacctgagtaatcaggtcccttctccacggcctcctcgctaaaatggcctaaatactgaggtccttccagaatcccctcttgagagtattggtgggaggggagaaagtgctcttctgggttgcaaaagtctcctggggtggtggctcttctgggttgcaaaagtctggagatacaagagagggcttcatccacaggcttcctctgattcctgacctgcaggaggccacggttcagctccaggcaggtgaaggggccttacagcttagctccttcatgccagaaccatacctggcttcccaggggccaccaagagtgcagtgtccctcctccctgtccctattggatatgccctaccagcccggctccatccacagactcctgaagcttcatcctcatattcctcccgcttcgtagt

SEQ ID NO: 7732 - DNA, 2034 bp, Artificial sequence
  DNA replication origin
tcctccgctccccgcggccccccttccgcctgcaccgagggtcaggccggctcggagtgggagggtggagcccaccgacctctgcctctcagaaagagtggccgctgtgccctccgtggcccaggtccgactactgaacgtttccaagccacctaccttgcttctaccccttacccgctgggagaaacccccacttccccaaagctctagaggcgagaccctgggttcctagtccgctttgtggtccttggacaattgcttccccgtttccccaagtgtaaaacaggacgtcaggacccttttcgtttggttgttgtgaggattcacaaagcacccgccgcagtgagcccagggtcccacccagcatcaaccaaaggtttcaggagctctaggatcgccttccccctcaacccattgtttgcaaatgttgcctatgtttgcgtttttctgcgaaaagccttcacccttagataagaggggtcagcaatggtgcgagagcttcaagtgtatttggaggagaaggaggtagaattttggaacacagctgtatcctggaaaaatcagagtccaagattttccccaggaaaacaaaaagtaaatgccttaatgaaagaacacaatgtttcaatattgtttaataacgattattatgcccattttatagatgacagaactgaggctcaaatgactccctggagatggcagaactgtttaaaccatggagttagtagttgaatccagctcctttcattccaaactgtgtgctctttgctgctctgcgctgcccttggacatgactattttgtgctatttatagtttctgagcttatcacttttttcttaatattggtgaatttttttaagggactccagcctgttctaactgcgctcagggaggataaagaggaaagtgtgtctctgcacttgtgccgggcttcaaaataccaggcacggggtgttgggggagttggggatgggtggagtggcagggaaggagcctccagggaaggcgaggttccaccagctggagtggagggttctagggaagcccctggggatctcctctggctctagccatggagagccttaaacacagctctcccacacctcccacacccaggatccggagtcagccctgcagtgcccagccacaggcctgcccaactcagcgggaaaggatgcttggtccggaggtggcccagcaataggtctgctcccctgggggtatttgcctggcagccagggtaggacacacctctgggaggacagacaggcattcagaggttgagacagggagagacaaaggtggggaggaagcactagaatgagagggatagacaggaacacagagagggaacaagggagctattcagagagtcagaaagagaggggaggccgccagggagagagaaaagacagagaaagaggggcgaaaagagagacaggcaggcaagggggtggtgggcaagaaggggaggagagcagggggagagagagggaggagtgagaaagctgggcaggaacaagagacaaaacagagatgaagaagaaacgggagaaaggggagagggagaggtaaaaaagagaagtggagaggagcagaaaggaggaagagtagaaaatgggggagagggagaggagagaagcccaggggcaggaaagcagaggcagcgccaagagctggagagagggaaagagtgaggggcgacgaggaggaccgaggggcaacaaggaggatcgaggggcggtgggtgggaccgtgtgctaagccttttctttctcctttttggggtgggcggcggatctccgcagagataacccagtcaagccccctgccccccgtcccagcgaggggccgcagctgtataaataccgggggtgggggagctgggctgccgcccaggggtcagcgacaccggagaaggctttgctgtcattagctaattgagccccagatgttaagaaaaggttacgtcctcctccggagagtttttctttttaaacactttacacagattccccggccaaaatggc

SEQ ID NO: 7733 - DNA, 1455 bp, Artificial sequence
  DNA replication origin
ggtgcaggcggaaggggggccgcggggagcggaggacggtgccgaggcctcgctgctgctgcagcgcccccgccccgcgtcgcctcccagccctggctcccagtgctccgggcttgctgacggtacagggtggacagccccgagacattttcatcagatctcgtctcccgcagcccagcgctgctgccgggggtcggacagggccgatcccagcacccctcccccgagccctggctgggcgagaaaccgagatggtggctgcagaaaccggagcccccgcgccggggcgaccgcgaggggccgaggcctttgagagcgctgccgccccttgccaaggtcaatcaaaccctcccacgctccggaggcgcgcgctgcgtgctctaggcagcggggattggggccggaggggcgcgtcccggcggggccgggcgagggtgggtggggggtctggcctggggggcgcctcccgccccctcttggggaaggtgctcggagactcccgggccctgggcggagagtgtggggaggctgggctaaaggcagagacccaggccgagggctctgacccacccaagaggaaatagctactaattagggacgggacgtttttatgctaatatgcacctggctgggcttttctggaggctgagaaagtgtggagtggaagggaagaagttccggagagcgggaaacttccggaagcacttgattcctggataaaagacaactcttgctctcctgctcacccgctgtgtggccttggggaagttacttagggacgtgtaggagcttcagtttcctcctctgaaaaagagagaacacggtcaagtttcttcccaagctcagtcactctgtcagcaaaaagatggaaagccagccctcgggtggctcttggaggatggaaaggggacagaattgtgggaggtgtgcgtcgcgggacagagtcctaggagagccgggtgcacactgtcaagggcctgcgactgtcttcactgttgcccagaggtggagagtgggcagtagagggaggtcgaacagaggtcctccgattgttggacggagtgtcaggaggtgctccgctgtaaaagaaaatgggaggtggatggggagtagtgtagaggagtgggtattctatggtgggaccgacttgagcttaatcatagagttggggtggaggggagggtgggttgaagatgccaaggagagaaaagggagatgactgattgagtcaagtcctgaagaaggcctagtgggtgggagccaggcagggtgcaggttggaagaagtaggagacaggttggaagtggggaggaggaaggggagaggaggaagtggtggaagaggagacgaagaaagaagggtgaaattcagggtattttgaagggagggaacaccctccattggccttactcaactcagctcagtattggaggaggcctcggtgttcttcacaga

SEQ ID NO: 7734 - DNA, 1038 bp, Artificial sequence
  DNA replication origin
ctgaggggatttatggagaactggtgaggggcctggagacaagagacccaggcagccggtccctgcctctttccaaacctgggggaaagcagatgcctctgcaagtgctgggcctatccaccaaactgctataatagaaaactactgggacacgtcgtcaaaaaatcaatctgcaaacactaggtcataaggaattaggtaataaccagcactgctttccaaagaatacattctgtcagagtaatccaatttccttctaggacagaatgttgggcctggtaaatcaagaacggcaagagacacataatcttcctcaacttcaagagcaaggcatttcatttcatcttccaagagaagtctcaaaagagaaactggagaaatggggtctatagttggcctttctggggttgggcaaatgaaaagaggttgaagggttagcccaaatggcagttctttatgttataggtagcatggatggattcgaatggacagaggttggggtgggtggggtactgtgctggcggtggttagacgtgtcaggggaggtaagaggggcagtggtggtagaaatggtggtgataattgtcatgaaggtagtgatactggtggaggtggtgatgatggcagagagggcagttgttggatgaagatgccggtagtgatactggcggaggtagttggtgatggtagtaaagatggaagcagtggttatggtggaggcggcaggggcggtgcatagtgatgacggtggagctggaggtgatggttgaggtggagatgatggtgatagagatgctgatggtggcgggtgtggaggtggtgataatagtggagacagagagggtggttgagatgaagatagcgatggtagagatggaaacagtgatggtggtagaaacggaaatgtgacaatggtggtggtcggtggtggtcatggcagcagcaagcaaacccaggctagcgatggtaaatctgggcttcacagccctcctgcctggcatctgtgatggccgctcacactagcctgttctttccatg

SEQ ID NO: 7735 - DNA, 1839 bp, Artificial sequence
  DNA replication origin
ctcatctctcctctcttcctctcccaaccagcaggcttagagacagacctcctctgctgcccacggcacagcctcacagagcatgccacacgccggacacggcacctctcaggcacttatgctgaagtatgaggtggtatgctgactggcactgcaatgcagtgaggtacaccgtggggagctgagcggccctgggatgaattggggtacactgtggggagctgagcgaccctgggatgaagtggggtacggtgtagggagctgaggtacttcatgatgaagtgggggtacagtgtggggagctgagctaccccatgatgaagtgggggtatggtgtggggagctgagctaccccatgatgaagtggggtatggtgtgggaagctgaggtaccctgggatgaaggaggtacactgtggggagctgaggtaccccatgatgaagtgggggtatggtgtggggagctgagctaccccatgatgaagtggggtatggtgtgggcagctgaggtaccctgggatgaagggggtacacagtggggagctgaggtactccgtgatgaagtggggaatggtgtggggagcggaggtgcccatgatgaatggagtatggtgtggggagctgaggtaccccataatgaagtggggtatggtgtggggagctgaggtaccctgggatgaagggggtacactgtggggagctgagctaccccatgatgaagtggggtacagtgtggggagctgagatgccccatgatgaaatggggaacagtgtggggagctgaggtgcccatgatgaatggagtatggtgtggggagctgaggtgctccatgatgaagtggggtatggtgtggggagctgaggtaccccatgatgaagtggggcatggtgtggggagctgaggtgccccatgatgaagtggggtacagtgtggggagctgaggcacccatgatggcgtatggtgtggggagctgaggtgccccatgatgaagtggggtacagtgtggggagctgaggtacccatgatggagtatggtgtggggagctgaggtgccccatgatgaagttgggtacagtgtggggagatgaggtaccccatgatgaagtggggcatggttggggagctgaggaggcccatgatgaagtagggtaaggtgtggggagctgaggtacccatgatggagtatggtgtggggagctgaggtgccccatgatgaagtggggtacagtgtggagagctgaggtacccatgatggcatatggtgtggggagctgaggcgctccatgatgaagtggggtatggtgtggggagctgaggtgccccatgatgaaatggtgtacggtgtggggagctgaggtacccatgatggtgtatggtgtggggagctgaggtgccccatgatgaagtggggtatggtgtggggagctgaggtacccatgatggagtatggtgtggggaactgaggtgccccatgatgaaatggggtatggtgtgggaagctgagctacccatgatggagtatggtgtggggagctgaggtgctccatgatgaagtggggtacagtgtggggagctgaggtacccatgatggagtatggtatggggagctgaggtgccccatgatgaagttgggtacagtgtggggagatgaggtaccccatgatgaagtggggcatggttggggagctgaggaggcccatgatgaagtagggtacggtgtgggaagctgagctacccatgatggagtatggtgtggggagctgaggtgctccatgatgaagtggggtacagtgtggggagctgaggtaccccatgatgaagtggggcacaccgtggca

SEQ ID NO: 7736 - DNA, 1117 bp, Artificial sequence
  DNA replication origin
ctccctcccggcgccaagctcctccttggggcgctcctgcgaggcggtcggggcccgggtctcaccatcatggccgccatccttctccccctcggcctgcgggaccgggagccccctgctctctggtgtctgcaacatgttttcgggcaggcaggtgcagagcgcgtacacgggccgaggggtgtgggagccgccgcgcaagccccgggggaggggttggacagcggcagtgacggcgggagtacaaggagcaatggcagcgggagctttgtggctgctgggccgcaccgcacgggagtcaaacctgcggccgcaacgccgccagcagccggaacctgcggcgcgcagcctcagtccgcgcccgcgcgaggggccacttccggccacctcagccaggacggcgaccctagtgccgcgcgcagcccctccttttccggtcccttctgggttgggggtgtgcccaggctgctataagtggaaatgccctggagggtggggacgggggtgcgccctgtgacggattttaggcttgaaaagtcgggggcgggggaatgtaaccaggactctcccatccaaggcatgcagactggggaatgtttcggtgtacaagagatgaaatagggatggagtgccccccacgttctttctgcaagtgcctatttgtgagtgtgtgtatctgggattttcagtgctttaccggggctcttgtgcagagtgcacggtgaaggctgcgaggtaagactgtgcgaaccaattagtaaaggatgctagggagactgaaatttattctggacgtaaagagaaaatactgcagcgggatttaagcaagtgagtgtccagaccagatctgtgtcttcggttctggcggtattgtggaagatagattggagttcggccggctaaaagctagaatccagtttggaggattattatagtgcaaactaggaactgggacccggcctatttactgggttgtatcctcggtgcctagagcagtgcctgacacggagaggaactcaataaatattcaatggatcattatgatgagggagtaaggacagcagattccatggggataagaggaaaatactgagaagtacagcaggaatagggactg

SEQ ID NO: 7737 - DNA, 1642 bp, Artificial sequence
  DNA replication origin
ataaaaaacaaaacaaaaaaaaccaaataaataaatggaacctaattaaactaaaaaggttctgcacagcaaaagaaataatcagcagagtaaacagacagcccatagagtgggagaaaatattcacaaattatggatctaacaaaggactaacaaccagaatctacaaggaactcaaacaaatcagcaagaaaaaaacaaccccatcaaaaagtgggcaaaggatgcaaatagacaattctcaaaagaagacatacaaacggccaaatgtatgaaaaaatgctcaacatcactaaactatcagagaaatgcaaattgaaaccgcaataagacaccactttactcctgcaagaatggccctaattaaaaaataaaaaagagctctccctctccctctccccgcggtctccctctccccacggtctccctctccctctctttccacggtctccctctgaggccgagccgaggctggactgtgctgctgccatctcggctcgctgcagcctccctgcctggttctcctgcctcagcctgccgagtgcctgcgattgcgggcgcgcgccgccacgcctgactggttttcgtatttttttggtggagacggggttttgctgtgttggccgggctggtctccagctcctaaccacgagtgatccgccagcctcggcctcccggggtgccgggattgcagacggagtctcgttcactcactgctcaatggtgcccaggctggagtgcagtggcgtggtctcggctcgctgcagcctccacctcccggccgcctgccttggcctcccggggtgccgagattgcagcctctgcctggccgccaccccatctgggaggtggggagcatctctgcctggctgcccagtctggaaagtgaggagcgtctctgcccggccgccatcccatctaggaagtgaggagcgtctctgcccggccgcccatcgtctgagatgtggggagcgcctctgccccgccaccccgtctgggaggtgaggagcgcctctgcctggccgcgaccccatctgggaggtgaggagcgtctctgcccggccgccccgtctgagaagtgaggagaccctccgcccggcagccgccccgtctgagaagtgaggagcccctccgcctggcagccgccccgtctgagaagtgaggagcccctccgcccagcagccaccccgtctgggaagtgaggagccactctgcccggccaccacaccgtctgggaggtgtacccaacagctcattgagaacgggccatgatgacaatggcggttttgtggaatagaaaagggggaaaggtggggaaaagattgagaaatcggatggttgctgtgtctgtgtagaaagaagtagacatgggagacttttcattttgttctgtactaagaaaaattcttctgccttgggatcctgttgatctatgaccttacccccaaccctgtgctctctgaaacatgtgctgtgtccactcagggttaaatggattaagggcggtgcaagatgtgctttgttaaacagatgcttgaaggcagcatgctcgttaagagtcatcaccaatccctaatctcaagtacccagggacacaaacactgcggaaggccgcagggtcctctgcctaggaaaaccagag

SEQ ID NO: 7738 - DNA, 1085 bp, Artificial sequence
  DNA replication origin
agggccgtggtgaacacacactcctcggccgctttgtactcacatgcacgccagcctacatatgcacttccccccgagtgacactggccaccgagaactgacacacgcgtccacacgctccacggagggctgcgcacacctggcccacgcccacccgaacctcctagtggcccgggccgggtgcatcgcgtagcgaggatctcacacacacagcctgtccccacaggcgtctcacatctccctcgtacacacctccccgtgtctgggcatggagcccctgggaggcgcgcacacgctcgtgcacacgcgcgcactccccccacccagggcgggcctcctgccccagcgcggccacagggcgcgtcaggggccagcaccgccaacccctgcccgcctcgccccaaaccccaggccagtgcgcccgggccttcccgcgcccgccccaaccttcgccgggaccgcagcccctcccccttctcctcccacccccgcctccgttgagcgggaaagcaacaaagctgggtgcattgatgtgtgtgtgtgtctgcgtatgtgtagtttggtgtgcatgggatgtgtgtgttgcgtgcgtgtgtatgattatttggagtatgtatggtgggtatgcgtgtgtggttgtgtgtggttaggtgtgttcatggtacatggtgggtggtatgcgtgatgcaagtgactggtgaggtgtgtgtatacgtgtgtatgtgaaatgaatgttataactgaggtggagtgtgggtggtgtgtgtgtggttgagtgtgtgtggcgtgcagaatatgtatatgtgtgtagttggacgtgcatgtgcttgtgcacgtgttgtgggggtgggtatgcttagtaatacagagtggtgtgtgtatggtatatgtgtggcagtgcagtgcgtgtatctggcatgtcgagtgtgcacatggcatatacggatcaaatcgggtgtgtgtggtacataggagtgggtgggcacacaaacaggactcatgtatgcggaggactctgcctttctgtgttagcgcctgctctggccagcaggtgtgactgaccctgtggtggctgcggcttcccc

SEQ ID NO: 7739 - DNA, 903 bp, Artificial sequence
  DNA replication origin
taggttaatggaaagctcagtgagaactgctctgaagaagcccctcaaaataatacattaagctcagcatcattcacgtgggcggaatacaaactgacattcctaacaggacttacctagcatggactcgatcttaaccatggtaccaaactctcaagtgaagcacactgatgcctggtgaaagccaggcgtttggtatgatgctgacctagtgaacctctggcctttttggctgtgctcattacctggtcccagcactcactggcacaatgccaggagcccagagaaaggagcaggggctgcgggggggggggggggagggggaaggggggagggagggtggggaaaggggagaaggggggagggtgggggaaagggggagggtgggtgttagggagagagggagggggagggagggggaggggggggagggagggaggggggagggagggagggggaggggagagggagggagggggagtgggaggggggggggagaggtgtggtacaacctgctcccgcttcagtcatcacccaccacatggcctctggctgaccatccagtaggcccagcattttccatccacaccacaggccccatgtcctaaaccaggagttttacaagtctcagggaactggctgcaatagctgtaaccagtatacctctgggaccagcagccggagcactgcaaatggcaggcgtgtagattcataggtaacacgtgcacaatttttccagttttacctcttgcttttatgaaccagaacaagtctgggaggtttaagtagggagagggttagaaatcatttcagcatatacttttttaggttctgccagaccaccttttattacatcagaaaagcaacactaggcactagatcttgcaaaatatgttctgacca

SEQ ID NO: 7740 - DNA, 847 bp, Artificial sequence
  DNA replication origin
ccacaaacagactcaaataatatctagttcttatagtactgttgtgagggtttgttcattcattcattcaaaaggcatttgaggctgggcacggtggctcatgcctgtaatcctagcactttgggaggctgaggcaggcggattatttgaggtcagcagttcaagaccagcctgtccaacatggcgaaaccccatcgctagcaaaaatacaaaaattagccgggcgtggtggtggacacctgcaattccagctattcaggaggctgaggtgggagaatcgcttgaacccgggagacaagaggtttcagtgagccgagatcatgccactgcactccagcctgggtgacagaacaagactgtctcaaaaaaaaaaaaaaaaaaaaaaggcatctgagcacctactctgtgggaggcattgacccgggtcccgggtgctggggacacagttattaagacagtaatggtcactgtcagcatggagcttgtgttctaccggggaggcaggcacaaaagagaacttcaagtactgtgaaagaaatgaacaagaacaggcaaggagcaggtgtggaggtgagtggtctggaaaagactgctgcagtcaagacccagggaggagatggagccccagaaaaggcactgggacggagcattctaagcagggttctaggaggtccagagctagaaaaggggttggcctactggaaaacagaaaggagggcagtgtggtgaatgtgaatgagggttagcaggatgtggcgggggaggcagcaccagtgggctacagacttgacactcagcaggacagacgcccttgacgggtgctatgtggcattcagtgaggtcacag

SEQ ID NO: 7741 - DNA, 1146 bp, Artificial sequence
  DNA replication origin
ctcctacccggatcgagctgggcgaacttggttcccagtagaaagaaaggtgggcgccccgtgtctcgggacaaggcgaggagggtgcgagcccgggtcggaccccaggtatagccgtgggtggcattaccggaaaaacaaatttaataaagagcggcgccaatttgaaaggatgagctcatttgaaactcaagctgcagggctggcgcggccccgctgctctcccggcccccacctctccattccgctaatccggggcccgaaggctccaccgggctcccctccctgccctctcctcccggtggccccgagaaaacgagccgaagccccccggagtccgccgcagcgacagccctgtccctgcccgctcctgggtgtcaccttggcctcgccgccgccccgcccccactccacacgccggtggggaaggggctcccgccgggccggggttcggggggcgccggccggggcccgggggcccgcgcggctgggagcggagcgtgtgctggggagagttggggagtgcgcgcgcgcgagtgtgtgtgtgtgtcgctctccgtctcctgtctgggctccagcgcgctcgcgggccccccggtcgcctctttcccggttctcaaccctggcccccaccgagttgagacagggcacctcgtaaaaaggtgcttctggccgagcgggaggcggggggacgggcggcggaaagcccccagccccgagttcttctcaataaaatcggacaaaaaattcagagaaaaataggagcgcttgagagagcaagcgagaggggactgaggttcgggaaaggaccgaggggatgtgccgtcgtgcgagggctggggctgggggagccccgagatctcgaagggggtcaccagggtggcgccgagggggtgccaaaagtggggggccgtggggcgaggtggggagggggctcgaaaggagagtgcggctcaggagacgccagagggcgagaggttctgggcacgaggcactggaagagagaaggtccggccgggggaggaggaagagacgctggatttggggaaggggggaccctgacaaagggggtgacaggaaggtcaggggagaagtgagacaggggacgctcaaagggtggggggcggggaagctcagagcagcccg

SEQ ID NO: 7742 - DNA, 781 bp, Artificial sequence
  DNA replication origin
tcgaaaggagagtgcggctcaggagacgccagagggcgagaggttctgggcacgaggcactggaagagagaaggtccggccgggggaggaggaagagacgctggatttggggaaggggggaccctgacaaagggggtgacaggaaggtcaggggagaagtgagacaggggacgctcaaagggtggggggcggggaagctcagagcagcccggggcgccaggcgaacgaggggtgcccctaaggagccggcgagcctcgggagccttcggagcggcacggggggcgccccaaggctgcggccccgagggcgagggcagagtccagagctgtggggggaggggagcgggccgtcccaggagcgggccggcggcgagagttgagggtctggtgcgtggaagtgagcgtgcgggcgcgggagccgccgccgggcgccgcccgccggactcggcctccctcccggcgccgtcccggcctgagcggggcgaggcggggggagggggccgcgctgagtgctcacccgagagggtctcgatggcgcggatggcccagttctggtcggggtagtccacgaaggcgtagccggacttcagcaggacctgtcccgccaggggcagcttcctgtccccaaagagctgccggaggtcgtcggcggtgacggcggggctcaggttcccgatgtaaagcttgttcatcatccgtctcttccccgagagcccgcggctcccccggcccggtacccggcgctcctcgcctcctccgctgccctcgtctctcctcctcc

SEQ ID NO: 7743 - DNA, 744 bp, Artificial sequence
  DNA replication origin
gcccgccacccacccccaccctcagcctggctccccccaccgcggccggcccggcccgcccgggggcagaggcggaggcggggactcggcgcggctgcctcctcggggcagagtcccgggccgggcggcggcgcgcggacaaagcgctctctctgcctccctctctctccctctcaaggcggtggcgggaggaggagcagcggcgggcggcggcagcgcaccccgcgtgtgtctgtgtgagagtttgtacgggcgtgtgcgcagccgagagggagcgagcgagcgccccctccccgccccgcgccgctgcgcccctcgcctcgcgcccaccgcgctcggcagtggctgctcgggctccggccccgcgccaggcgggcggaagcgggtcgcggccccgggctggggctccgggcgccggaaccccgggcgggcgcggcgccgaggccgggcgagcggcggggcggggaaggcgcgccccgggcgcgggtgggagcgcgcgagggggcgacggggagccgcgggcgtgggagggagaggggctgcgagtgagcgcggagaggggtgtgcgcaaggtggaccggatgtgagtgcgctgctgccagggcaagcgggaaggtgtgtcccggaggtgagaggcgagggcaggctgggagacaacaactttcgcagcgacttggccggggctggcgccctgcgcgttcccgggccgtgcgctcgctctgagacccgctccccgccacgctc

SEQ ID NO: 7744 - DNA, 1321 bp, Artificial sequence
  DNA replication origin
ctgggagacaacaactttcgcagcgacttggccggggctggcgccctgcgcgttcccgggccgtgcgctcgctctgagacccgctccccgccacgctctctgaggtgaccgagcggcgcgtgtggtcgaaggatcgcgcgcgggagtcgggacgcctaggaccggggttggccgggccctcgcggaccgtgctcgcggggaagtggttcccggtcccgggcctcagtttcccgaccggggagggaaggcggaaggccagcgcggagtcacgtcctctccgcccagaccccgcgtgtccggaaccccgcggcaggcggcagcctgacgttggcagctgctctctattctgggaagtgccgagggcttcccgggcggcggcggcgaaagccaggtggcgggtggggaaacgaacgccgaggggccagggactgcggcgaggccggagcgctggggtcagcggccgggggacggatggtcgccgcccggctgcgcggccggttcagctccaaagccagggtggtgggaggcgagggtggctggaagcggaggagcgcaggctgtgtaggagttccccgagcactgggaagggcccggagaggaaagaggtccttccaagcggaggaaacaacgtgaccgacggaagaggcagggttgggatgagagcaggctggagccgaggggctcgggcaggagccagacaggctagagcgggctgcaagttccggggcccggctggaagcctgatggttagagcctggtcccagccaggaaatgaaattctacaggagggagaagaatggcgggattcagaggtgaggaggcagaagaagattccaagctctggacctctgggggccactgggagagttgaaggtttgatcgcggatatgttgggttttgtgaaggcgttggggcgcgggtgcggggagtgtccttgggtggagaagtcacgaatgtaggaatggaacaagttcgggtctcctgactgggtcgtgaagtagtattgtctttcccaagctttcctgttgatgagcggcgtggagagaatggggcttgctggattttgtattttccgcaagtactcccaggtgattctggtctggtaaacactgttggagtggaaggcctatctgccccggactcagaccttctctctgcccccatctttgtgccctgagatgttccagcattctcgagcctaagtttcttcatctataaggagataaaataaccagtcctcgcagggctgttgtgagggctacaagaaggataactgcctagcgtgttgagacatgggtggtcagacacttaatgcctgttt

SEQ ID NO: 7745 - DNA, 1407 bp, Artificial sequence
  DNA replication origin
ggcggagcagcgagccgcggggggccgggccagcgctccagcctggttggcagctgcggcgcagagtccagccgctggtgcgcggagcggttcaccgtcttcggagcggttcggcccagcctttcgcccaggcgcccaggcccgctgcgcgcgtgcgtgagcgcgcctgcgccgccggggccgctgcaaggggaggagagaggccgcctcaggtgagggggctttgcgggggcaggggggagatcggaaggggcgtccggccactggtccgacaggcccagccggctagagttcacgggctgattcagaatcttcaaagtcggggtgcagtagctggggtgaccccccccgggttgaccgccccctccccccgcggcccggtccggtttggttcctgggaggcgtcgggcgggtgcggctaacggttccggagcgcggggagagcggctttccacacgtcgtgggggaggcgccccggagcgcgagtgcgggggctcccgagtggatgggggatcgcggagttgcgaggctttcacagtctctggagattcgagagccccgaggggacttggaggctcgcgagaagagacgcttggcggagctccgcagttgggaggagggggcgggaagcagtttgaggggaatgtctgagaggcgctgccccccagagcaccgggagggggtaaatgacacaggcaagtgcagcctgcgggggcgggggtcgaccaggaacttacgcaggccttgcaagtttcaggtggtggaaagtggacatccagtcgccctgctcccacccagcaggctgagggcgtccggctgtgcggcgactcgagaaaatcggggcgcaccggaacagcggcctggggatggtggggataacacgggtgtggaggggacagcaccgaaagatgctgcagcctcgcagcggattagggttccggccgcattttcagagggtggagaaaactcgggggggaaccgaactcctggtcgacgagggggtgccagggagagatgttgggggtggggggattggaagcggttggtagcgccgggcgccgcacctcgtttttatgaatgtgggtgactttatgaatgaagcgggtttctttcgttggctcgctgctccctgcggcttttttttttttcttccctttttgtgaatgaagcattgagctttcttcctaaaacgctggggtgaggggcctgcgtcggaggctgggcgtgcgttggaaatgggggcgggggcgcagctgaaggagttttcatgaatggggaaggctgagaattgggtggaagtgtgtcttgttttgtgaatggggcccagcgctagagatccagttacagcctctacctgatgtggcggccgcggctcgctctcccattcataaaaccgggcccgctgcg

SEQ ID NO: 7746 - DNA, 1530 bp, Artificial sequence
  DNA replication origin
tccacagaggacattttatttttgcagttctttgaagtgccctcagagatctaagcaccaggctgaaggcagctctgtgtatccttgcaacagattagaacatattcacattttatttgctcacagaacaaatatttcccttggaatgagaccgaggcagtggagcaggaccaggcaggaccagccaccaaagacggccccccaggccccatgctgggcctgctcagcgcctgcacaattggttccacataattgcttctccacactcacctcatttaggccctatagacacatatgggctgattagttgagtcatttattgattcaggaatatttgtcgagcctcaacaatgtaccaaacactatgctggttacagaaataaagagagaaacacattctgtcctcaaggggctcctaatcaagtaggggagagaagcaatgtctgtatattaatgaatcaaatcaaggtgacaaagataaggcttcagaacccaggagacaaagtgtttgaggtaggtcattattctgtctgtgtgttgcggggtgtgtgggcaagggtgaggcgtgtggggtggtgtggatatggtgtgcatgggcctctgtgtgtgtaggttatgtgtatgtggtgtgtgtggtgtggggagtgtgtttgtgtatgggagtgtgtatgtgtctgtggtgacagtggtgaatatgtgtgtgggtatggtagtgatggtactaggtggtgtttagtgcatgtcctgtgagaattgtgtgtaggtatagggatgtgtgtgtatagtggtgatggtggtgtgtggtgtgggggggtgtgtgtggtggagagagtgtgtgtatgagagtgtgtatgtagtgagtgatggtggtgaatgtgtgtagtggtgatggtggtgtttgtgtggtgtggggtgtgtgtgtgtagtggtgatggtggtgtttgtgtggtgtggggggtgtgtgtgtgtggtgagtggtggtgaatgtgtgtgtagtggtgatggtatgtgtggtgtggggggtgtgtgtggggggtgagtggtggtggtgtatgtttggtgtgtgtggtgtgtgtgtgtggtgagtggtggtgaatgtgtgtgtgtagtggtgacggtatgtgtggtgtggggtgagtggtgatggtggttgtgtggtgtgtgtgtgtgtgtgtggtgagtggtggtgaatgtgtgtgtgtagtggtgacggtatgtgtggtgtggggtgagtggtgatggttgtgtggtgtgtgtgtgtgtgtgtgtggtgaggtggtggtaaatgtgtgtgtagtggtgatggtatgtttgtgtggtgtggtgtgtgtgtgtgtggagtggtggtgaatgtgtgtgtgtagtggtgatggtatgtgtggtgtgggggtgtgtgtgtgtgtggtgagtggtggtggtgaatatgtgtgtgtagtggtgatggtggtatgtttgtgtggtgtgtgtgtggtgtggggtgtgtgtgtgtggtgagtggtggggtggtggtgaatgtgtgtgtagtggtga

SEQ ID NO: 7747 - DNA, 1106 bp, Artificial sequence
  DNA replication origin
atctttttcaacattattagaagaatcttatcaaaggtctctgataaactccaaatattcttcatcactggtatttccttgatcttccgtccaataatcttgtcaaagaagcaattttgttggtctgacataaactaatttcagtgattccatgctggttccttgaaatcacagcttcaatcctaaaagctcattccacatcccattccagaatgttccctggaattaacatcagtccctcaaattaagacatttttataaattttcccattttaaaaagtagaactttatttctcatgaaggtgatggtagtggtggtgatgatggtggtaatggtggtggtgatgctggtggtaggacagtgatgctggtgctggtgctggtgctggtgatggtgataatggggtaatgatggtagtggtaggacagtgatgctggtggtggtgctggtgatagtggtggcagtagtaggggtgattattgtggtggtggtagtggtggggtgatggtggtgggggtaatggtggtaaggtggtggtggtggtgatagtggtgatggtggtagtggcagtggaggtgatggtggtggtggtgatagtggtgatggtagtggttgtgggggttatgataatggtggtgatgatcatagtggtgggagtagtgttcatggtggtggtggtggtggtgatagtggtgatggtagtggtggtggtggtgatgatcatggtggtaggagtagtgttgttggtggtggtgatagtggtgatggtagtggtggtggggggtgacaataatggtggtgatgatgatcgtgctggtggtagtggtgttggtgttggtggtagcggtgatggtagttgtgtggggagttgacgatagtggtgttggtggtggtattgatggtggtggtgatagttgtgggggtgatggtggtgataatgataatggtggttgggggcagggtgatgatggagatagtagtggcttccttaactctatgattctgaacaaattaaggagcatggtctaattacctcaattgcacactgtctcagcaccctgggatgttattcaattaggattagagatatatattaatttggggc

SEQ ID NO: 7748 - DNA, 1088 bp, Artificial sequence
  DNA replication origin
agccccttccctggccgcgggaccggctcccgctttgccctcctttaccaagttgctgcaccgggtgctccctgagccggggaccccctccgccgcgccggccgccgtcttacctcaccaggcaacacttggttgcgcggtggcccggggcgctccttcttcgcggtttattcccttacttgggaggaaagaggaaccgagagacagaagggggaccgaagctggcctctgggcgtcttcccgcctgcgcagccctctcgggggagggggatgcagccccagtgggtgccgcggagaccaggctgccaggctgtggttggtagcgccggggtcttcaccctgtgctcggagttcagcagctccaaagctgtctatctccgtggcccgctactacggcactgcggctctgtgccctgcccctcgcagcctggcaagtccagctgccactctcactgcggagccctgcccccgggcgcagagcccgcccccgccacacacaccggcgcgcgcgcgtacacacacggcacacacagacacgcgcttccacacatgcacacgcgtgcgcacacacgaatgtggatccgctcgatgggaacctgaccccctttggtgcaactagggcgcgggcatcattaggacgctttttactgacagggcttcggtttgggaggaggagttacaggcttaggagtgtggagaggatgcaacagtggtgggtaccagagggcccctgaccccggaggcaaaggacaactgtttgacaaataaataccgactgggcgtttccttttctcaactctggtcaaggctaccgtaatatcccgaccaaatcgaagaaaaaataaaaatacaaaatcaacaagttctctttgtttcccaggaactcagtatctctaggatccaaatcactagccctgtccagagggtcatttctgacaaccttgacttcggtggcagtggattggtggcagttcaactcgaaaaggttttcccctcgtagcctggtggagactggcacagcctgcctgagctggactctgttggatgggtcgggtctctgggtgtgtttaattcccattctcctttgc

SEQ ID NO: 7749 - DNA, 685 bp, Artificial sequence
  DNA replication origin
tcacctgaggtcaagagttcgagaccagcctggctaacatggtgaaaccccgtctctaccaaaaatacaaaaaattagctgggcatggtggcaggtaccagtaatctcagctagtgggtaggctgaggcaggagaattgcttgaactaggaggcggaggttgcagtgagctgagatcgcgccattgcactccagcctgggcaacaagagagaaactctgtctcaaaaaatcaaaaaaaaaaaaaaaaaaaaagaaagaaacaagcgagatttgacccccacaaagcacagacttacacatcaaacacccagaattatgtggtggcagtggtcatgatgaaggtggtgtgggattggtaacagtagtgatggtggcagtgatgatggtcatgatggaggtggaggtgatgatggagatgagaatgacaataattacaacaatgaggggagagtggccatgatggtgttggtggttatagtggtagaactggcagtgatggtggtaagggaggacaatggggggtggtagtggaggtagaggtggcaatgatggtggcagtgtaagtagtaaggccagtggtggaagcaatgttggcagaggaggtgatggtggccaatgatgaaggtagtggtgataatggtggttggagatgaaggtagagatgaaggaggaggtgcaagggtgg

SEQ ID NO: 7750 - DNA, 1029 bp, Artificial sequence
  DNA replication origin
ggttgggggtaaggttatagattaacagcatcccaaggcagaagaatttttcttagtacagaacaaaatggagtctcctatgtctacttctttctacacagacacagtaacaatctgatctctccttcttttccccacatttcccccttttctattcgacaaaaccgccatcgtcatcatggcccgttctcaatgagctgttgggtacacatcacagacggggtggcggtggggcagaggcgccccccacctcccagacggggcggccgccgggcgggggctgccccctacctcccggatggggcggttgccgggcggaggggctcctcacttctcagacggggcagccggtcagagatgctcctcacctcccagacggggtggcggcggggcagagacactcctcagttcccagacggggttgcggccgggcagaggcgctcctcacatctcagaaggggcagcggggcagaggcgctccccacatcccagacgatgggcagccaggcagagacgatcctcacttcctagacgggatggcggccgggaagaggcgctcctcacttcccagactgggccgccaggcagaggggctcctcacatcccagacgatgggcggccaggcagagacgctcctcacttcctagacgggccggcagccgggcagagtctgcaatctcggcactttgggaggccaaggcaggcggctgggaggtggaggttgtagcgagctgagatcacgccactgcactccagcctgggcagcattgagcactgagtgagcaagactccgtctgccattccagcacctcgggaggccgaggcgagcagatcactcgaggtcaggagctggagaccagcccggccaacacggcgaaaccccgtctccaccaaaaaaatatgaaaaccagtcaggcgtggcggcgcgcgcctgcaatcccaggcactcggcaggctgaggcaggagaatcaggcagggaggttgcagtgagtggagatggcagcagtccagtccagcctctgctgggc

SEQ ID NO: 7751 - DNA, 1335 bp, Artificial sequence
  DNA replication origin
ccatactaccccttcctccgccaccccgccaacccacagcgatgcccctctccactccgtcagtctggcaatgccacttcccccaccccctcccaccccccagcaaaggctgacccacaggccccgttgtctgcgagtgtctgttcctcacccggcaatcaccgccccgatgaggtatagcagcaacaggcaaaaggtgctcaggttctgcggagccatggttcctctgtcccgggtcctgttccacacactcctcacagcctcctccgccgccgcgtcggctcgccagcccacccggccctgtgaggccgcctcacaccgggggggcgcgggggtctccttggtccgcagagacagctagctagccccctcttctgccggtccacttcccgggagtcccgagtcccggtgagagaagcccccggtaggcgagagccaatcgttgcccgggacatcacacgcggccggcgcctggaagccaatcagcgcagtacacttcacctccgaggcggcacgggcaaccagttaggcttcagaactgcagtcgcagctcttgaccaattagaagcggagacgtcagagggtcgcgccgctgcaggaacccgctctgcctgagctaccgcgagtcgtagaaaattacgtaatgatagggggccggtcagagtgagggcacctgaggtacacgaaatccctccggcttgcccacttcctcggactttccaccaatcaggagcttcctccccagcaccaaccaattgtgggagagaagttttctctgtgctacaagcccggaatttcattcatacccagctacgctccgaatgagggagcagaggtacagcggccgaatgagcgggaacagttattccacgacaggtgtacatcagacgcattgcttaggcctcttattttacgttctccaagcaactccataagacaactgtctcggaaaggctacagtgatgacagaccgacttaagttcggattcggcttccaccgcttcttagtggtgagaccccccacccctcccctcctcccaagtctgagcctaagtttatcaacaaaactgaggcaaagcacttattggcagttctgtgaattttaacagggaaaaaaatcggtaaatcatcgggcgtatagtaagcaggcaacgagtaaaaaccattattacggttcaagcagaactctttgattccccatcttccccccgattttgctcatcgcagttacacaacacctagttgatcaggacaaagctctaggtgtttttattcctttcatgcataagctatccaactctttacctctgaactatacttcaatctgttcactac

SEQ ID NO: 7752 - DNA, 1061 bp, Artificial sequence
  DNA replication origin
cgcttctaattggtcaagagctgcgactgcagttctgaagcctaactggttgcccgtgccgcctcggaggtgaagtgtactgcgctgattggcttccaggcgccggccgcgtgtgatgtcccgggcaacgattggctctcgcctaccgggggcttctctcaccgggactcgggactcccgggaagtggaccggcagaagagggggctagctagctgtctctgcggaccaaggagacccccgcgcccccccggtgtgaggcggcctcacagggccgggtgggctggcgagccgacgcggcggcggaggaggctgtgaggagtgtgtggaacaggacccgggacagaggaaccatggctccgcagaacctgagcaccttttgcctgttgctgctatacctcatcggggcggtgattgccgggtgaggaacagacactcgcagacaacggggcctgtgggtcagcctttgctggggggtgggagggggtgggggaagtggcattgccagactgacggagtggagaggggcatcgctgtgggttggcggggtggcggaggaaggggtagtatgggccaggctagtggggtgagaggagaaccgtgggtgacaccagtgagagggccttaggtccagagagggtcttaggtagagctagatttgcccagaggagtgggagttggatgcattgccaaacggcatttgggggatgagggaaagaaggtggttgcgagctgaagcagtgtcacgtagagctggggaagaaagagggatgcctgactgtaaggaaagatagtgacagtgccaggctgaggttgaggggatggacgtttgtttgatcaaagaggtgagttgctgtgccccgctgaggtggagaagcggacgatgctctatgccaagccttcgaagagccattctggggctgacattaaagtgggtggatgatgccagcccgagttgggactgaacgaaattggatgcgggatgggaacaagaagatctttagacagcccttgtacttcccagcttcttgagctatttattatcttaagttgcttcatcttt

SEQ ID NO: 7753 - DNA, 1543 bp, Artificial sequence
  DNA replication origin
cagtctaactaaattcctaaattctccctctctacttggtcctgttgagatttctccatctacttttgtttcatttcaccctagattctacttctctgatcatccaggaagccaacctgcctgaggacgagtcatactctgtcctcccaccccaggccagagagtggtatctgtctttccacaagttgtaagcttctacctttgatgatcacatatttggtagtgcgtgatggtggtgggtggtgggtggcggtggtggtgggtggtgaggggtggtagtggtggtgggtggtggtgggtggtggtggtggtgggtggtgggtggtggtgggtggtggtggtggtgggtggtgggtggtaggtggtgggtgatggtggtgggtggtgggtggtgggtggtggtgggtggtgggtgatggtggtgggtggtgggtggtggtggttgggtggtggtggtggatggtggtggtggtgggtgatggtggtgggtggtgggtggcggtggtggtgggtggtgaggggtggtagtggtggtgggtggtggttggtggtggtggatggtggtggttggtggtggtgggtggtgggtggtgggtgatggtggtgggtgatggtggcgagtggtggtgggtggtgggtgatggtggtgggtggtggtgggtgatgatggtgggtggtggtgggtggtgggtggtgggtgatggtggtgggtggtggtgggtggtgggtggtggtggatggtggtggtggtggtgggtggtggtggtggttgtggtggtggtggtgggtgatggtggtgggtggtgggtggtggtggtgggtgctggtggtggtatgtgtgtgtgtgtgtgaggcctggactcctagtgatagtacaaatcccaagtgacttcaaggttaaacacaattcactcaccgtcttagtggcttcagttatgcggtacaatacaaactggttgttactttggttttgactgttatatttcttcagagcagcatccacagctttaaataaatccttgtcattgcagtcaatttcctcggactgtgattcctgggttaaacttagtagcagcctggagcagaggaaaaggatggtaattagtttcatgatctaacaatctccctctaggagctgagggatggtttcaccaagaatcaagagccaactgggatactgaatttgacaatctccagcctcttgtttcttctgtcctcctctctgcctcagaactcagggcactggttggattcctgctgccagacgctagttgccttgttcccaaaggttaaatggctctgctgggttatccaaacatatttacagctagaacattgcaacactggggttgttaacctgctcatttgcatttgaaaatcacgtggcagcacagtgcatatttccaggtgattatacaactttatgtagcaaatcagagcagaatctgatgaaggaggggaaacaagtgcctactaactcggttattcccctgtgacttttgcaaagccatttttgaaggtcactacatgggtaaacaatgca

SEQ ID NO: 7754 - DNA, 883 bp, Artificial sequence
  DNA replication origin
gcccatcgtctgagatgtggggagcgcctctgccccgccgccccgtctgggatgtgaggagcgcctctgcccggccgcgaccctgtctgggaggtgaggagcgtctccacctggcagccaccccgtccgggagggaggtgggggtcagcccccaccaggccagccgccccgtccgggagggaggtgggggggtcagccccccgcccggccagccgccccgtctgggagggaggtgggggggtcagccccccacccggccagccgccccgtccgggaggtgaggggcgcctctgcccggccgcccctactgggaagtgaggagcccctctgcccggccagccgccctgtccgggagggaggttggggtgggggggtcagccctccgcccggcctgccgccccgtccgggaggtgaggggcgcctctgcccggccacccctactgggaagtgaggagcccctctgcccggccaccaccccgtctgggaggtgtgcccagcggctcattgagaacgggccatgatgacagtggcggttttgtggaatagaaagggggaaaaggtggggaaaagattgagaaatcagatggttgccgtgtctgtctagaaagaagtagacatgggagacttttcattttgttctgtactaagaaaaattcttctgccttgggatcctgttgatctgtgaccttacccccaaccctgtgctctctgaaacatgtgctgtatccactcagggttgaatggattaagggcggtgcaagatgtgctttgttagacagatgcttgaaggcagcatgctcgttaagagtcatcaccactccctaatctcaagtacccagggacacaaacactgcggaaggccgcagggtcctctgcctaggaa

SEQ ID NO: 7755 - DNA, 1037 bp, Artificial sequence
  DNA replication origin
atgagccgctgggcacacctcccagacggggtggtggccgggcagaggggctcctcacttcccagtaggggtggccgggcagaggcgcccctcacctcccggacggggcggcaggccgggcggagggctgacccccccaccccaacctccctcccggacagggcggctggccgggcagaggggctcctcacttcccagtaggggcggccgggcagaggcgcccctcacctcccggacggggcggctggccgggtggggggctgacccccccacctccctcccagacggggcggctggccgggcggggggctgacccccccacctccctcccggacggggcggctggcctggtgggggctgacccccacctccctcccggacggggtggctgccaggtggagacgctcctcacctcccagacagggtcgcggccgggcagaggcgctcctcacatcccagacggggcggcggggcagaggcgctccccacatctcagacgatgggcagctgggcagagacgctcctcccttcctagatgggatggcggctgggcagagacgctcctcacttcccagactgggcagccaggcagaggggctcctcacatcccagacgatgggcggccaggcagagacgctcctcacttcccagacggggtggcagccaggcagaagctgcaatctcggcactttgggaggccaaggcaggtggctgggaggtggaggttgtagcgagccgagatcacgccactgtactccagtctgggcaccattgagcactgagtgaacgagactccatctgccatcccagcacctcaggagaccgaggctggtggatcactcgcggttaggagctggagaccagcccggccaacacagcgaaaccccgtctccaccaaaaaaatacgaaaaccagtcaggcgtggtggcgtgcgcctacaatcgcaggcactcggcaagctgaggcaggagaatcaggcagggaggttgcagtgagccgagatggcagcagtacagtccagcttcagctcggcatca

SEQ ID NO: 7756 - DNA, 864 bp, Artificial sequence
  DNA replication origin
cggctgggcagagacgctcctcacttcccagactgggcagccaggcagaggggctcctcacatcccagacgatgggcggccaggcagagacgctcctcacttcccagacggggtggcagccaggcagaagctgcaatctcggcactttgggaggccaaggcaggtggctgggaggtggaggttgtagcgagccgagatcacgccactgtactccagtctgggcaccattgagcactgagtgaacgagactccatctgccatcccagcacctcaggagaccgaggctggtggatcactcgcggttaggagctggagaccagcccggccaacacagcgaaaccccgtctccaccaaaaaaatacgaaaaccagtcaggcgtggtggcgtgcgcctacaatcgcaggcactcggcaagctgaggcaggagaatcaggcagggaggttgcagtgagccgagatggcagcagtacagtccagcttcagctcggcatcagagggagaccgtggaaagagagggagagggagaccgtggggagagggagagggagatggagagggagagagagagggagagggagcaagaaatctcttttcttaataaattacccggcctgacagtctgttatagcgacaaaatggacaacgacagaggggtataaaggtttagccctttgtcttaaggtggcacagttcttatgcgttattcaagctccagatcttcgttgcacctgcatcacaatacaacttctgcccagtcctgcctccctcatccctctcatgtgttgattcttagagtaccacaccattaaaagcctgcaggcaaatcgcaaaatctgtttcctaaggaatccaacccagaagggg

SEQ ID NO: 7757 - DNA, 1540 bp, Artificial sequence
  DNA replication origin
gggcccccacatcgcctctctcgggaatgcgggcgctctggagccggggagccggggcgaccgcagggagggcagctctccggggtggaggtcctcgggcgccgcgccctcgcctggaaaccagccgtcgcccccgcaggagtcagccggcgtggacgccccagcacgctccttcttggtgctgccggtcgccctgcaattccgagaagaaagtcagagacgccgtggcccacagaggcgcttagttttcctcgctcacactcacgttgcttcctcatcgcgttcttctttttctccctgggtgctttctctcctctccaggaaagcggatttggaggaacaggtttcgtgactgtcatccaactggaaaaggccccgcgagctggaagggggggcggggggggggacgggtgcaccctcagagttattgctggaggctgtggccaggccgggcaatgtggtgacttccgctggcaggctgaggcccaccccagccctcccacctgggccacggggctctcagcgggagccccagttatgaccggacaccagcgcaccgccaaggagacagccacgtggggacatgccgggctagcagggtcagagccactttgaggactagtgacctcggttccctggcttaaccaggtccttatgggtgagaatcctgaagagggggagagggatggaggcgagggacagtaggcaggaggagctgatgaataggaaggaggaagaagatgaaataaacaagaaagaaagaaattacgttcagagcgctgctcaccttttccatgtcttctgcaccttcatagccttcaaaggtgtccatggagctaaactccctgctggagcagccttggggaaagaaaggaaaggatggggcctctctggggtgggaggacagcccctctgcccatggcagggtgtagcaggcagtgcctgttgcaggcggggtcctccccatctctaactcctgctctcccagggcctgcactccgctgggctgtgaagggagtctgattttttcaggctctttccagcgctgaaatgccttaattcactgagaagaagcgtccacatgcttttcatggccctacctccctgttcgtccaagaaaacagtcgtcttttttgcttgcctgtcttctaaccatgcctccgtcccttcttcctcccctgtctatttcccaccctcctccccttcttgcctccttttctttcccgtaattaatgtccatttcccatctccctggcagcctctgccaagtgtcactgctccccataagggaaaataagaggaacaagcaagtgcatccatccctgcctctctccgcagtgaactgataaacccatcagtcttgcccgtggtgcacctgttacatccccgggaggtgttggacactgtggggaacagcagccaccgccaaatactcagcaactgccctgtgcctggtgggatggtaggcgtttgtcaaagtttaagcctcacaaccctgtaagggtctcagccccctttacagttggggaaacagacagca

SEQ ID NO: 7758 - DNA, 1271 bp, Artificial sequence
  DNA replication origin
ggcgcccctcacctcctggatagggcggctggccgggcggggggctgtcccccccacctccctcccggacggggcggctggccgggcagaggggtcctcacttcccagtaggggcggccaggcagaggcgcccctcacctcccggacagggcggccggccggaaggggggctgacccccccacctccctcccggacggggcggctggccgaccccccccccccgcctctctcccggacggggcggctggccgggcagaggggctcctcacttcccagtaggggtggccgggcagaggcgcccctcacctcccggacggggcggctggccaggcggggggctgaccccccctcccccctcccggacggggcggctggccgggcggggggctgacccccccacctccctcccggacggggcggctggccgggcagaggggctcctcacttcccagtaggggcggccgggcagaggagcccctcacctcccggacggggtggctgccgggcggagacgctcctcacttcccagacggggtggttgccggacggaggggctcctcacttctcagacggggcggttgccaggcagagggtttcctcacttctcagacggagcggcggggcagagacgctcctcacctcccagacagggttgcggcccagcagaggcgctcctcacatcccagacagggcggtggggcagaggtgctccccacatctcagacgatgggcggccgggcagagacgctcctcacttcctagatgggatggcagccgggaagaggcgctcctcgcttcctagatgggatggcggccgggcagagacgctcctcactttccagactgggcagccaggcagaggggctcctcatatcccagacgatgggtggccaagcagagacgctcctcacttcccagacggggtggcggccgggcagaggctgcactctcggctctttgggaggccaaggcaggcggctgggaggtggttgtagcgagccgagatcacgccgctgcactccagcctggacaccactgagcactgagtgaacgagacttcatctgcaatcccggcacctcgggaggccgaggctggcggatcactcgcggttaggagctggagagcagcccggccaacacagcgaaaccccgtctccaccaaaaaaaaaccgaaaaccagtcaggcgtggcagcgcgcgcctgcaatcgcaggcactcggcaggctgaggcaggagaatcaggcagggaggttgcagtgagccgagatgg

SEQ ID NO: 7759 - DNA, 954 bp, Artificial sequence
  DNA replication origin
gccccgtccgggaggtgaggggcgcctctgcccggccacccctactgggaagtgaggagcccctctgcccggccagccgccccgtccgggagagaggcggggggggggggtcggccagccgccccgtccgggagggaggtgggggggtcagccccccttccggccggccgccctgtccgggaggtgaggggcgcctctgcctggccgcccctactgggaagtgaggacccctctgcccggccagccgccccgtccgggagggaggtgggggggacagccccccgcccggccagccgccctatccaggaggtgaggggcgcctctgcccggccgcccctactgggaagtgaggagcccctctgcctggccagccgccccgtccgggagggtagtgggggggtcagccccccgcccggccagccgccccatccgggaggtgaggggcgcttctgcccggccgcccctactgggaagtgaggagcccctctgcccggccacgaccccgtctgggaggtgtgcccagcggctcattggggatgggccatgatgacaatggcggttttgtggaatagaaaggcgggaagggtggggaaaaaattgagaaatcggatggttgccgggtctgtgtggatggaagtggacatgggagacttttcattttgttctgtactaagagaaattcttctgccttgggatcctgttgatctgtgaccttatccccaaccctgtgctctctgaagcatgtgctgtgtccactcagggttaagtggattgggggcggtgcaggatgtgctttgttaaacagatgctttgttaaacagatgcagcgtgctggttgagagtcatcaccactccctaatcttaagtacccagggacacagacactgcggagggccgcggggtcctctgcctaggaaaaccagagacctttgttcacttgtttatctgctgacc

SEQ ID NO: 7760 - DNA, 1101 bp, Artificial sequence
  DNA replication origin
tcctggatggggcggctggccaggtggggggctgacccccccacctccctcccggatggggtggctggccgggcagaggggctcctctcttcccagtaggggcggccgggcagaggcgcccgtcacctctcggacggggcggctggctgggcagaggggctcctcacttcccagtaggggcggccagacagaggcgcccctcacctcccggacggggcggctggccgggcggggggctgacctccccgcctccctcccggacggggcggctggccgggcagaggggctcctctcttcccagtaggggcggccgggcagaggcgcccctcacctcccggatggggcggctggcggggcggggggctgacccccccacatccttcccggacggggcggctggccgggcggggggctgacccccacctccctcccagatggggtggctgccgggcggagacgctcctcacttctcagagggggtggctgcctggcggagggtctcctcacttctcagacggggcggccgggcagaggcgctccccacatctcagacgatgggcggcctggcagagacgctcctcacttcctagatgggatggcggcctggcagagacgctcctcacttcctagatgggatggcggccgggcagagacgctcctcactttccagactgggccgccaggcagaggggctcctcacatcccagacgatgggcggccaggcagagacgctcctcacttcccagacggggtggcggccgggcagaggctgcaatctcggcactttggggggccaaggcaggcagctgggaagtggaggttgtagagagccgagatcacgccactgcactccagcctgggcaccattgagcactgagtgaacgcgactccgtctgccatcccggcaccttgggaggccgaggctggcggatcacttgaggttaggagctggagaccagcccggccaacacagcaaaaccccgtctccaccaaaaaaatacgaaaaccagtcaggcgtggcggcgcgcgcctgcaatcgcaggcactcggcaggctgaggcaggagaatcaggcagggaggttgcagtgagccgagatggc

SEQ ID NO: 7761 - DNA, 966 bp, Artificial sequence
  DNA replication origin
gtgggggggtcagccccccgccccgccagccgccccatccgggaggtgaggggcgcctctgcccggccgcccctactgggaagagaggagcccctctgcccggccagccgccccgtccgggagggaggcggggaggtcagccccccgcccggccagccgccccgtccgggaggtgaggggcgcctctgtctggccgcccctactgggaagtgaggagcccctctgcccagccagccgccccgtccgagaggtgacgggcgcctctgcccggccgcccctactgggaagagaggagcccctctgcccggccagccaccccatccgggagggaggtgggggggtcagccccccacctggccagccgccccatccaggagggaggcggggaggtcagccccccacccggccagctgccgcgtccaggaggtgaggggtgcctctccccggccgcccctactgggaagtgaggagcccctctgcccggccaccaccccgtctgggaggtgtactcaacagctcattgagaacgggccatgatgacaatggcggttttgtggaatggaaaggggggaaaggtggggaaaagattgagaaatcggatggttgccatgtctgagtagaaagaggtagacatgagagacttttcattttgttctgtactaagaaaaattcttctgccttgggatcctgttgatctgtgaccttacccccaaccctgtgctctctgaaacatgtgctgtgtccactcagggttgaatggattaagggtggtgcaagatgtgctttgttaaacagatgcttgaaggcagcatgctcgttaagagtcatcaccactccctaatctcaagtacccagggacacaaacactgcggaaggccgcagggtcctctgcctaggaaaaccagagacctttgttcacttatctgctgaccttccctccactattgtcctgtgaccctgccaaac

SEQ ID NO: 7762 - DNA, 825 bp, Artificial sequence
  DNA replication origin
tgctcaatgttgcccaggctggagtacagtggcgtgatctcggctcgctacaacctccacctcccagccacctgccttggcctcccaaagtgccgagattgcagcctctgcccagctgccacgccgtctgggaagtgaggagcgtctctgcctggccgcccatcctctgggatgtgaggagcccctctgccccgccgccccatctgggaggtgaggagcgtctctgcccggccgccccgtctgagaagtgaggagcccctccgcccagcagccaccccgtctgggaagtgaggagcgtctccgcccggcagccgccccgtccgggagggaggtgggggtcagccccccacccggccagccgccccgtccgggaggtgaggggcgcctctgcccggccgcccctactgggaagtgaggagcccctctgtccggccaccaccccgtctgggaggtgaacccaacagcccattgagaacgggccatgatgacaatggcggttttgtggaatagaaaagggggaaaggtggggaaaagattgagaaatcggatggttgctgtgtctgtgtagaaagaagtagacatgggagacttttcactttgttctgtactaagaaaaattcttctgccttgggatcctgttgatctgtggccttacccccaaccctgtgctctctgaaacatgtgctgtgtccactcagggttaaatggattaagggcggtgcaagatgtgctttgttaaacagatgcttgaaggcagcatgctcgttaagagtcatcaccactccctaggaaaaccagagacctttgttctcttgtttatctgct

SEQ ID NO: 7763 - DNA, 1206 bp, Artificial sequence
  DNA replication origin
atccatttaaccctgagtggacacagcacatgtttcagagagcacagggttgggggtaaggccacagatcaacaggatcccaaggcagaagaatttttcttagtacagaacaaagtgaaaagtctcccatgtctacttctttctacacagacacagcaaccatccgatttctcaatcttttccccacctttcccccttttctattccacaaaaccgccattgtcatcatggcccgttctcaatgggctgttgggttcacctcccagacggggtggtggccggacagaggggctcctcacttcccagtaggggcggccgggcagaggcgcccctcacctcccggacggggcggctggccgggtggggggctgacccccacctccctcccggacggggcggctgccgggcggagacgctcctcacttcccagacggggtggctgctgggcggaggggctcctcacttctcagacggggcggccgggcagagacgctcctcacctcccagatggggcggcggggcagaggggctcctcacatcccagaggatgggcggccaggcagagacgctcctcacttcccagacggcgtggcagctgggcagaggctgcaatctcggcactttgggaggccaaggcaggtggctgggaggtggaggttgtagcgagccgagatcacgccactgtactccagcctgggcaacattgagcactgagtgaacaagactccgtctgcaatcctggcacctcaggaggccgaggctggcggatcactcgcggtcaggagctggagaccagcccggccaacagcgaaaccccgtctccaccaaaaaaatacgaaaaccagtcaggtgtggcggcgcgtgcctgcaatcgcaggcactcggcaggctgaggcaggagaatcaggcagggaggttgcagtgagccgagatggcagcagtccagtccagcctcagctaggcatcagagggagaccgtggaaagagagggagagggagaccgtggggagaggcagaggcaggggcaggggcaggggcaggggcaggggcagaggcagaggcagaggcagactgtttaggtctttaatgggagagggagactgtttaggtctttaatccattttgagttaacttttgtgtgtggtataaggtaagagtccaacttcattcttttggatgtacatatccaattgtttcagcaccatt

SEQ ID NO: 7764 - DNA, 1306 bp, Artificial sequence
  DNA replication origin
ctctatttgcatacggaggcgactcgcttccttcccgcccctccgccgcgctcttcttccttccttctccagtcccttccactgtgcgtcttctgtcccccgttcttccccagcggacccctctttcgagactccctagtggggtccccagctcccgggcgatcctgcccttgccgagcgcgttttctggagtcacctgggggaggggagtcctgggcagggccgggctggggaagacgcctggggcactgcccggcgttaacaaagggagccgataccgaccggcgtgggcgcggagcgggcggccgccaccgagcgtgctgagcaaccgcagcctccgcggccgagagtgcagcgagtgagtagggggtgcggtgggcggcggcgcggcccgggctatcccgggaggagtgtgatgcaaaggggcgcgggaggatagcggaggcgcggggcccgcggcgcgcgtagggcgcagggaatctctctccagctccgcctcagctgccttggctccggggctggccgccttttggttgggggtgtgtgcatttttgtcagggccaaagggccaccctggcttctctctggctccgcgagcctgcggatccacaacaaacccacgtgcgcacagccccggggaacacggatttctccacggcaccgtcagtatggggtggggtggcgtgggggcattgcgccttgcagagtctgggtttacggatcgacaaattgaggcccgcggcagcggagggggcacaggcaccataacaaacgcacgtgcgccctgcccggagagctggacgcactgcatacccttaggggccgccctgcggtgccgggccattgtctcagcctcgggggagggagtggctctagaggcgccacttgctggaagagggcgagagagacatttaaaaggtaccgcttgggcatcagactaaactgccagacttaaaaagggaaaccaaaacaagaaagcagctacaaaaaggttactccaggctgagtcggtccccggccgtggcgcattcttttgggtgaagtggaccacccctcaccttcacctcctggaggtctcttagagatgtgggttgggttaagggtctaagggtgcccctcaaaaaaagagagtgctgggtgcactattgtccccgcactccggcgattgcctctgtggggatattttggtcgcctcctcagcctgcgggaagaatgtacgagtcgcccagtgcggtcttgctctttgcctctgaggcccgtgtccgtgtgcccagacaccccagatgtcactagccccttttggctt

SEQ ID NO: 7765 - DNA, 1715 bp, Artificial sequence
  DNA replication origin
aacaaagtagagtacaagaaaggggggatagggccaggctcagtggctcacgtctgcaatcccaacactttgggaggctgaggtgggcggatcacttgaggtcaggagttcgagaccagcctgaccaacaaggtgaaaccctatctctactaaaaatacaaaaattagccatgtgtcatggtgggcacctgtaatcccagctgctcaggaggctgaggcaggagaatcacttgaatccaggaggtggaggttgcagtgagccgagaacgtgccactgcacttcagcctgggtgacagagcgagaccctatctcagaaagaaagaaaagagagagacagagaaagagagaaagaaaggacggaaggaaggacggaaggaaggaaggaaggaaggagggagggagggagggagggaaggaaggaaggaaggaaggatggaaggaaggaaggaagggaggaagggaaggaaggaaggagggagggagggagggagggagggaaggaaggaaggaagggaggaagggaaggaaagaaaggggagatcggaagtactgggttgaggtaggtttccattttccaaagggcagtcagaggagaactcactgagaaggggacatttgaacaaagagttgcagatagtggaggaatgagtcccacaatatctggggaagcgtgtttgcggcaaggctcaaggcaggagtgcactggtgtgcactggttggaaggaaaggatcaaggaagagggtacatggagacggggtccgggaggaacaaacaacgatgtcggggaggtggaggagtctgggcagggcctttgaggtcttggcaagaactctggcttttagcaaataaaataggagctgctgcaggaggctgagcagaggaacaaccagatctgacttaatatgccagaattgctcaggctgccatgtgggaacaggaatagggggcagggatagtagtaaggagacagcagcagtcccagtgagcgatgctcatggcttagaccagctggttgcagtggaggcagagaagtgggtatattttagacgtgctttgaaaatcatgcccgatattttagatgtgagtgtgagagagagaagagtcaaggatgattccaagggttggagcccaagcaactagacggatggtgctactttaatggaaaaagaggagacaaaggaagagcagacctgggggcagaggaaatctggagttcagctttggatattctgagtttgagatgagactgtcaaacagagcgtaaagtaggaagcctgataggaaagtctagaggtcagggagaaggtgtgagctggagatccatatttgggagttatcagcatgagagcttttcggatgttcttgatcagctagtggaatttttctccacccagctgcatgactgtttactctggagcaaggattcctgggcgtaaacctaactcctccactcctcaaaggtctgatcttggacaggctactcaactgctctcagtgtctgtatccccaaaagtgcctacttcttttattatgaggaaaaaatgaggcaattcgtgttaattaccttgcacatagtaataagcactccctatataataaccattataatcccctcccttcctctctccacctcttactaccttgctaagcttggtatcttcaacttcccttttttctcacctcatattcaactcatccctcaccctgagtgcc

SEQ ID NO: 7766 - DNA, 1055 bp, Artificial sequence
  DNA replication origin
aggaggaggtgcccgggcactccccctcccattgtccccagccccggacaggcccggccccgcgccccacactggcctcctcgagcgcgccgcccgcgcccagcgccccacgccccgcgccccgggccgtgcagccagcccttaccttgcagcgcccggctgtctcccgatcgctaaagctacttatcccgggaaagctcgcgcgggacccgggaacgaacccacagacaaaaagtgaaacttcggcagggctggagcggctgctggttggtgcctttccccctccttcctccccaccgtccccaccccctccccttggtctcccgtgcggtgccctgagcgctggaggctgacgtcaggggcctgaattcctgactttgcctgcacgcatttgtccatgtaaggtatgggaaggcgtgtgcccgcgaagccgccgcgcagagctcgcctggcgggggaggggaaacccgcagccggcagtggctttgccaaaaggtgggcgcactgagggcattgcatttcctgggaggaagaggaggagacgcgggaatgcagggagcttgcaaaggaggaagagaaagagggagatgtggagactttgcccctgctagaggaagaggaaggagacgtaggaggaagcggccgcgtcagggggctcctggaaaatggaaaagcctgcgtctactattaaggcgtcaaattagggcactgagcttgagtggaagagatccagccatgaaatccccttccaagattttcctcgtgagccccgccctggattcccagcaagactcaaaacttacaaggtgtcagagctggcaaagaccaacttccaacccgtccgcttggcacgtgaggaaactgaagctctcggaagagaaatgacttgtacagggtcgtcactcagcagatcgaggagcgggcccaggcgctctgcctcccacttgggttcccgcctccaggaagggccctggctcccttttagccctgagccttgaagcaggttagatgcccgcgagctgtgcggaccacccagtgatttctactgctcttgg

SEQ ID NO: 7767 - DNA, 1440 bp, Artificial sequence
  DNA replication origin
ggggcgcggggcgtggggcgctgggcgcgggcggcgcgctcgaggaggccagtgtggggcgcggggccgggcctgtccggggctggggacaatgggagggggagtgcccgggcacctcctcctctgcctctgcctccgcctccagccgccgccgccgccgccgccgccgccaccaccaccgccgctgccccggctgcctcctccctgaggtattgttgcaaatccttccttcccctcaccctccacccgcgggcgcctcgggaacccccagccctcccccggcgcgagcgcctccggggtggcaagagcgcagggcgcgcgccctgctctggcctggcccgctgtgcggaagtgccggccgcggcccaatcacggggtgcacgccatgggggagggggacccagagtttttccaaaagcgtcgaccccaggctaggcggggttggagccttgcgcgccccctgcccggacttttctgggcgcccagggggcggggccacgcccatccgcttagagctttcgcggaatcacagttgtcacagcggaaagggcctagacccagtcctccaagtcctcccattttacagttggggcagctgaggcccagagagaaggagggtcgcccggaagttatttactagaggccagaccataattcaaatagttggctccggacttaagttccctttctctaagcatttctctagcaccctgtgtgtggcagaccctgtgctgggtgtattggacgttgccctcaaggaactcagttgaacctgggagtcaaacctggcctagggtagaaaatgctaagtgctggagcaaaggcgtggacaaagttaaaggaagttccagggagggggtttgattttctggtccctgggacggccttttggagagtcctgcactgaatggggtttttggaggttgaggagtttcctgaagccagctagcggcttggaggaagacatctcttcgagggaaccgtgggccagagaagactaagtagtgtgggaaatggagatgaaagtataaatattctttagttggaggcaaggggttggggatgggggaggttgtgatatgagatgagctaatcagtggaattgtgcctgggtgcttggacagggcagagtctttggaacctcggagtcgtaggagaactgaaaaatctctctggcttcccttcccttagaagggatccactgctttccctcccccaacacaaaacaactagcgagaactcagggtcttctctggggcttttgctagtaccaaactcacttaactgtgtttccagtcccctttctctttccattccttccccttttactaaatctcttgcctttcctgtaaaattcactctcactaaggtgttgatgacttaatggcttacctttccctgcacatgtgcattttaagaaagcctaaagtgaagaagggg

SEQ ID NO: 7768 - DNA, 1388 bp, Artificial sequence
  DNA replication origin
cacaaaaggtgaaaggtcttcccttctaacaccaagcagagattatatgggcctattagattaccaaaaattaggtcatggctacaattacaattgaaaagccaagctctaatacccttttttgccatctacttctccatttaggataggtttcattcactttcctataaatatttttcaaatattcaagacacactgatatgaagttcaggcaagagggacaagggagggagggagggagagaggggagggaggaaggcagggagggaaggaagggagggaagggagggaaaggaaggagggaagggagggaagggagtgagggagggaggaagggaggaaggaagggaggaagggagggaaggagggagggagagagtcaggtagaaaggaaggagggagggagggaggcaggtaggaagaaaggagggaagcaggtaggaaggaaggaggaaggagggagggagggaggggggcagggagggaagaaagaaaggaaaggagggagagggagaaggaaggggagggagggaaagagaatggatcaggggttctctgccaagagcttacagttgcattgaagaaactagtttatccacaaatgtccatattagaaggcagactacatgtaggtaagacacacaagatgttcgagaaaaaagcaaaatgagagagaggaaagagagaaagtagctgaatagagaaatcagagagagctatatggcgacagaattgagaaggccttaaatggagaacaagtatttaacatatttacaacatgagcataaagatatagaaggaactctgcaatgtgcaagtgtacttggcaaacacgagtgttctttaaggtaaaaatagagtaagagcagactcaaagggtcagctgtggtcagacaatgcaggtgtgcaaaccaaggcatataaggagattggctcttacccaaggtgctgatatctaaaggataaacacattccccatgacgaaggagagagtgggcaggggtaattgtatcttgggacttagtgttgatgtgggaacaaacacatggtatgaatcacacatatttcaggctgagcacagacaatttatattaaaacactcccagcagaaattcctatttttaggaaaaaggttgccattgataaaaagtgagtgagagaccgtatcagaaagctactgatttcaccttaatcagaaatgaacgtgattccacagcacaacaaacaagggttattggagcacgtacacatttctgccttagacccagggaatacaatgcaacagactgctatgacaagacttttactttgctaggtggaggctgaagaaagtctaaaggaggcaaggaataatgtcgtctcaagcttcactattcttgtctcaactt

SEQ ID NO: 7769 - DNA, 1428 bp, Artificial sequence
  DNA replication origin
ccggacgcgaggtgccccgaagccctctcgagcgtaaccgtcccgcgcctctctgaggcggaggatgcgggagcgcatctgggcgccgccgctgctgctgctgctgccgctgctactgccgccgccactgtggggcggccccccggacagcccacgccgggagctggagctggagcccgggcctctgcagcccttcgacctgctctacgccagcggcgcggccgcctactacagcggagactacgagcgagcggtgcgcgacttggaagcggcgctgcgcagccaccggcgcctgcgggaaatccgcacgcgctgtgcccgccactgcgcggcgcgccacccgctcccgcccccgccccccggcgagggccccggcgctgagctgccccttttccgctccttgttggggcgggcgcgctgttatcgcagctgtgagacccagcgcctcgggggccccgcatcccgccaccgcgtcagcgaggatgtgcgcagcgacttccagcgcagagtgccctacaactacctgcagcgggcctacatcaaggtacccacagagcgctcctccactgcaaagcccctgcggctctcacacgctctcttgagccctccctgctgcccccgtcatctctgttcagtctttcgaattgggtctccttaaatatgtgtctcagtttgtgaatccagatatctggtggccctatctctgtatgcaacaattgattaacttggacaagtctttttctctctttctcagagccagcttctctctcaaaaagaggactgtcctgataaggtgatgtttaaagtacccattcagcactaattcatgaggcattgacaaagctgaatctagtacaatttatcttctcccttctcacttcccatttctcttctcccttctcacttcccatttctcttctcccttctcacttcccatttcttttgtctcctctctcttatccttcctatactgtagtctgcaccttttctctgaagtttaaaagaatcttcaaaatagtgaagttgaaagacctgttccaaaacaaatttctctctcttctccccttcacctacaaaaaagtaaagatcaaaggttaaagagaaggtatgcttggaggaggcgaagctgtttgaggcagtctcagtcaaagtatccaccctaagtgttgactttttctcctttgatagagggcttacgttttctggtggtatgcattggactgggttactaggcatcagtcctctctttctagttttatttttgtatgcctaacttgcctaaagttagcgtcaggaggtatagtatgcatattgacatattgttcacatccataactttgaagatctctctggatgcttcagcagagggaatttgaatgagttcttcaacctccactgccactcacccaattttccttcaaattgaca

SEQ ID NO: 7770 - DNA, 970 bp, Artificial sequence
  DNA replication origin
tgctgccaaaggagccatgaactgggctggatttttatatttgatgaaaaagagcctaaatgctatctgatttgggataaagaaaaagaagcattaaccttgactatgcctttagctccagccaccgatgggcaggtgggggagggctagtcacagaaagaaactgtaagccggaccaggtgtgaggaggggaggtgataaaaggattatagggtggaggagcggaggctgaggaagaattgggacctagctcggcctggcgaggagcagcctggggaggaggggagaggtcagatgggtctgtagaaaaggaagattagaaagactcagcgacgcttggggttgggactgaggggacaggtgggagggaaagaaggaagatttgggaacagttgctttgggaacagagactagagagggaccgacgtgtaaaagaatgcctggacgtcaggcacctcagaccatttgcccactttacaacaagatttatttagatcttgtaggatggaaaaattgaaagtgccgttttccggctgtttggaactactgtcgagtttgtattggggtcaagcggtattgcagaagaaaataagatgcttagattttaggtcaggtgtgagttgaagaggttttaagtttttgaggacacaggctaagggagaagaaggaggaatggagagtggaaggttgcccatagtgaaggaagcaagcctagagaaaagagagagtagagacacagagggaaggggttcgggggttcttaccttccagaaaagcaggaaaggggttggggcgtggaaataagggattggggcacagagataagaggttggggcatggaaataagggattggggtgcagagatatgaagttggggtacttgcccctctagaaaagcgggacttgctgctaagagtgaagaagaaggggttacgggtttcttgccccccagaaaggtggagaaggggta

SEQ ID NO: 7771 - DNA, 1267 bp, Artificial sequence
  DNA replication origin
gaggagcccttcagcccactgctgcactgtgggagcctctttctgggccggccgaggccggagcctgctccctcagcttgcagggaggtgtggagggagaggcgcgagcgggaaccggggctgcgcgcggcgcttgcgggccagctggagttccgggtgggcgtgggcttggcgggctctgcactcggagcagcgggccggccctgccggccccaggcaatgaggggcttagcacccgggccagcagctgtggagggtgtactgggtcccccagcagtgccagcccaccggcgctgccctcgatttctcgccaggccttagctgccttcccgtggggcagggctcgggacctgcagcccgccatgcctgagcctcccatcccctctgtgggctcctgtgcggcccgagcctcctcgacaagcgccaccccctgctccacggcgcccagtcccatcgaccacccaagggctgaggagtgcgggcccacggtgctggactgggagacagctccatctgcagccccggtgcaggatccactgggtgaagccagctgggctcctgagtctggtggggacgtggagaacctttacgtctagctcagggattgtaaatacaccaatcggcaccctgtgtctagctcagggtttgtgagtgcaccaatccgcactctgtatctagctaatctggtggggaggaggcgaacctttatgtctagctcagggattgtaaacacaccaatccccactctgtatctagctcaaggtttgtaaacacaccaatcagcaccctgtgtctagctcagggtttgtgactgcatcaatcgacactctgtatctagctactctggtggggccttggacaacctttgtgtccacactctgtttctagctaatctggtggggaggagaacctttgtgtctagctcagggattgtaaaggcaccaatcagcactctgtcaaaacagaccactcagctctaccaatcagcaggatgtgggtggggccaggtaagagaataaaagcagggtgcctgagccagcagtggcaacccgcaggggtccccttccacactgtggaaggtttgttcttttgctctttgcaataactcttgctgctgctcaccctttgggttcacactgcctttatcagctgtaacactcaccgcgaaggtctgcagcttcactcctgagccagcaaaaccacgaacccaccagaaggaagaaactccgaacacatcggaacaccagaaggaacaaactccagacgc

SEQ ID NO: 7772 - DNA, 1144 bp, Artificial sequence
  DNA replication origin
taaggtcacagatcaacaggatcccaaggcagaagaatttttcttagtacagaacaaaatgaaaagtctcccatgtctacctctttctacacagacatggcaaccatccaatttctcaatcttttccccacctttccctgctttctattccacaaaaccgccattgtcatcatggcccgttctcaatgagctgttgagtacacctcccagacggggtggtggccgggcagaggggctcctctcttcccagtaggggcgtccgggcagaggcacccctcacctcccggatggggcagctggccgggcggggggctgacccccccacctccctcccggacggggcggctggccgggcagaggggctcctctcttcccagtaggggcggctgggcagaggcgcccctcacctcccggacggggtggctggctgggcagggggctgacccccacctccctcccagacagggtggctgccgggcggagacgctcctcacttcccagacggagtggctgccgggtggaggggctcctcacttctcagacgggacggttgccaggcagacggtctcctcacttctcagatggggcggccgggcagagacgctcctcacatcccagacggggtggcagggcagaggcgctccccacatctcagacgatgggcggccgggcagagacgctcctcactttccagactgggcagccaggcagagaggctcctcacatcccagatgatgggcggccaggcagagacgctcctcacttcccagacggggtggcggccaggcagaggctgcaatcttggcactttggggggccaaggcaggcagctgggaggtggaggttgtagcgagccgagatcacgccactgcactccagcctggccaccattgagcactgagtgaaccagactccgtctgcaatcccggcacctcgggaggccgaggctggcggatcactcgtggttaggagctggagactagcctggccaacacagcaaaaccccgtctccaccaaaaaaatacgaaaaccagtcaggcgtggcggcgcgcgcctgcaatcgcaggcactcggcaggctgaggcaggagaatcaggcagggaggttgcagtgagccgagatggcagcagtacagtccagcttt

SEQ ID NO: 7773 - DNA, 1051 bp, Artificial sequence
  DNA replication origin
gcgtctctgcccggccgcccatcgtctgagatgtggggagcgcctctgccctgccaccccgtctgggatgtgaggagcgtctctgcccggccgccccatctgagaagtgaggagaccgtctgcctggcaaccgtcccgtctgagaagtgaggagcccctccacccggcagccactccgtctgggaagtgaggagcgtctccgcccggcagccaccctgtctgggagggaggtgggggtcagccccctgcccagccagccaccccgtccgggaggtgaggggcgcctctgcccagccgcccctactgggaagagaggagcccctctgcccggccagccgccccgtccgggagggaggtgggggggtcagccccccgcccggccagctgccccatccgggaggtgaggggtgcctctgcccggacgcccctactgggaagagaggagcccctctgcccggccaccaccccgtctgggaggtgtactcaacagctcattgagaacgggccatgatgacaatggcggttttgtggaatagaaagcagggaaaggtggggaaaagattgagaaattggatggttgccatgtctgtgtagaaagaggtagacatgggagacttttcattttgttctgtactaagaaaaattcttctgccttgggatcctgttgatctgtgaccttacccccaaccctgtgctctctgaaacatgtgctgtgtccactcagggttgaatggattaagggtggtgcaagatgtgctttgttaaacagatgcttgaaggcagcatgctcgttaagagtcatcaccactccctaatctcaagtacccagggacacaaacactgcggaaggccgcagggtcctttgcctaggaaaaccagagacctttgttcacttatctgctgaccttccctccactattgtcctgtgaccctgccaaatccccctctgcgagaaacacccaagaatgatcaataaaaaaaaaaaaaagaaagaaaagaaaattggaaaggcttcaggattgtcagttaaatataattgtttttgcctcgg

SEQ ID NO: 7774 - DNA, 1161 bp, Artificial sequence
  DNA replication origin
attaactggcatgtattctccactgtgttctgatccagtgaacactctcctgccttccacttcttgaacctcaaacacacagtctttccatacgtccaggcaggggcaggtatgcagccttcctgggttaatttgtacaacaccaaatttaaattatttgtcaatgtttaatcaggtaaaagccattcattttagcagagcccagctttggaaaaactctttttgactactacagggcttctttggacattaacataaacagagagaaaacaaataagaagaaaaaagagaaaaaaaagttaagtcaattcaatcgcactttgttaatgttctcggtaaattaagttttgaaaaattccagttctgaagcaagtccagcttgggcagtgcagaccaaagaaattcagccaaaagtttatcaagtgcaattttcttttattttaaaagcatgtttgcagactctttccctgaggttttttattttttattttattttttggaatcagagctaagctattatgcaattgatacctgagaagaaaacaaacttcaaatatccctagacaagttcatgtccaagtgtttgcaaatatatgcataatctagaggaagaggtagaatgaaaagtgagtgcaggtggagggggaagttggggagaaagtaaggaaagtagtaataacagaaagagagagagagggcgagagagagaaaggagagaaagaagagggagagagggagagaaagagagagagagagagagaaagcagatagaggatactaaaagagacacagggcagcagagaggatctgttttaactggcgggtagcggagaaatcttgctccgaaggtggaataaattctaaatgcaaagcttattaactttcagagacccaagtttgccagcggactagctaacgccagttcctcacttaccatcttgcagtggaagaaagcgctgcagaaactgagcccactcaatttttcagtaaaaccagtgggagctttaaatgagactgaggggaggagctaggagaggcgagttctaatctgcgggagctcccggtgacgcccagagctcccggcgagcgccgctctgtgatttggtgagaggctgtcaaaccggtgacgtgagccaggagtcacccagcagaagacaaagt

SEQ ID NO: 7775 - DNA, 1214 bp, Artificial sequence
  DNA replication origin
ttgggataaagaaagaggagcattaaccctgactatgcctttggctccagccgcctttttaagagtaaattgctgggcaggtgggggagggctagtcacagaacgaaactgtaagccggaccaggtgtgaggaggggaggtgataaaaagattacagcgtggaggaacggaggctgaggaagaattgggacctagctcggcctggcgaggagcagcctggggaggaagggagaggtcagatgggtctgtacaaaaggaagattagaaagactcagtgacgcttggggttggtactgaggggacagatgggagggaaagaaggaacatttgggatgagttgcactgggcacagagactaggaagggactgatgtgtaaaagaatgcctggacttcaggcacctcagaccgtttgcctattttacgacaataattatttagattttgcaggatggaaaaattcaaagtgccattttctggctatgtggaactactctcgagtttgtattggagtcaagcagcattgcagaagaaaataaggcatttaggttttaggtcaggtgtgagttgaagaggttttaagtttttgagaacacaggccaagggagtagaaggaggaatggagggtggaaagttgcccatagtgaaggaagcaagcctagagaaaagagagtagagaaacggagggaaggggttcgggggttcttaccttccagaaaagtgggaaaaggggttggggcacagagataagaggttggggcacagaaataagggatggggcacagaaataaggggtcggggcatggaaataagggattggggcacagagataagaggttggggcatggaaataagggattggggtgcagagatataagaggttggggcgtggaaataagggactggggcacagagatatgaggttggggtacttgcccctgctctagaagagcgggacttgccactaagagtgaaggagaaggggttgaggggtacttgcccctcccccagaaaagcgggacttgccgctaagggtgaaggagaaggggttgaggggtacttgcccctcccccagaaaagcagagaaggggtagagacaaggaaagaaggggttggggtacttgcccctttcctagaaaagctggacttgccgctaagggtgaaggaccaaggcaggcatccctccatggtctgacacctttgaaacatgggtgaa

SEQ ID NO: 7776 - DNA, 980 bp, Artificial sequence
  DNA replication origin
ggcatggaaataagggattggggcacagagataagaggttggggcatggaaataagggattggggtgcagagatataagaggttggggcgtggaaataagggactggggcacagagatatgaggttggggtacttgcccctgctctagaagagcgggacttgccactaagagtgaaggagaaggggttgaggggtacttgcccctcccccagaaaagcgggacttgccgctaagggtgaaggagaaggggttgaggggtacttgcccctcccccagaaaagcagagaaggggtagagacaaggaaagaaggggttggggtacttgcccctttcctagaaaagctggacttgccgctaagggtgaaggaccaaggcaggcatccctccatggtctgacacctttgaaacatgggtgaataatcagagaggtgtccctgcaatgattaaacaccaagggaaggctgccttcccagtccgtgaccggcgccggagttttgggtccacggataaaacgtgtctcctttgtctctcctagaaaatgaaaggaattgaaattaagagaacggagagattgaagagtggtgccaagattgaaaggagaaagaggttgagggatagtgagggaggttggagaagagagtaaaaagaggccgcttactggatttgaaattggtgagatgtttcttgggctggtcagtctgaggacctgaggtcgtaggtggatctttctcatggagcaaagaacaggaggccaggggattgatctcctaagggaggtcccccgatctgagtcatggcaccaaatttcatgtgcatccgtgtgaagagaccaccaaacaggctttgtgtgagcaacatggctgtttatttcacctgggtgtaggtgggctgagtctgaaaagacagtcagcgaaaggagataaggatggggtcattttataggatttgtgtaggtaaaggaaaattacagtcaaaggggg

SEQ ID NO: 7777 - DNA, 1230 bp, Artificial sequence
  DNA replication origin
ctgcttcctctctattattgcacaccttgaaggtgaggttgattaactcctgttgtggggtttgagggccagattctaatttttgaagttttttcctaatgccaggagtggatggggtgataaaatgcatattgagaataagacggccttttgaccttttagggtctagggctgtaaagcatctcagggttgctgccaaaggagccatgaactgggctgggtttttcatatttgatgaaaaagagcctaaatgctcactgatattgggagaggtcagataaagaagaaggagcattaaccttgactatgcctttggctccagccacctttttaagaggaaattgctgggcaggtgggggagggctagtcgaggaatgaaactgtaagctggaccagctgtgaggaggggaggtgataaaaggattatagggtaggggagcagaggctgaggaagaattgggacctggctcagcctggcaaggaggggagaggtcagatgggtctgtagaaaaggaagattagaaagactcagcgactcttggggttgggactgaggggacagatgggagggaaagaaggaagatttgggatgagttgcattgggaacagaggctagagagggactgatgtgtaaaagaatgcctggatgtcaggcatctcagatcatttgcccattttacgacaagaattatttagatcttgtaggatggaaaaattgaaagtgccattttctggctatttggaactacagtcgagtttgtattggggtcaagcggcattgcagaagaaaataagatgcttagattttaggtcaggtgagatgtgaagaggttttaagttcttaagaacacaggctaagggagaagaaggaggaatggaaggtggaagcttgcctatagtgaaggaggcaagcccagagaaaagaaagtagagacatggagaaggggtagggtgttcttgccctccagaaaagcagagaaggggtcagggcacagaaataaggggttgggtcacagagatataagaggttggggcgtggaaataagggatcagggtacagagatataagaggttggggtgtggaaataagggatcagggcacagagatacgagtctggggtacttgcccctcccctagaaaagcgggacttgctgctaagggtgaaggagaaggggttgggggtttcttgccccccagaaaggtggagaaggggtagagacacggagaga

SEQ ID NO: 7778 - DNA, 1315 bp, Artificial sequence
  DNA replication origin
tcacggtggaggcaaggaattgcaacttttttctattattgtacaccttgaaggcgaggttaattaaatcctgttgtggggtttgagggccggaatttaatttttggagttttatttaatgtcgggagcagattgggtaataaaatgtatattgagaataagacaccttttgaccttttagggtctagggctgtaaagtggctcagggttgctgccaaaggagtcatgaactgggctgggtttttatatttgattaaaaacagcctaaacgcttgtgatttgggataaagaaaaagaagaattaaccttgactatgcctttagcttcagccacctttttaagaggaaattgctgggcaggtgggggagggctactcaaggaatgaaactgtaaactggaccgggtgtgaggaggggaggtgataaaaagattatacggtgggggagcagaggctgaggaagaattgggacctagctcggcctggtgaggagcagtctggggaggaggggagaggtcagatgggtctgtagaaaaggaagattagaaagactcagcaatgcttggggttgggactgaggggacaggtgggagggaaagaaggaagatttgggacgagttgcactgggcacagagactagggagggaccaatgtgtaaaagaatgcctggacgtcaggcatctcagaccatttgcccattttacaagaattatttagatcttgcaggatggaaaaattgaaagtgccgttttctggctatttggaactgcagtcgagtttgtttggggtcaagtggcattgcagaagaaaataagatgcttagattttaggtcaggtgagagttgaagaggttttaagttcttaagaacacaggctaagggcgaagaaggaggaatggagggtggaaggttgcccatagtgaaggaggcaagtttaaagaaaagggagagtagagacacagagggaagcggttcgggggttcttaccctccagaaaagtgggaaaggggtcagggcacagagatacgaggtcagggtgtggaaataagggatcagggcgcagagatataagaggttggggcacggaaataagggatcggggcacagagatgtaagaggttggggcacggaaataagggattggggcacagatataagaggtcggtgcatggaaataagggattggggcacagagatacgaggttggggtacttgcctctcctctagaaaagcgggacttgccgctaagggtgaaggagaaggggttgggggtttcttgtcccccagaaaggcggagaaggggtagagacacggagag

SEQ ID NO: 7779 - DNA, 1831 bp, Artificial sequence
  DNA replication origin
tggctcgcggcggctgaggctcctggccggagctgcccaccatggtctggcgccaggggcgcaggcggggcccctaggcctcctggggctacctcgcgaggcagccgagggcgcaacccgggcgcttggggccggaggcggaatcaggggccggggccaggaggcaggtgcaggcggctgccaactcgcccaacttgctgcgcgggtggccgctcagagccgcgggcttgcggggcgccccccgccgccgcgccgccgcctccccaggcccgggagggggcgctcagggtggagtcccattcatgggctgaggctctgggcgcgcggagccgccgccgcccctccggctggctcagctggagtgctagctccgcaggaaactcggggcccgggcgagagccaccgagatggcaggtgggacgcagagcccgcggcagccagagttcctcccgcacggcccgccgacccacggaagagcgaaagagcgcccaggtggggccgagctgggggccgggcccctggagcgctgggaagcacagcgcgctctagtcaggttccctttcctggagccctccgcttccagactcccttctttcctccctccctcccgccacccctctccctcctctctgtgtcttctgtctctccccttttctcctctctacgcaatcctacgtgattgaggtttggatgagaaattctcagaggcagagcgagggaactgcagcttgggtctgctccgtccggtccctcccacaagagaaacacaaccacagtgggagttaaaggaccctaggtgcgcaaagaagaggtgggatgggggagctgagaaaatgcagtccacactctctccaataagcttgagcacgtagaattctctgtttagttaggaagaaagtgaacactggagaaagtaaaaatgacctcttggaccttatcgtgggccccacctatggctcattttggaacaggaaaaagtgtttcccttcttcttggaacccagatttcttggttctgtctggaaagctgcaaagcaggctcagtccctaaaaagagagcccaaataagcagcctgcacagaggatgactccaggtgcggcgagggagtgatgtggacaaggacagtcaacaacaagctgtggaatgcaatcaggtctccagacgtgaatgtgacgacatctgatgttggagacactgggcagaggagttctccaagttaaaatgcagcatgaagcattaatcaccctccatttatgctaaagtctgggagcggctattggtttctacttacaatttctcttcatatatccctaatctctctccttcagacacttcacgaagcatctaggatagtgcgaaaggattaaatgtatgatttccaagcacagacaggtgtatgttggcaacatcctaatagaaggcaaggaaaatgcaggccctgaagctactgaaaatggatgtgggacccagagggaacccaggagctttctagatatgagcacaaacctatgggcctagccaagattcacttgggcaataagaaggattgagatctgtgacgttgttcagatcaagcaggagtctaacaccctaccatgcccgggggcctggaccttccaggctgccagctgggcaaagcagaggctggcagatagaggctcatgggacaaacagctgggaggaggattaaataggcaagacatcctgaggaaagggagaatcccagctgtcatttgggaagcacacatcccctgcagcagttcaatgtggctgaatgaagacagtggatatatccttggaattctagcaatacagaacaagacacgtgaaa

SEQ ID NO: 7780 - DNA, 1294 bp, Artificial sequence
  DNA replication origin
gcccacctgcgctagtagtccaaccaacaggcggcctgtcttcggaagccgggtcccgagtccatcgcgcgcgcccaggtggaggggagtttgcacatggagccggagggagcccgggcgccggcagggggcgggccgggacgcggaagtgccggtccgccgggggcagccctccgagagcccgaggcgctgccacccctcggtgggctcgagcacggccccttgagaccttccggaggcggtggctggtctgaggacgacgcggaggacgtcactgcgggtcggtgcttccttacaggtgccttctggaccggggtccttggcacctcccctgctcctgccctcggtgccggaccctgtgccctgggagcccgactacctcggtgtcccagccgtcccgggcttgaggcgctgagagggctgcgcggcttccagcccggaaggcagcggtcccgcgggctgcgcgcggccaagggcgactccggtgtgggaatccggcggaagggaagcacccgcagggagggctggaccccggaggctgcagagcgtcagaagcgactctagggaactagggggtggggtagggaggcggggacgtggaataaagaaagctcctgggtgccggctatgagaagtcaggtgtgcgtaggcgtggacagagtgccgatgtgggagtctggacacctggattttctggtcggggctctgtgtccttgggtaagtcacttaccaccctgggcgtctccccgtcaatctgggtggggaagagggtgtgagatagaggattggcagcggcgtgcttgtttgtccccgtgcctttcaggctcctagaaaagcttagcataggtgcagtgggaagtggagctagaagggacagagggagaggaggcaggtgaggcgagaaatctgaagacaaaagagcgcttcgctttggcgccagtattctggcaggctttgcctctgccagcccgccccgatgaccaaacagcttctccatgagtttaaagatctcgatttttttttcccagcagcccccttgactctttttttttttcttttcctgatgccaacaatgcccttttggaagtgcaatgagtaagcatgggaagaatgctgtcgaagtgacaggacgtaaccctatgtggaatctcagggcaagaggggactttaggggacacttagcaatacaagtgattaagagcacagacactagagacaagcagcgttaagttcaaattcctactaggtgtgtgaccttgaacaaattacttaaccgctctgtccctcaattttc

SEQ ID NO: 7781 - DNA, 1338 bp, Artificial sequence
  DNA replication origin
cagtgcagacaagtaattgcaattcataaatacattgctacttggctgcctttactctattattgtacaccttgaaggcgaggttaattaagtcctgttgtggggtttgagggccggaatttaatttttggagttttatttaatgtcaggagcagattgggtaataaagtgtatattgagaataagacagccttttgaccttttaggatctagggctgtaaagcatctcagggctgctgccgagccatgaactgggctgggtttttcatatttgatgaaagagcctaaatgctcactgatttgggagaggtctgataaagaaaaaggagcattaaccttgactatgcctttagcttcagccacctttttaagaggaaattgctgggcaggtgggggagggctactcacagaatgaaactgtaaactggaccaggtgtgaggaggggaggtgataaaaagattataggatggaggagcagaggctgaggaagaattgggacctagctcggcctggtgaggaccagcctggggaggaggggagaggtcagatgggtctgtagcaaaggaatattagaaagactcagcaatgcctggggttgggactgaggggacaggtgggagggaaagaaggaagatttgggacaagttgcactggacacagagactagggagggactgatgtgtaaaagaatgcctggacatcaggcacctcagaccgtttgcccattttacaacaagaattacttagatcttgcaggatggaaagattcaaagtgccattttctggctatttggaaccactgttgagtttgtattggggtcaagcagcattgcagaagaaaataaggcatttaggttttaggtctggtgtgagttgaacaggttttaagttcttgagagcacaggctaagggagacagaggaatggagggtggaagtttgcctatagtgaaggaggcaagcccagagaaaagagagagtagagacacagagggaaggggttcggggcttcttactctccagaaaagcaggaaaggggtcagggcatggaaataaggggttgagccacagagataagaggtcagggcacggaaataagggatcggagcgcagagataagaggtcggggcacggaaataagggatggggcacagagataagaggtcagggcacggaaataagggattggggattcttgccccctagaaaagcaggacttgccgctaagggtgaaggagaaggggttgaggggttcttgcccctccccaagaaaagcggagaagggatagagacacggagagaaggggttggggtacttgcccctcccccagaaaagcag

SEQ ID NO: 7782 - DNA, 864 bp, Artificial sequence
  DNA replication origin
ttctagtttccactttgtcaataattacgttttcaatgtccttctgtggactgtttccaaaggtgccaatccagacccaaagtttcagatcactcagattcacccttaaccttcataacacaacccaatagctttacgaaaaaagttgcatatttaggtagttgttatcccattatgacaaaatacataaaattagcgagatattttttagccttcaaataagtgggaaaaaatccttttagctgagattccatttacatcagaataaaaatctaagttatgactaggttgaagcaacgtcctgtgcagcgctccataaagttcacttagtcttcaagggttccttacttagctaggttagtattcctggcctctttttttagcagtgagaaaaaggatactctccctgccccagctttatttttaaactcacagccatatcctggaggtctctgctggctatttggcgcgtgggggcggaggggggccgggggaggggggcggggcggggtctggaggtctgtgctggctatctggcgtgtgtgtgtgtgtgtgtgtgtgtgtgtgtggttggaggtctctgctggctatctggcgtgtgtgtgtgtgtggtgtggtgtgtgtaagcagtgaggttgttttagggccagtccttcctccgccactttgctgactcaaagacccagaggctttcttggggtgcaggtaccatgattccttgggccctaagggaatttttgttaggctagaagagtgggtgtactcatgatgggtgtacccgaacattcctgggctcaacaaaaccgattatctttataaccgcggcgcctagcacagcgcctggtgccctaaacgttggctgcg

SEQ ID NO: 7783 - DNA, 1140 bp, Artificial sequence
  DNA replication origin
gtgggtgtactcatgatgggtgtacccgaacattcctgggctcaacaaaaccgattatctttataaccgcggcgcctagcacagcgcctggtgccctaaacgttggctgcgggaacgtccgagacgcgggtgcggagccgggggcggaataactggttgcgcggcgctttgaccgtaggcgctggagcgcgtgcgttgcgtgcgcgcgcggaggcggctgcgtcggggcgcgagaaggtgcagttccccggcgggcgggcgggcgggcgggcgaagctgggctcggggccaagcgaggtctagccggagcgactgtgccccgcctcctgggcggagcgggcggctccccatggtcagagcctcgtgccggctcggcagcgcccggacgccgagcccagcgcgtcggccccccggcgtgcgggcgtctcagagccgcggaggggccgccgggaccgtttcagcgtggcggcgctggtgctggcgttggccctggaggacggccccgagtgatggctggcgcctgcctcccgggtgtctcccgggtacagatggagtcgtcccgcggccgccggcggcaaggtcggcagctgcgaggccaagagagaccccaggacacacacagctgcctcccggtgcgagaagaagaccccggcttgagagtgaggtgtgctgggcggagtgggggaggacctcgaggcgccccggcaaccaaccgtgttctaaccaactggcaagtgggaaaagttgacatgactagagaacaacggagcttatccaccctcctctttttcacagactggggaactcagtccacagggcaagagactttcttccctaggttacacagctattaagtggcagagctgggactagaaacccaacctgtttaaggctttttaagcctactgtcctcactgaagtgaatatgaataataatacaagtaattattatcgtattggattttggaaagttggatggtgatattcctttggcatgcgagactattaatatgactcgtgctggaaaaagtcactcatgttttctctgggcttggattcctcattccttcattcaatgaacatttgctccgcagttacttgtgcgaggcactctcaccggagactgaaggtatagagcaa

SEQ ID NO: 7784 - DNA, 1523 bp, Artificial sequence
  DNA replication origin
ctcccggcgctgccttgactcgcagccaggcctggcgcggccgccggctgtggaatgtgtgagcgccatgtgtcaccgccccagactgtgggaaaacgctgctccgctcacctcccagcagctgccccgcgcccgcccgggcgggagccgggaaacaggagccgcctgccgcggaggccgcccgggggcacttccgagcgcgcgccgcctgcccggccgcccccgcgcccgccgcgtctccccgcccacaccccgctgccacccggccccgggcgccacccgcggagcaggcggcgggagggacagcccggcacggcccctttcctgcccttcacaccccttctgcttctcaggggacgctggtccacagaccgaggccccgttgcgcgcggccgccttcggagcgccgccctcctcccgaaaccggccggggcgagtggctgcaagaagctgcggtttggcccgcgggagaggggggcttccccgctggggttgtctgacgcgaacgccttcctggccccagccaggcgccctgaggtcaggcccagtggtgagagagctctgaacgggaggccccacgctgcctgctcccccaaatcagaaacagcctcccccaccggggcgaggcaagggatctgcaccaccccacgcgctcccgcctgcacggtagcctagagcctggtgtgagcgggaatcacatgtgctcacacatcacccaggcaaggtctttgaagcccagccatgcgggcagacgtattcaaggtcaccctgctgggtggcggcagagctcctgttggaatccacgctcagaggaccttctgccgagccccagccccaaaggcatggcgccctttctctgcagcatggtgcccctcgtcgagttcctgccccatagagaagttgggaatggggcagacgggggtggggggaaatcatgggtcctgggaccccgacagctttgcctaaactcagcctcatgctgcgagacgtcccagtccgtcacctcagcctgattttctgggggtgccccacctgacaggcctggtagtgaagcccccattgtatccagccctctacgagcacctggcatttgtgtgccttgttccggcttgccacctcctctgtggaagtcttcccagatttgcccaatcattgcttcccggttctccggcggcctttgacaaacgcctgtttatgacgtttgtggccccctgtaactcatggcctacctgtcctctcctcccttccggagtttcctgagggcagagactgtgttgccctcctttttgatttccacacaaatgattatttgagaactctgcttatggcagctgctctgtttgttggctgaatgttatgcaatttaccactggctaggaatctcaccagatgtgtgaccttgggcaagttgcttaatctaagcttcggttttctcatctgtaaaatggagatcaactgatactgcgtctaaagtgacttgtatagtggctggcacaaagcagatgctgtgtgtgtgtatgaat

SEQ ID NO: 7785 - DNA, 1708 bp, Artificial sequence
  DNA replication origin
tgcctgaccgcacttaggaagcggccgggtcagcctcctgcctccgctcggcgactgcggttaaagcggcttcgcgccgcccgccccttccccgggtcccgggcggccgggccgctccccctcactacgcccgggaggccgccggcgggcgcccgggaggaggcgggcggcgcgggcggctgcgtgctgcctgctggccgggccgcgcgccgggaggagtcgccgccgccgccgccgggtgccacgtggcgggcgccgggccgggagcgccagggctctggcggcggcctccctgggggatttgccgagccgggcgggcggcgcgcactgcctgggccggccggccgcctcctccgcctccctcccgcctgcccgggtcgccggcccccgtgcccccaccccccctccgcccttcccgccgcctgggagctcggctcgcggctccgggcagcccgggagcccagcgtcttgtttgatgtggcctcccgccccctcagcccttcccgcgtcccggaggcctggcgcacggttctcagacacttcattccttccggcctcccagctccccactgagataacgttgtcaatgatttcgccagatctcgtcccggatgagattcagtggttcctgactctgggtgaccttgggcaagcccccctctctctttcattgtggaacacacgcgcagtgtcagacactgtgttaaaccctgggatttccacggtgagagatacagtggcggcctgctagaagttgacagtaaactgcgggggcagacagacgctgattttctgattgatgactggacattcctttatttttcctttcttttctgagttaggtggtggcttgagagatcaggaggacagaaacaaaatatgaaaccatacttgtatggataacagtattgctggtctacctgggtttacagcagtgagtaagaccgttattgctctctggaagctaacagtctagagatacatataaacgtgtacagctgacatctacggatggcccagtaaattcctctgggaagtcgtaggttcaagagagacgtatgtctggatagaggtaaaatgctatggagtttcaggagaattaagttacttttaagttggggtaccttggaaaacttcctggagggattggcctgtgtaccttgaaaaataggtaggattggggcattgggaatgtgcttagtcgtgggctggagaggatgcaggtacccatggtattaaaggccaagatcctggaacttgaagactttattcagggaacatggtctggagcctagggaatgtgagggactggaagaggcagcttgaggccatgtcacaagctccttaaacatcttgctgaaggactttggaccttatctttagacagtggagagccatgaaacattcttgagcaaagaagaggcatcagggtttccctttagaaagatggctctggcaaaagtgggagagtggattgcagggcttggaggcagaaagggcagttaggcagttcaagccagtgaagaaggttcctaggaggcaggtgcagactgactcccagaggcatctgtctacatccagctcctctggacattgaccgcacgctcttgggaactgagttcaactcaaacctgcctaccctttaatgcagtgttcccaacccccaaccaggaactcaggaactcagatttaattcctgagtctaact

SEQ ID NO: 7786 - DNA, 1132 bp, Artificial sequence
  DNA replication origin
aacttcttagaaattaaaaaaacacaaagtaaccacttaatcaaaaaagtcctcttctctcccagtattcaagttcctgtttagagtccggagggaagagaggtgggttggggagtttaggaggaggggtggcctgagccccctcagttccgccacggcctccacatggagtccgccgtaagcgaggggccgctggaaggtgacactgcgttggggcccacggaggtgccgctgttgctggtgtagacggggatgacagggccgctgtgcgcgaaggccccgttgggaatgaggaaagcaaactggccatcgggagccggtaccacctggaagcctccaaacaccttagccgcctctccagcctggctgcccagcttgcagggggcgccgccgggagggggcgccgcgcccccggggatgggcacgagtggcggcggcggcgcgaacggcgcgtgctgggggccgccgggtcccggtgggggcggtggcggcgcctgcaaggcggggtgcggctgcccggggtaggtcatggcattgatctgggtcatgcagttggccaggtggccgagcagccgagtgcgcacctcggtattaacgccctcgcacgtggacaggaagcgggtcacctcgttcatgcactcgctgaagccggctcggtacttccccagcacacttgggtctgtgctcagcgcagctgcgggccagaaagagacagacgggtcaccgaacggccctggccccgtggccactgcctccgccctgggaggtccctgtggcgcgcctccctgaccatgcgcccgtgaaactgcctccggcagggagggtgagatgggtttagaaaaaaccagccacctctccacactagcgttgctgccaaaagccgagccactccttcccgattccctgtagctgcatttaaacctatctcagccccagatctgtcacccccacccccgcgcgcgatgtgaccttggacaatgcctcccaatccatcatccaagcctcatttccccttctgcaacgggaaggagtgctaaaccagtgacccccaggctccacgcagttccaaaccgccacagtcctaagtcctttcgcccctacccggcgcccgccaccctcgcggctgcaacct

SEQ ID NO: 7787 - DNA, 1306 bp, Artificial sequence
  DNA replication origin
gggggaactggaaaaacactggcaggcggccccacccccaggcccggcggggccgcgcggccgccttcctgcggcctaggcctgctgcttgggaggcgctggggcccggggcgggggaagcgggggcggcggcctgcctgtcagcgggagcgggcgcgggctcgtgtgtcagcgccgcccgcccgcccgcccgccgggcctcccggcctcccgccgccgccgccgccgccgcccgctccccccgcggcctggcaggctgccggctgcacaggcgggggttcgcgccgttctcacgacctctcaggttgcctgagctcatctgggagctattcatttcctgccagaaagcagccgggcctgctaagcgaaccaccttggccgcagggccgccagggctggcccggcgtggccgccctggccggctcccgcccgggcggagggccccgggcggcctccctggaacccccgggccgccccggcgggcgcgcggcgggggcagcccgtccgcccatctggttgcacttaggagccggggaggaagctaggagcgggttgttaccggccaacgggtgtgggaaaagttaattgactttaatgacaggtttcccgggacggtggtgacgacgagggggtccaacgaaaccccagggtccccattccagaaacgcgtggggtgggacggggcgcgaggaggggcgagcctccggagtcgcgcttctgcgcttggagagggctctcgtgttgaccgaagagcacccccacccccttccagttcggcgcctttcccgctccggatgctgctggagacggcggggggccggggccccggaagggctccattgagaggctaatgcgcgcggcagccggggcccgcggcccgcatccggacgcagtttggagtcgtgccttatctccccgagcgatcagcactgctgggggccggcgagaggggctgctggtgtgcccgaggccgtataattaggccaggcctgagggacccccagggaggcaacatcattgaagtcgtttttgaagtttcgcctctccctcagctacttactccagaaacagccaaagtgcaggagggtacagcgtcttagaaataagtccattcattttccagacttggaaatgacccagagaagggaaatgacttatccaaggtgacacagtgaatttggtggcatagctgggcaggaactggaaagtgccctttccggtttggagcctagtggggtctccaccttctccccttactgtaacaaagaaaaaatcctcgtggaatagtctaaacctagctttcagg

SEQ ID NO: 7788 - DNA, 1456 bp, Artificial sequence
  DNA replication origin
gccctgcggccaaggtggttcgcttagcaggcccggctgctttctggcaggaaatgaatagctcccagatgagctcaggcaacctgagaggtcgtgagaacggcgcgaacccccgcctgtgcagccggcagcctgccaggccgcggggggagcgggcggcggcggcggcggcggcgggaggccgggaggcccggcgggcgggcgggcgggcggcgctgacacacgagcccgcgcccgctcccgctgacaggcaggccgccgcccccgcttcccccgccccgggccccagcgcctcccaagcagcaggcctaggccgcaggaaggcggccgcgcggccccgccgggcctgggggtggggccgcctgccagtgtttttccagttcccccggtagctccgggccgcatttagtagctggggaaactgggccgaggccagggccggggcactagaggccctcgcggcccgcagagccctgccaggcggcaggccacgccggggcaggagtgggcagagcggcggggtgaggccatcccagcccacagagccgtcccaaaaaagaccttgccaccagacagcaaccctggacgcctaaaaaaaaaatcctcatttctgaaaaccctgagcgcctactgagtgctcagcaggcccaattcccaccagcctccgccgcaccgagctccctgtgtagccggggagatccacaaacaccctcgtgactcatcccaggtttgatgtgctaagtgccaaaactgaagtttaaacaaagggcacctagaacagagagattaattctgatgagaggaaaccaggccggggaggtttttcagagttggcacttgaagccgagaggtgaaagatgagttcaacaggaagggttagaagcagaagggtgagggaaaacgcggagatgaacatatatacgtccagtctggggagatgtcagtatgtttaccatggtgtggtatctaagttttcaaatatacaaattggcttagaggtcaaaaaaagaaaaagagggataagccctgccgcagtggttggcttaaatgcaatacagcccaggggttagaagcacgtggtctggctcctggcggcttggcttaggttttgagcccgagggaaattactgaactccctgcctcaattttgtaactctgtatctcatttgtaacttagggctcgtcagggtagtgcttcacagggttgagaagatgaaatgagtacatgcacttaaagcatttagaatagtgctgtcagctcttcggattcttaaccacagtgagggacgttcaccagacaagaaagccagtcccggcctttgcccagcgatggcaggatctgcttgtaattgcaccaggccctaggtgaaaggaccactgcttcttccttagtttctgaatttcatgcattcatttgataattattgaaccaggcactatgggaataaagggagaa

SEQ ID NO: 7789 - DNA, 1345 bp, Artificial sequence
  DNA replication origin
atgatttctgtatgccagccactgtgccaggtgccgggggtacagaaaaatacatcatttttgcctctaaaacatgcatagcctaagctgcggagacagataaaccaacactacagtccaatgtcagcagcgctgtgttaaatgtcccagggaggccgggcacggtggctcacgcctgtaatcccagcactttgggaggccgaggacggcagatcacctaaggccaggaatttgagaatttgagaccaggctggccagcatgttgaaatcctgtctctactcaaaataataataataataataataataataataataataataatacaaaaattagccaggcatggtggtgcatgtctgtaatctcagctattcaggaggctgaggcaggagagtctgggtgacagagcaagactccatctcaaaaaacaaacaaacaaacaaacatgtcccagggagagggcgggaggggtggggaagggtcagagcaggggactgggcagggtgggcttcccaaagcagacccagccaagtctcgaaggacttgtgaagtaggaggtgtctgggtagagatgcgggggagggaaacttccagcataggcacaaagactgcaaagcgacagaaaccagagagcgtggcaggcttgggcactgaggcagctttgtgcatgggtagaaggaggtgggggatgaggcctgcttgcagggaatgaggcagctgagtaggccgggagcaaagcatgccagtttctgcagtcgtgaaggcagcaggaagccctgggtcatcttctaacagagacagggttgtttggactggatcatggccagcggattgcagggaggcaggaccagagttgaggagatcagtctcgggaagatgaaagtaaaaagcttgaaatttctgtaccaaggcaatgaaatggggttgagattcataagacagatgcagggatgagatacagggtgagtgtgaacaagacgcactgagcctaggaaaataagggtaggggcattctgtagggatgacagccgggctcatggaatcgagtttgagacatgctgacttccatgtatgtggagatgtcctgtgcgcagctgagtccatggcttgagagctcaggaaagaattacgggttgaaaatgccagattgggtagtctcctctgggcatgtagatgctcatcactactatgggtggccgagtgacaagagaacaaagttactggtagaaggtaaaaggagacaatcccataggggtactgagaaattaccagaaaggttggaagaactcagaagaaagagatgcttcagggggttaggaaggagggaatttcaaggatggagtt

SEQ ID NO: 7790 - DNA, 1393 bp, Artificial sequence
  DNA replication origin
ttctgtaacaaggccaccattgtttgcttcatttcagagtacctatggtcttctggtgagaaagagagagagatcaggagcctgtgtgtggagcccgtgtgtgtctgtgtgtgtgtgcgcgtttgcatgtgcatgggtgtgtgtggttagataagtaatttcaaaatgagcaaaaatagaaggagtcgatcctggttcatttcaaatgtatgctaaatctcagtgactctggctatagattaaaatactgatcacccgttttgttttggaagcatcaaggtcctagaggcatatttggttagaagacctatcttaatgctacagattaggtggtggtggagctgctgctggaagtggtgtggacgtacgggcagcggaggaggagtggagagaggagcagctgggggtgttgctggaggaggaagcagagccggggcagtggggctggtatgggtgtttgtgcagaggaggtggaggtagggggggtggggtgctggaggggagggggttagtggtgttggtgtggagggcatgaagaaggtggtggaggtggcagcggcagtgaaggaggaagtagaggaggcttggaggggctgagggaggtggagaaggagacagtggagacaggggttgaagggtgctggtggtggaggtgtggaggagatggaggaggaagtggagggggtggtggtggcaggagaggaggaactagaggaggggatggagaggatgagggagaaaagagtggtggggggagatgctgggtgaagtagagttactgaaaacagaacacactgctgtccatgtttccttcaccccgtcccagtgatcccacaagctgggaagactcaaaaggttatcccggaaatcgcagggcaggtttagggtggtcactcccagccgaggcctctttgagtagcccttgttggaagcagctctgcctggatcagaagcgcatagacataggtttatgacacaaactatgacagtgtaacccttctggaagtggcgggcggggtgggaatcacctgggtcatctgaacagaatgtgttggggatttgtgagtgaactgcatggttcagggagaaaagtgaactggaagtccccagggcctgggtgccagccctgcctctgctgaactgtgcagacttctctgctttattttccagtctcccattgtgtgaaatgaggttgttgaattaggagtgccagctctaacagacactctgtttctgcctaagagaaattatgtaaccattagagctttgcttgaggtcgttcctggacttttaaggatagagaccagcctggacaacagggtaatcatggtctgcctgactctgggccactagagttgattttcctttctcaaacacagttctccagaccaca

SEQ ID NO: 7791 - DNA, 1534 bp, Artificial sequence
  DNA replication origin
gagagggttcacagcctgctctcccctccctcccgcctcccataattgcttccctcccttcttcttccatcctgagtatttgtcattctctgcttgtggcaaattgcttttcacctttgaaaaccaagaatggttgctacccaagacagcctggaagttttttgcaagcagggaggtgtttagcaatagaagacactgttgatgactctccccagctgtggcatcactgaaattcaatttactaagcatttatggacagcctatgagatgggtactgtgggggatagcctggtgatgcagaggtgggtcttgcctcttagggactctcaggccagtaagaaagagatcatttttactcaagagatgttttattaagtgcttgctaaaggccaaatactggtaggcctacagtgaatgaggattcgccttgccctcaaggagttcattgtcatgtgaagaaggagaaattactgacaatttcaaacttcagttttacattctgtgaagggagacatgcagatgaaaggagagagtggcagggagctaagggagcagacgggaagttcagctgcacggagaggtgggagctaggcaggacgaggggggttggtcattagtgggaaggggcatcaggcagagaaacgccagactcctattacatcttccactgtgcggggcagaggtgggaatgagcttgcttggtccaaggactgaaaggagatttgtgtggctggagaggagggaggaagtggacagcatgagccaagccaaggctgcagaggctggcaagggaaacaccgaggccaggaggccaggagaaggtttgcagaatggttagtgttcaatcgcaacaaaaagccaagggggcggtgaaagacaaggctaaaatatctgttaggcccaagatcacgccagcaaggggagtccagggaccctggggctgaagggggaaggctgtcggtgcggaccccagtctagaggctgttgcagaataagtgataaatgacaagggccacagcagagtggcaggggtggggtggggatagcgtgggggtagtgtgggggtgggggtggggtgggggtagggtgggggtggggtgtcattggcaactacaataatagtaacaccatggtctttccgcttcccccttccaccacatgaagcccctgtttcaaatgccctctcagacccctccccaggtcttcccgactcccctcctctttccgctccccactggagatgctgccaggaaaacagaggtcctggagaatacgttcactcggctacagggagaggaggaggctgagaagccggaacaaccagctcatcctgaaagcagaggcccatgaggcccctttgtgacccaaaagattcccaccctgaatgagtctgagcacacacacgtgtgaccccacacacacacactcattcactcactcatagcccagaacttgccccttattattttacctgaaatttcagcatctggaaattaactggaataagaaaatcctttccaataaatgcccatcc

SEQ ID NO: 7792 - DNA, 1097 bp, Artificial sequence
  DNA replication origin
gacattcccaaggctcagtcttctggctcagtgacgaattgagtggggggagggacgtcaacaagtctgaacactctgacccggtgccatcctcctagaaggaagtgtatcagccaggggcccggcccatcaggaaccatgctagtatttccaacagagggagtttaatccaggggactggttgcatcggtggtataaaaactgagaaggcaaacgagatggtgagcagccccgaggtgagcaatgggaggacggcgctgcaccatttggagcaggagggacagaaaagggaagcaggtggagcccggaggccgggagctgcccaccaggcagaagccacagcagacctgcgcagtgggaactggcgccggggaggcgcaagccctgctagagatgcttcctagagcagggacccaggggaggaaatgccccggcgtctcccctccgcccaccctctcctcacctgctattggccaaacctacctggagcaagggacctggggagcgtaaccctgagatacaagccagcccgagaagaatgggcatgtgtgtgggagcagcgggccgacaggagcacaggaacaccagaggaagcagctgcggagaagagaccgtgcgtcctgatctgaagatgggaagcgagaggtccctccaggaaggaatgtctagtttgcagcagcatagagagtaggatggctggggaggtagatgtggcaggcgcgactgtagctctctgtctcaggttttctcaacccagggaaaagctgattaatgcctgagtcactctgtccgcgagctgagcctcctgggtggggcagggcaaggtggtatcgggtgattcggggatgtgccagcctcagggaggggagagaggatagtgtgcgggaaacagagctggcctggagaggctgtcacgcccacagcatcaccccagttctgacggcaaagctgtgtgactttgagcaagtgaatgatgcgctctgggcttcgatttcctcgtcatcaccaacccctgcctccagcacaagctgctccacaccaggcaaccgcctgtagttgcccaaactctgtgcttcctcaacacccaggcctgcagt

SEQ ID NO: 7793 - DNA, 1462 bp, Artificial sequence
  DNA replication origin
aagtcgcaggcgcctgggttagccatggaagccccccggggctggggaagggccggacgcaggaaggggtccggtggggggcttgcaggagcaccaccagggtccaccacaggccccctctgtgtggccctggactggggcgtggcttccccgtgtgtgccctctgtcccctcggggaaggactggatttggttacttcttccccagacgcaccgtactctggacggatgggcccccatctgaccctgtgaccttcagaagtcactgcctctttggagttcagttccccagatgtaagggggtttgactctggaagacccctccctcctgccaccctgtggccacagaagcttaacttgatggagtgggggtactgataaagagtgcaatgcctagggaccatttggtgagcctttagatagcttttatccagagagatgtgatgaaaatcctattagaaggctgatgagatcacggaattatctcattagctggtagagtggggacatgtgagcattttacagaaatcaaatcccaagagttcaggagagagcttgtgagtgaggaagtgtgtgtgtgtgtgtgtgtgtgcatgtaaatatgtgtggtgtgtgtagtatgtggggggtgtggtgtgtgagtgtgcgtgtggtgtgtgtggtgtgtgtagtgtatgtggtgtatgtatgtgtggtgtgtgtgtgtgatgtgtgtatggtgtgtgtggtgcatgtggtctgtgtggtgtatatgtgtgtggtgtggtggtgtatgtgtgtgggggtgtatgtgtgtgtgttgtgtggtatgtgtggtgtgtatctgtgtggtgtgtgtgtggtgtgcgagtgtgcatgtgtgtgtggtatgtatgtggtgtgtgtatgtgtttggtgtgtgtgtagtgtgtgatgtgtgtggtgtatggtgtgtgtgtctggtgtgtgtatggtgtgtgtgtagtgtgtgtatgtggtgtgtggtgtgtgtggtgtgcatgtgtctggtgtgtgtgtatggtatgtgtgtctatgtggggtgtgtggtgtgtgtgcgtatgtggtgtgtggtgtgtgtgtatggtgtgtgtagtgtgtgtgtatgtggtgtgtgtggcgggtgtgttttgtatgtgtagtgtgtgtgtatgtggtgtgtgtgtagtgtgtgtatgtggtgtgtgtgtagtctgtgtgtcggtgtgtgtgtgtgtgtgtgtgtgtatgtggtgtgtgggtgtatgtgtctggtgtgtgtgtgtgtgtgtgtgtagtgtgtatgtgtgtgtgtgtggtctgtgtgtcgggtgtgtgtgtgtatggtgtgtgtgtgtagtgtgtatgtggtgtgtgtgtggtctgtgtgtcgggtgtgtgggtgtatggtgtgtgtggtgtgtgtgtatgtggtgtgtgggtgtatgtgtggtggtctgtgattttaggtggatgttttagggtgg

SEQ ID NO: 7794 - DNA, 2413 bp, Artificial sequence
  DNA replication origin
ctggctgtggtggctgctgtggggccttcctgggaagcatccagaaggtctccagggctgccttcctgaagcacaggaggcgcgcatgcctccaccggctcccaccgccagcttccactccccacgcttcggcgctcaggcaaaggggcatcggggaacgccaccgggcagagacatcagagagctgggccgggaggtgggagatggggtggaaccgccctgtacagtggctgctgaaaagagcaggggctgaaggcatctgctgcaattaccctctgttcaaagcagcagcaggcaactcttacacgctgagttacactcttccactctaattccactcaaaggactgtacgtgctaaatgtttcatacttgacaggcaagtcctcagttatccaggggtgactcagagcagactaacgtccacagagggccctgggtgaaagaggcggtcttggccacgctgggacaggtgcgctctgcggatgcgcgtgtgagggcgccgtgccacagtgacccgcatgagtgtgagctgtttgaaggggaggtaccagaggacttttcatttctgctggcttcagccacaccgttgtgtggttgtgtgtgtgtggtgtgtgtggttgtgtgtgtagtgtatgtggtgtgtgtagctgtgtgtggtgtgtgtggttgtgtgtgtggttgtgtgtggtgtgtggttgtgtggttgtgtgtgtggtgtgtggttgtgtgttgtgttggtgtgtgtgggtgtgtgtggtgtgtggttggttgtgtggttgtgtgtgtggtgtgtggttgtgtgttgtatgtttgtgtggtgtgtggttgtgtgtggtgtgtggtgtgttgtgtggttgtgtgtggtgcgtgtggtgtgtggttgtgtggtatgtgtggttgtgtgtggtatgtgtggtgtgtggttgtgtggtgtgttatgtgtggttgtgcgtggtatgtgtgattgtgttgtgtgtggttgtgtggttgtgtgtggtgtgtgtggttgtgtgtgttgtgtgtgtggtatgtgtgattgtgtgtgtggtgtgtggttgtgtggtgtgtgttgtgtgtgtggtatatgtgactgtgtggttgtgtgctgtgtgctgtgttgtgtgtgttgtgtgtgtggttgcggtgtgtggttgtgtggtgtgtgtggggttgtgtgtgctgtgtgttgtgtggttgtgtgttgtgtgtgcggttgtgtatgttgtgtgtggtgtgtggttgtgtgtggtgtgtgttgtgtgtggttgtgtgttgtgtgtttgtgtgttgtgtggttgtgtgtggtgtgtggtgtgtggttgtgtggttgtgtgtggttgtgtgtggggttgtgtggttgtgtgtggtgtgtgtaggtgtgtgtggttgtggtgggtgtggttgtgtggtgtgtggttgtgtgtgttgtgtgtgtggttgtggtgtgtgtggttgtgtgtggtgtgtggtgtgtggttgtgtggttgtgtgtgtggtgtgtggtgtggttgtgtggtatgtgtggttgtgtgtggtgtgtgtggttgtgtggtgtgtggtcgtgtggtgtgtgttatgtgtggtgcgtggtatgtgtgattgtgtgtgtgattatatggtgttgtgtgtggttgtgtatggttgtgtgtgtggtgtgtgttgtgtgtgtggttgtgtgtggtgtgtggttgtgtggttgtgcgtggtgtgtggctgtgtgtggtgtgtggttgtgtgtggtgtgtggtgtgtgtgtggttgtgtgtctgtgttgtgtgtgtggttgtgtgtggtatgtgtgattgtgtgtgtggttgtgtggtgtgtgtggtatgtgtgactgtgtgtggttgtgtggtgtgtgctgtgtgttgtgtgtggtgtgtgctgtgtgttgtgtgtattgtgtgtgtggttgcagtgtgtggttgtgtggtgtgtggttgtgtgtgttgtatgttgtgtgtggttgtgtgttgtgttgtgtgtgtggttgtgtgtgttgtgtgtggtgtgtggtgtttgtggttgtgtgtggtgtgtgtggttgtgtggtgtgtattgtgtgtggttgtgtgtgcggtatgtgtgattgtgtgtgtggttgtgtggtgtgtgctgtgtgtgtggatgtgtaagtgcagtgtcttctccatccctccttcgggcgaggctcctcctctgcccgaaccttttcctttaaccatgtgctccgtgctccattccacttgctcttctccctggctgatgttatcctcagagcccttcggtttgttccacacacgtttcctggtgtcttaggtcaggctccccggaggcagtcgttaagggcccagacgcaggtgatttattgaagggagatgatcccaggaggaactagtaaggaggccgggagtgcgcagcccgggtggg

SEQ ID NO: 7795 - DNA, 1617 bp, Artificial sequence
  DNA replication origin
gcttgggtaatttttataattttttgaagagatgagatgttaccatgttgcccaggctgatttcaaactcctggcctcaagcaatcctcctgcctctgccgcccaaagtgctgggatgacaggcatgagccactgaacccagcctgtaatataattttaaacatagcagagagggtttccattacatccgagtagcatgattcatgtaaccaatccctcatgttggacatttaggttgtttctattttcttgctgcggcccaatgcctgttctctcatttgagagtcacaatagccctaaccatgccgggactgaggtattatgatgattattgttatcatggtcgttcttggtttacagtcgcagactgggactctgagaggtggcttcactccctgggacacaactgggcagaggatggggtgggctgaactgggcagcggatggggtgggatgaactgggcagagggtggggtgggctgaactgggcagcggatggggtgggctgaactaggcagaggatggggtgggctgaactgggtgggggtggtgggctgaactgggcagcgggtggtgtgggctgaactgggcagaggatggggtgggctgaactgggcagcggatggggtgggatgaactgggcagtgggtggtgtgggctgaactgggcagaggatggggtgggctgaactgggcagcggatggggtgggctgaactgggcagagggtggggtgggctgaactgggcagcggatggggtgggctgaactaggcagaggatggggtgggctgaactgggcgggggtggtgggctgaactgggcagcgggtggtgtgggctgaactgggcagaggatggggtgggctgaactgggcagcggatggggtgggatgaactgggcagtgggtggtgtgggctgaactgggcagaggatggggtgggctgaactgggcagcggatggggtgggctgaactgggcagagggtggggtgggctgaactgggcagagggtggggtgggctggccagggcagcagatggggtgggctgaactgggcagagggtggggtgggctgaactgggcagcggatggggtgggctgaactgggcagagggtggggtgggctggccaaggcaggagcagaggctagaacccagtgcaaacctgaccgtctcagccactggacttacgttgctggattgagaagagaggggaccaggcttggggagcagccagggactctggataagtctcagaagcccctctttgtgcttccagctgagctggagcccaaatggccaaatccaggcccgttggtgaggcagacatccatggagccagcgtcgggtggcagtccctgggtgtctggggccagggttctaggccccattctaggtcccatcaccctctggaagaagtgaggcttagctctgtggtggatgacagactggcttgaggcatgcacagaaacgtaccctcccataagcaatgtgaggagaggaaggagctcatttgcacccagccaaaccttccctatccctcaaaaaaaaaaaaccccatttaaaaagccagacttccttggcttgccgaaagtgtggaacatatttgtgggcatttg

SEQ ID NO: 7796 - DNA, 1710 bp, Artificial sequence
  DNA replication origin
ccctcacgtggccccagcgtcccagaatgtcaccagggtcacaggacgggagagggccttggcaaggcctctgaagattacaaaatgaccctgaactcctcccatgtacagagccctgccggggccaaaatcccaccgaggttgcagggttggcaccttcaggaccccgaggacactcagaaagctctagagattcccgcaggcggctgggttggtgaggcctgggatggggtccacgctcacacccatacctgtgagcagaggcagagggactgggagcctgccttcagcctcaggcccctgctgggctctcagcgcccggaggcatttcaagagggctgtggatttgttgttttgtcttgttgtgtttgtttgcttgtttaatgaatgaactttctaaacccttcctgaattagaagggggaaaagctatagggagatgaattggggcccaatatggagaggagcgctcacacactcagggctggccgaggacgaaagatgctgctttggaagggagggattttcccatctccggaggtgtggaaccagggctgcaagacacacggagtgtgtgtgtgctgagtgcgtgcatctgggggtgtgcatgtaagtgggtgtaaatgtgagtggctgtagggggtgtgtggtgagtgcatgtgtgggggtgtgttgtgtgtgtaagtgggtgtatgtgtgagtgggtgtgtgcgcgcgtgggtagggtgtgtgtgtggtgagtgcgtgtgtgggtgcgtgtgtgggtgtatgtgtgagtgggtgtaggggtgtgtgtggtgagtgcgtgtgtgggggtgtggtatgtaaagagggtgtatatgtgagtgggcgtgtgtatgtgagtgtaggagtgtgtgtggtgagagcacatgtgtgatgtgtgtgtaagtgggtgtatgtgtgagtgggtgtaaaggtgtgtgtggtgagtgcgtgtgtaagtgggtgtaggggagtgtttggtgagtgcatgcgtgtgggtgtggggtgtgtgtgtgtaaatgggtatatgtgtgaatgggtgtagcggtgtgtgtggtgagtgcgtgtgtaagtgggtgtatgtgtgaatgggtatgtaagtgggtgtaggggagtgtttggtgagtgcgtgcgtgtgggtgtggggggtgtgagtgggtatatgtgtgaatgggtgtaggggtgtgtgtggtgagtgcgtgtgtgtaggtgtgcagtgtgtgtaagtgggtgtatgtgtgagtgggtgtgtgtaagtgggtgtaggggtgtgtgtggtataagtgggtgtgtatatgcatgagtatgtctcgtgtgtgtagaatgagagtgtgtgagaaaatgtgtggtaagtgggtgtgagtgtgcagtgagtgggtgtgtgggtgtatgtgtgtggtgagtgggtgtgtgtgtgcagtgtgtgggtgtgtggtgtgtgtggtgaatgggtgggtgtgcgtgtgtgcagtaggtgtgagtgtgttggggtatgtgtgtgtgtggtgtgtggtgagtgggtatgtgtgagtgtgcactgagtgagtgtgagtgtgaggatgtatgtgggtgtgtggtgagagcgtaggagtgggtgtgtggaggcgagcagggtgaaggggtgacctggacgagcagtctaagatcgtttcaatgccaggagtctaccatttaaagtagactgatggctttttcactcattgcatgg

SEQ ID NO: 7797 - DNA, 1195 bp, Artificial sequence
  DNA replication origin
tggccagtgggaaactgcccaggcgagcagagattcagaaggagggcggggcagaggcttcggggctctcagcgtttaaaggctgggagaagaggttgagcctgcaggagagaccaaggtgagacagccagagacggagggatggggaggggaactcaccaaagtagaccatgccttggcctctaagcttcccagcaggcagtgcagtggggaaaaggagatcccaaccatttgcatggccagacgcaggggtgaggggctggagaggggtggggtaccctgggcccgggccagacgcaggggtgaggggctggagaagggtggggtaccctgggcccgggccagatgcaggggtgaggggctggagaggggtggggtaccctgggcccaggccagatgcaggggtgaggggctggagaggggtggggtaccctgggcccgggccagatgcaggggtgaggggctggagaggggtggggtaccctgggcccgggccagatgcaggggtgaggggctggagaggggtggggtaaccctgggctggggccagatgcaggggtgaggggctggaaaggagtagggtaccctgggccggggccagatgagcaattctcctcagggtccttgcacagtggacgctttgtcacttggtccaaacgtccccggcaacaggcctcctaacaacagagccgggagtgccacggggtcgtctcagattttatccaccacgtgaccccagcccctcatgtccagcttggttgaggacgtatttgaggccatcgggaggagtggatgaactgcgtgtctccttccaggatctctccctgaatagtatttcgtcgcacctgagcttttaaacatcaggtggccgtgagtccgaccctgaccttttggccaagcgttgaggtgcagggcttcccctctccagaaaacacagactcaccacactggagtcgacctcttctgatgaaatcacgccgcctaagaagagagagcctttcaatgcccaacaaaggaaacacttggttaatctgagcaaaatcaggaattcctcaggaagaaaggaagaggcagatgggtttccagctgggtatttaagtgacttcctataatgcagtctataaactgagtccaaagggctaggctctgttgaggagggggatgccctcaggaagctgtgtggcctggtttcctg

SEQ ID NO: 7798 - DNA, 983 bp, Artificial sequence
  DNA replication origin
ccgtgggggctcttccccgcccacgaggcctaggtgctgccgcagccaccccaggaagggccccaggccacagtcgcagcgccaggagttgtgccccaacaggacctccgtcagccggggcagagccccaaacacgtcgccaggcagggtctccagctggttgtggtcgagctggacgctctccaggctgctgagattgcggaagagggcacggggcagggcgcgcagcctgttgcggcgcagggacacctggcgcagcttgccgaggccgcgcagcaagccgtcggggagggcggtcaggccgttggagtgcagggcgagcacctggagctcgccaaggccctggaaggcgccctgcggaagcgcgctcagccgcgggctcagagtcacccctaagtaccgcaggcggctcaggttgcggaaggcggcggcgggcagggtgcgcagctgggtgcggttcagccacagctcctgcaggccccccatctccccgaagagcacccccgggagctctgccagcgggttctcgaacagagtcaacagagtcagattgtgcgaatgaagaaagagcgcagaggggagaaacgcaaggtggtttctcgaaagcgtcaaagaactgaggtttgggagccggtcgaaggccccgggtgcgatggaacggatgtgatttcggtggaactgcagctccgtcagggcgcccaggctgttcaacagccccgaatccagagacacaaggcggttcgagtggagcagaagtctctcgagcttagcctgtgctccaagcaaccccttgggcaggtgggtcaggttgtttcccgataaatccaacaacttcaggttctccagattcgtgaagagactggcaggaaggaaatcgagctgattctggttcagagcgagctcctgcaggttaaccagtttctgaaacatgttttggtcaatgccccttagcgcattgtggtccaaaaacaactgctccagga

SEQ ID NO: 7799 - DNA, 1423 bp, Artificial sequence
  DNA replication origin
cgctcccccgcctgcctgccggctctccccgcagcgtgatcgggcgccgccgcggaggggaggggggttctctacgtcgctggcggcgggggggccgtttcggagtgcagaccgcccccctcccctgcccacctcccgccgccctcccttgttctcgccctgccggctgcacgccgccgccgcgggcgcggaggaggaggagagcgcggacgtcccagggccggcccggccccgccgcggcgcctccttccctcaccctgagccgcagcgcgcggcgccggccgagggcgatggggctgggctgaggcgaggcggcggcggcgacagcggcggccgggtcccccgcggtccctggggctggtccggccgcgagggaggccgcggaggaggcggcgcggcggcggccagtgagcggccccggtgagcggggcgaggggcgggtgggcagcggcgccgggggaggtcgaggaggcgaatggtggtgtcggggcggcgggtaccgggcgaggtcgcggccagccttctcgggccggagttgggcatcgcggggacggggagtgtcgggggcaggtgaggccagggcaggagcccacgcggtgggtgcgaaggcctgggggggacgcgccgcctgccgggggcgagcgtgggggccgggcgcttggtggttggtagtcagagctttcggaaagtcctgtgggaggtggaggtcctgtgggcagaggcgtaggggtgctggcagggccctcgatgagtctgtgcgggaccctagctcgtcctcagccgtggagtatggagctgcttgccatctccgcatttcacagataaaaggagtgagtcccgtggaggaaaagtgacttctgacttgcctgaggcctcccactcggactctgtggcagtgaggactagaaaaacccagggccctttgccctagcagtgctctcgtggccactctcgctatggcctttctgtctctccattcccttcacagagtcaggttctggtggaagtatgacctctggcttttttggggaggtgaggggtagggatgaagggggagggaatcgggttgggattggcaggaactcagctgggggcttcccggtgtggaagaagctttgtgacaggtgtttattgtttcctcttcccatagatctgacagacatccctgaatcttggtgtttggacataggaggtatgaatcactcacataattagccgcttttaatcatcagtgtcttagagctatatttagtggttatattagtgcaaaatgaatgggtgtggagtcgtacacctagaaacagacttgtgttcctctatacgattctaactaaatgagtagaacatacctgggtatgtcatggctactttagatctatgaggcaggaagttagaatttaaggaatctaagaaatgcagggac

SEQ ID NO: 7800 - DNA, 2473 bp, Artificial sequence
  DNA replication origin
tgacaggttcatgctgggtagcttggaggtatacactgcagccagaagcctagggaaactcttaggattttaaatggagtgcattgtagttcactctgaaggctgaatttgtctaacaattcaggctggaaaggatggatgccagtgggaaccaccgtaggaatttttttttttagatggagttttgctcttcttggccagagtggagtgcaatggcgcaatctcagcccactgcaacctccatctcccaggttcaagcgattctcctgcctcagcctcccaagtagctgggattacaggcatgtgccaccacgtccagctaattttgtatttttagtagagatgaggtttcaccatgttgtcaggctggtcttgaactcctgacctcgtgtgatccaccagcctcggcctcccaaagtgctgggattacaggcatgagccactgcgcccagcccaccataggaatttgaggcttattaaggaggtgaaatagataggacttggtgattgggtaaggcagagggctgaattaagaatgactcactcattcccaactttctaattctgatgactgtggagatggtggtgccaacagctgagggaggggcagctatgaaagcagagaatgagttcagttttggaaatgtccagtttggggtgtctgtgatatctagctagagctgcctggcaggcaattggatatttggttctaaattttgtggaaggggtctgggttggaaattgctaatttgggagctgcatccatgaggatgcaggcaatcccagaagaatgagtgaagtgagcaaagttgttggcttagagtggaatcctgaatttaaggtgcagattcacaagtagatgttaccaaggaggcagaggctttacttaccttcatgtgataatccagagggttcactcttctgaaaccaaggtagtagagagattccagaaggtgagagtcatcccaaggtgtcaaatgtagcagaaagaaccagagagataaggcctgaggaatgcctgcaaggtttggcaaaatgaaagtcatgagttgctcttgcctgagcaaggtgaagggttagagttggggaggagaagccagaatgccaagtgttgagaaatgaggaagcagaggcagccagggaagaccattgtttgaggtccgcatgaaacacttggaagctagttggagggagcacttcaggaggaggttggcttgataattttgtttttaggacttggagaggccaacctgtttaaaggctgagaggaagcagcaaggcaaggaagcctgggaggtgggggaggaagattttagggccagaccccacccagaccgttttcttgtggtttgcccaacactaccacacaccccttaatctcatttaatcatttcaacaccacgaggtttgaaacaaacggtgaggtatgaaacaaaacggtgaggccagggattgggaagagaaagctgtggttccatctcggtccagcgtgctgtccacgccaagaggcgggcagaaatgctagcctcacacaatctaggggaccaggggtggctgtggcgccctcctgcccgcaggaggtgttatcagtgtcgcggactcgggcggtgtgctgcccctggtgagatgtcatcacgtgcgtggaccaggggtggcggccctggtaagtgtccagggactaagggctccctgctctccaggtgtggtggacggggtccgcatgcatgccgtcctcttctctaagacgctaaggcggctgagttctgtaagtagcggcaagaagaacagtcacggagcgggccgggcacaaagggcgcaggccaggtggccccaggcggaaagatggccgcagccagaggctgcaggtggccgggcgcgctccctgcgcgcgtcgcggagaggacgcagcgaaaatcaaacccgcgatttggaaatccggctgcggccctaccccgagataagtcttctgcggagggaagtatttaatttgcatccaggacggtcggaagaggcgccttcccgtcggaggcgaggcgcgggcgcgtgggagctttctcgtgtgcgctcctccctgtcctccgcctgcggccggggcgcagagtccgtggtcatatgagaatgacagttttttgtctgtttgttttggcgggggcgagggtggctaaaggaatgaaagagccttgcattaggagctgggctctggtttcctctccaccattctagcacaagcttcctccatgaccatgactctgggcaacgtctgtctagtcactgagcctcagtttccctgttcataaaatgggagattggactatgatgttgtcatagcccaaaggggatgaagtgggatttgccgttccatttcatcccaccagaaaagccgccctccattagccaccccgggctgacacccagcgtttttggacggcctcgcctccccttacctgcctctttctttcttttgcccgttcga

SEQ ID NO: 7801 - DNA, 932 bp, Artificial sequence
  DNA replication origin
tcacataaactaatactctggctgctgtgtgataatgcactggaggtgggcaagggcaaaagcagaggaacccactgggagcgaatgcactagtgccaggtgagagatgagggggcatgccaggtgagagatggaggaggcatgccaggtgagagatgaggggacatgccaggtgagagatgagggggcatgccaggtgagagatgagggggcatgccaggtgagagatggaggggacatgccaggtcagagatggagggggcatgccaggtgagagatggaggggacatgccaggtgagagatgaggaggcatgccaggtgagagatgagggggcatgccaggtgagagatggaggggacatgccaggtcagagatggagggggcatgccaggtgagagatggaggggacatgccaggtgagagatgaggaggcatgccaggtgagagatgagggggcatgccaggtgagagtggaggggacatgccaggtgagagatggagggggcgtgcgaggtgagagatgagggggcatgcattattctagtggcagtgaaatggagcaatggggaaggatttgaaatggacttggtgttggattggatggggtggtgaaggagagggaggtgtaaagaatgactcccaggttttgggcttcagcagttgtttgggtgacagcgtctttgctaaggtcaggaggcccaggagagaggagctgatttggggaagaaaggcaagagttaagtttgggataagtgaacttatctggcaccagtgaaaccccatgtgaaaatgatagggaggaatggccaagggactctgaggagtggcctgggctgcaggcatatggttgacattctttttgagatagagtcttgctctgtcatccaggctggagtacaatggtgccatctcagctcactgcagcctctg

SEQ ID NO: 7802 - DNA, 1833 bp, Artificial sequence
  DNA replication origin
aattgctgttggctcaggaaatgtggacaatacgcaggaagggacgccgtgccttacagcgaccggcagggactcggccgtccgcgagcccagccgcccgccccgctccggccaggatgttggaggtgggtgaccgcgaagaggtcggcggggggcgggggccgcagtctttgtgcgcgcgcagctcccggctcccgccgctggggggcggcctccgccctgccgacccccgacaatagcgcgaggggtggggagcgcgcggtcccggaaacttttccccggcgccttcgccgccgccgcccgcgcccgggagcgcgcccttctctgcccgcggtcggtgcgctcggccggaggcgccgcggcggaacggaacccagagaagggcacgcggggcggcggcgctcggggcttgcccgcggcgagggaggctgcgcccaggtccccggccccgcgccgcgcgcccagccgcgccatgggggaggcgcccagccccgcgcccgcgctctgggactgggactacctggaccgctgcttcgcccgccaccgcgtctgcatctccttcggcctgtggatctgcgcctcctcctgctggatcgccgcccacgcgctgtaatggggccacgggtcggggggctgtcgggcggggaaacgggcgccaatcccctgctgctccctctcggaaacctagaggagggggcggaaagggggatgaaggagatggctcagtaataggatccaatggaacattgctctgtagactgaagtgggatcttctttccggatcccacgcacagggaagctgggctgtgagccaaagggaggaggctgggtggtgcagcggatggggccccgaggacaccgcgagccctgggtgctattgtcagcccttcgccattgactcgcagtgtgacctgggcaagctccagaacctctctgggcctcctatgaccggagataatacctcataggatgatgggaggattcgatgaatcagtaccgttaaagcacttagtaaatgctcattaaacatcatttgtattgctccagctaggccaccaactcttaggaccttggcaagtcccttgatgtttctggcctcagtttacccaaagtcctcttaggtgggaagggaggtagtgatatgatccagctggcctgtctttgccctggtctgtccagcacctggactggtttgtccagatgcccacggtagcctaagttctaagagtgaatctccaggtcctcagccgctctgtcctaggcatggaaatccactagcagtgctcaggatggtgccgcccaagcattccctggcaggggagaaaggaccagcacccctgggagaggttagaactgtctccctgtaggcactcagtggatattctcctaaggcgtttggtcgtattgcagagattctgcagccccactacccagtactgcaatacaaataaaaagacgcctagaacatttactgtaggcccagtgttgcattcattaactcattcaatgcctgccactcacaatatcagcaccaggaggtaggtgctgttacccccactttctgtagggaaccctgaggttctgagaggttaaataacttgtctgagtgaaaggaaagaaccaaaaccccagatcctattggaaaggggcaggctggtaagagagattaaactgttcagatcagaggctggaaactaacaaggcgctggacacgcattatccttttgttcctcacagttgtcctcagaccagcactgttaggcactttgccaaccttggaggggttaagagtgagcctctgcttctcaccctgcctgggatctggacataccc

SEQ ID NO: 7803 - DNA, 1103 bp, Artificial sequence
  DNA replication origin
cgagtgtgcctaggggccggtgctccccacctccgaggggtgctggagatggaaagccccccgtttgggctggtctcaagtcagcagctcgcccaaagtgcggtcggatgctgggtccggctggccgcggcgggccccgcgcagcagtcccgcggggactcactgcatcttcgctccgccggacgccggggactcgcgctcggcccgctcagtgtccgggctggcctggccgagacggcgctgggctccgagaacaggggacgggcatggccgggtccgggaaccgccgctacctcatttcttccctccgaggcggtgtccagctccgctcccgggctctccacggtctgctgcccgcctttgcagtgcgccctctccggtgctgcgagcggcgtccggctcgcctgcctcacatccttgccgtccgggaggaagatctcgggtaaatataggccggcgcgaaccattcgccgcgcggggacaggggaggagcagagaagaggatctgttttgggctccgactccgggcggattcctggtttcttaaagggaccgcgtgacagccattggtcgagggagcggggagaccggtccaatcctccaattacatcccaaatttaccagcatctcttttgtctatggaaatcactgggacctggggttaccccgcagcaaaaagatttgaatcctgacactccaccccccaggctgaattgccactcactgaatacatgtatgtctagatcgaaacttctgagggaggtggcagaagatgagattacagattataatttcctgtacaaaaagtttgggaaaatagtggtttcttccttgtgtgacggctttctgagaatgactgggtgctgtttaatattattttcagaattgtattccattaaagaaaagagagaggcacagaaaacaccaaggcttatctctcactatcttgagctcgtattcacaggtaagcagcagacagtgtaaagtgaggtgagtggtaacatgattggggtgactactgtagaataccgtcaatgaataaggcttttccccgtccgaaccccggcaagaccccctcctgctgtcaggcctcagggtagagc

SEQ ID NO: 7804 - DNA, 954 bp, Artificial sequence
  DNA replication origin
ggcgcagcgcgcgctcctcggcgtgcaccatgcggataccctgcgcactcaccgtcagcttcatcttggtgccctgacggcccgcctcgctcttgctccagatcttgcccacagcaaggtcggtgcagccgtcgccgcgcgcctggatggtggtggcattgcccaggtagagcacggtgtaagttgggtcctcgctagtgatgtgcagcttcttgcgcttggagcggaacatgctgcccacccggctaagcgcgccttcggggcacgcccgcgccagcgagctgagcgccgagtagtgcaggctcacagcgtagcccttgggcttggacgcctgccgcggcggcgcctcggccagcagctcgaacttgtgcttcttccacggcagcatctccggagggcgccccggcgcagctgggcggcggcggcggcggagcgccgggtgcgaggcccgctgagccaccggcccctgccaggctcggcccgggcaagatcgaagaataaaactactgggagcggccctgtggtagggagttggggggaggggagcagagagagtgcttaggaaccccgcaggaggtgcgggtaaattctctaaaaaagaaaatattcagcttcgagtgtgcaaaaaaggttggtgcgggggagacacgcgcgcacacagaattaccccagcctgggcaagggcgagagcaaagagtctcaggcaagcaacaaaatgcaagggagaaagaacgagcgtagagtggaaaatgtcaggaaaaaagctagaagcgcgcgtgcaaataaagagagccccagcaacagcacccgggatggtgcaagaatatgcaggaactcctcggcgaacgtgaggtgggtcccctaacacacacaaccctcaggactggggccaaaacccgcggaaactctacagcgagtgtgcctaggggccggtgctccccacctccgaggggt

SEQ ID NO: 7805 - DNA, 1129 bp, Artificial sequence
  DNA replication origin
ggaggaagaggaagaggagcaacccgagggctgcccggaggaggaggagaaccgtgcggcagagggagatccagcagaggaggaggccgaggcgcagcgtgcgctagtggtcgccatgcactttgagtgcggggacttgttggatactctggagaatggccgtggggaggcgctaggaggcggcgggggctccctgggcccgggggccgggccgccgcctctgctgctgggcagcgcctccgacatgaaggctgagctgtcgcaacttattagcgacctgggcgagctcagcttcggcaacgacgtgcgcaccctgcaggccgacttgcgggtgacgcgcctgctgtcaggcgacagcacgggcagcgagagctccatcgagggcgggggccctgacgccacctccgccaccgccggggactcgtcccgccaggccgacggcgccagtgcagacgagccccactcgggctgagctcctccgcgcgtcgccggcgctccaccgtggctacccatccgtggtcccgacaacctccctgtcccttgcccgcccccaggaagggggaaatggggcatttggggcccagacctacacttggagcccaggtccagcgttcccccgaccgctttcccctacctcccggcccccgctcccgccccagcacttttggctctgttgcgcgtggggatgcggggagatttgagaggggaaaaccccgccaggagggagagagaggcacccctctgggatgcgggtgagggaaggttggctgaagttcctagtctcaggccgtaggtgcctggccagtttcctgtttgtggggcagctggggcctgaggaggaggggttcacttcctcctcccaccccctgggagcggccctgcgctgtcactgacatctcattaaaaaaaaaaaaaaatttgctctcaaggtgtttgaggctttaatgcaaccctttagcccttggttctttttggtgcaagaattctggctgtttacctcagactcagacccctgaaatgttgccaaattcttcaaataactgtttggggggtggggggagatgaaagagagtcgcgttttgtttacagttaaagacatccaatatcttaaaaaggagttttcctttag

SEQ ID NO: 7806 - DNA, 1876 bp, Artificial sequence
  DNA replication origin
cccagtgaggtggcattgctttgctgtgtgggcataactgaatcccttccctctctgagctgacatcctctcaagtgattcctaaacagatgaaatcatggatacaaagggacttgttaagctctgtaaaaacataaggtcctgttgggactttgtgtacttccctctcaattttgctgtcaacctatagctgcttctaaaaagataaagtctattaaaataacaaatttttaaaaagtaaggccctacggcaaaccctgggaaaaggggctctaggttcttataaaagcttcacttatttctatgcagccttgcaaagtatgggaatttctctgagcctcagtttccctgttctactaataaaataatgggtttgtaaatactgggttaattgtagagtactgctcctttgtgaagtcttgttattatctgctacctactaaaagagactgttctgaaggtcagccagcaagttccaagttggtggaaattttgaagctcttaaagaacactggaaagccctagagaaggtataagtaaatgtttcacaggcaccttaaattcagcatgttcaaaactgagcagcaggaggaggaagacaagaaggaggagaaaacagaggaggaagagaagaagaagacaggaggaggagaagacagagcaggaggagaaggaaagtgagcagaaaaagcagaaccagaagcaaaggccacagaagagaggaagatgaaggaagaggaagaggaggaagaaaaaaagaaggaaggcgtagcaacagcagcagccgctgaggcagaggcagaaaagaagaagtgggcatggaagcagcagaagcagcaggaaaggcagaaggagaagtggcagaaacatgcaaagcagaagtagatgctcagaaagcagaagctgcacacacagacacacacagatgcagaggaagagcgagaaactgagaaaggaagaggaagagaagtagatgttgtaaccctggaaggagaaacaagaacagcaagagaagaagcagaaggagcaaaaatagaagcaggagctgaagaagaagagcggggggagaaaaggaaggggagaaagaagaggagggaagagaaaggcagggtggggagggaagagggagacatagtcacagtggaggaaggagaagctgcggcagaaggagaagcagcaaaagcaaaagtcagagcagagaaatggaaacaagccaaagtagcagcagcagaacgaagagaagcagcagaaaaggcaggaggaggaggaggaaaagcgcaagaggaggaggaaaaggaagaaaaagcagaaggagaagtagatgaatatgttgcagaagaagcaccagcaggaaaagcagaggcagaagcagcaagcacaggaggaaagagaagcagaagagagaagcaacagctaagaagaagcaccagcagagacagcagtagaagaagcatgggaagcagaagaagggggaagagagggcggaagagtggggaagagagggcggaagagcaagactgggttggggaagtcgtagtagagggaggatgagaagcagaaacagaaaaagcagctgagaaaaaagcagaagcagaaaaggcagaagccaaagcacaaggcagaagaaagcagaagctgaagccaacgcaaagcagcagacacaagaggagagagagcagaacagcagacctgaccactgcagcagaacagcagacccgaccactgcagcagaacacagaacagcagacctgaccactgcagcaggacacagaacagcagatccgaccactgcagcagaacagcagacccaaccactgcagcaggacagcagacccaaccactgcagcaggacagcagaccaaaccactgcagcaga

SEQ ID NO: 7807 - DNA, 1006 bp, Artificial sequence
  DNA replication origin
tctctggtgtgactgaaggtaggatgacctcggattagccaacattggctcagaatttcttcctggtgtcctgcacatctggccacacccaccttcccttgtagtcaaaccagtcaccattcattcattcatttgacaagcatttccccagcatgccctctgggccaggccttctcagagataaatcacatcttccctgtcctggggaggtcatggtgccaggacagaactctggggcatggtgggcacagggtagcgggagaaggtaaaaaggctccaggaaggaagtcatccctttggggatctgagggctgagcaggaaacagaaatgctgtccagacaggagcagcttaggcaggagagcagggagcaagtaggagctgaaagcgggtcagagtgggagtgggtaggaggcagggacccggggctggaccagagcagggcagagcgggaggtacggggctgcctgaagggcatggggagccactggggggttccagcagtggagaatgtgatcattggtcggtgttggagctgtccctgtggtagctgtggggagaatggagagaaacaaggctgcagagaagaaggccagatgcaggtcttacaatagctcaggtgagacaggatggggctgaggcaggtggagtgagagaggatgaaaaagaaggagccagttctagaagtctttagaagtaactaaaaggtaggatgaaaacaagcgacagggcttagaccagttggatacgtagggcaggagaaaagaagagtccagggtaccagggttgggcctgagtgactgtgaacagatgaacgccatccacagagtgagggcacacggggcagaagcaggtgcaggcaagggcaagcttgctttgcgtctgtcatagtgggggcagggcacgtggctatctaagcagcactgataagcaggaagtcaggtatacagttgtggggctcaggaagaaatcaggcttgcatcaaaccttttggaaggtggtaagga

SEQ ID NO: 7808 - DNA, 1818 bp, Artificial sequence
  DNA replication origin
ctagctggacagaacgaggacctccaagcacacctgcaggcaaaggaatgggctgagtctcagccccccggacttacgagccaggcggccccacctgtctaaacttgcgtttcctcttctgtacacaggagacagttaaacctaccttccagtttgcgtgaggacttgtgtctaacacgggctctgatctgtacccacaggtagggctttccctcctgacaaaatcttattttgataaatcaggactttaaaaatgaccaagtggttaagcaagtgcattccgtctgtgcagatgcatcaagctgttcgcttacctacacaattctgtatgtagagcagacgatgatccaatgccaaaacatcaaatatatattcttaggcatcaaaagtattatcaataaaagttaaggtgctaaaaaagaatggctgagcaaaatctagaatttgagtcctagagaaagttcctgagacaggtctctttcaatcctgagtttcctgacagcaggggctgggagcatatcaaaacagtccttgctagaattttcctcctaaagctaagtgtttaaccggtgcattttagcaacagcagagctggaaaaatatatctgggtagaagtagcagacagacagcggtcagcgagccaggaggtcgcaggccacaggccttgggcagtcacacctgcagagtaaacactgagtcagactgggttaattatgcagagattgattctggcttgaaagaggaagggagagccgcctcactgcatactcggaggtgggccttggctaggtggatctaacaattgattattttatttcagatccagggagtgttgtgatattgaccttcaaggttcagagaagagtgtttaggacacacagtgaaatagacagctgcagtccaagccacagtggaatttctagtgtcctctgcccttctggggcaggctagggcggggtggagcagggagacggcttcaggcctttctaatttaaaaggacaaggaccaggggctggatgcctttccgtttcacacccgcggcttcccacttcaggagtgttcctgtgcttcccaccttggcctgtcttcagacgggcacctggacgtggggcttggagatccaactagtccccaagttcacccaagacagtttgttcccaggagctcatttaacactaggctgtttgcaagtcaaagtgcgtcccgtgcaaacaacatcccaagagcactgagcgtggccagctgacccacgaagtctatgacccatccctgtaccttgaagtcctgaaagctctggacctaccaccatgttgccacgagcacacactctagatctgaactgctcattcggtggacgctgggaagtggggaccctgtgtccaccagtgttccttcagcacacagccactgagtgcctgctcggggccaggtccttatttagggaaaccagagagatgcctcgtatacctcaaaggtctcagtttagggcagaattcaggacaggttccaaatacctacacctgagaccaaaaatggtcctattaggagaggtagataatgcctggagaggggatttcaaggtggggaggccacatccaagtggggtggaagcagggaactgaagagaaacttgggaggatgggctggactttgaaaggcagggaggggagggcgtcccaggccgaggataggtgtgagcaatttccctttccccaggctttggaaggggaaccggggaggaagggcaggcatgagccacggcaaggtaggaacacctaagggaggcagcaggcgaagccccccagctcctgcccag

SEQ ID NO: 7809 - DNA, 1075 bp, Artificial sequence
  DNA replication origin
aggaggaggtcgagcaaacacgtggcctcagctgggacgcagcactgtctgcagagcccctcgaatccagctccacatctggttctcgggggcgcagggctgcccgtgcaggattatcgaccctgttttcagggaacaggaaactgaggccaagcgaggggtcctgagccgcccaaggtcagagaggtggtgagggggagagatgcaacaggggggtccccagagtaagggcgggcagggcggatgcctgtgctgagatgtggcgccgaggccttacgagcacccactgaaggtctgttcagtcaccccaagaatgtctggagcccgagtatcatctggcagccaccctggagaaggaaccaagaacgcggggggagtcggaaaggggggcccaccgaggggagaaaggggtcggcgccgctgttcgggctggttgctttctgggctcctgagcccggtgctgtcccaccctccgggaaagtctaaagcaagaggtgccaccgccctccgtgtcctgcaggctgaggagcagtgacgctattcagcaagatgagaaacacgggcaggaggtaagaactgagatctccttcctgtcggcatctgacgggaggaggcatgtgaatcccaggagaaaacaaaacctagaaagcggctgagccaggagacccctgggcggtgggcttagcaaggggcaggggttacccacagtcctccctagcacctcgtccccatcctctgccttcacacctgggactctcttccatgctgggggaaaccttcagatgaattgattctcgctgaggttgtgcagaccccagtgcacagcccccaaccacaaccccttccctcctggcagagctcgctctggagcagctggaggtccagcttgatgttttcccaggacagtcagaaatcagacccagccagcccacccccctgcaggtccactctttgaataccagatggcgggggcaggggaagtctccttaaagcaaaaaggaataaaatttggagacacagtttgcggggaaccagaggcccactcggctgtggcagccactgcttgttagtcctg

SEQ ID NO: 7810 - DNA, 757 bp, Artificial sequence
  DNA replication origin
cgcggccggatgatggggagaggagagaggtgcttagggcctgtttcacagaaagagagtttgagagatggtgacgcttgtggccggggttatgaataggatcctcactctttttcaaggcacacagatacagacggaccttcttaatttcactttgccgggctccatgttgttggatgccacaagaggctgatgcgggtccccggggcctggcgtgtcagcgggttgcacctctagctggacaggcaccaccgtgctcccaccgcctcttgcatcccactgtgcctctggtttccgcacccctgggaggcaggagctctggcatcttcgtgctccctgcacctgactccactgactccactgccaggcacagggtgggccctcattaactctctgctacttgcctggggataactgaaaaccatccccttcctcagtacaggagagaaatggaagcggcggattcaggaaacaggagggcagagtgagtggagacaggcccagggctgcccagcccccagaatcccagagggggccacaggagggagggatgggagagtgccaggcacttgggaggacttggcgtcagggcagactgaggggtggaggctcagaaatgaacactcctggcaggaaaggcccctctgtgcccccactgaattaatatcctgtgctcacatctgtcctcttctctagcttaatagattcctgggacatgacggtctctgcggcaattgtttcaccataaaattccctt

SEQ ID NO: 7811 - DNA, 1134 bp, Artificial sequence
  DNA replication origin
aaaaggggaggggtcccggcacggcgcgtgcaaaaggggaggggtcccggcacagtttgggtgagacaggacagggccttctcaggctggggctcctggcggtcatcacaggcttttagacctgccaggggactgaagcctttggttggaatctcttggtaccaaaagacaagaaagtgggaattataccaagtgcagcgagcgcctccggactcaggtctgcgtgaacaagccgtcgtgggaagagctaactttgagtctgtcttctcagcccgtgacccgtggggatgaaggaacgaatgggccaggctctgcgcttgtgcccagaccctcctgtggctctgctggggcacctgccctgctcctcaccgctttcttccttccacctctgctcctctgtgagaactgagctcaagggagaggaagcctccctgccccctcagctggagctgggtgtccctcctgtcacctgtgacaccctgagcctccctctgcaagttggtggagaatatttcttgtccagggcttgtaagaaagagcgttatcctgagcaacgagctgcatgtcctgaggtgggtgaaggaggcgggggcggagggcggacgctggggcctctgtctaggagcagcctgtgttttctggcatggcctgcggaaggaagcagaagtccagggcccttttgacaggaggccgcgcggccggatgatggggagaggagagaggtgcttagggcctgtttcacagaaagagagtttgagagatggtgacgcttgtggccggggttatgaataggatcctcactctttttcaaggcacacagatacagacggaccttcttaatttcactttgccgggctccatgttgttggatgccacaagaggctgatgcgggtccccggggcctggcgtgtcagcgggttgcacctctagctggacaggcaccaccgtgctcccaccgcctcttgcatcccactgtgcctctggtttccgcacccctgggaggcaggagctctggcatcttcgtgctccctgcacctgactccactgactccactgccaggcacagggtgggccctcattaactctctgctacttgcctggggataactgaaaaccatccccttcctcagtaca

SEQ ID NO: 7812 - DNA, 871 bp, Artificial sequence
  DNA replication origin
tgagaaagcacggctgtgtggcctttagttaggagcatacttggcctctctgagcctctctgtggcacatgctagggtcccaactctacacagggagctaccagggaactaccagggaggctatgacctgagccctagagaggaaatacgtgctgtgttccatccaggctctgggtggactctgcccctaggattattatccttgccctgccacagacttgctgtgtgacccagacaagttagtcccatctctagccctcacttgcctcctttgtagcagaaaggggttgtgccagaatctatacttcaaggcctaggtggagacaaagttttaaaagcaaagcgagcatcctcacgttctagggagtcgtcccgcatggaaaaggggaggggtcccggcacggcgcgtgcaaaaggggaggggtcccggcacagtttgggtgagacaggacagggccttctcaggctggggctcctggcggtcatcacaggcttttagacctgccaggggactgaagcctttggttggaatctcttggtaccaaaagacaagaaagtgggaattataccaagtgcagcgagcgcctccggactcaggtctgcgtgaacaagccgtcgtgggaagagctaactttgagtctgtcttctcagcccgtgacccgtggggatgaaggaacgaatgggccaggctctgcgcttgtgcccagaccctcctgtggctctgctggggcacctgccctgctcctcaccgctttcttccttccacctctgctcctctgtgagaactgagctcaagggagaggaagcctccctgccccctcagctggagctgggtgtccctcctgtcacctgtgacaccctgagcctccct

SEQ ID NO: 7813 - DNA, 2146 bp, Artificial sequence
  DNA replication origin
gaaagcagggtctggagctgctattattagatcgcttttatttggagaactggggcatccacagggaagttgaagacccagagccgactcagcctagattatgtgttcttaggggtgacatcggccatggacagccgggagctgtaagacggccaggctgacactcacctggaactggggagaagggatgtggttaaaaatgtacagcatttattatcttataataaaggtaattaatactcgatgtggaaaatacagaaatatagatgaaaacaaaaagcaccttaatcctagcacccagacatgttatcttttcagatttctgttttcctcatatgtacaggcgtattctcgagagtgggtttccatgaagcaagttaagcacagcacaaggaactatgcttgcatgacagcaactgtaacaggacccaggtcaggagctggcactccacgacttgtcaagcacggcaatggcgaggcacagcaagccccggctgctctgtcagcgggctggggtgtgatctgtgggcgggctggggtgcctgtgcggtgatctgtgggcgggctggggtgtgatctgtcggcgggctggggtgcctgtgcggtgatctgtcgggctggggagtgatctgtcggggggatggggtttgaactgtcagcaggctcgggtgcctgtgcagtgatctgtcagcgggttggggtgtgacctgtgggcgggctggggtgcctgtgcggtgatctgtgggcgggctggggtgcctgtgcggtgacctgtgggcgggctggggtgcctgtgcggtgatctgtcggcgggccagggtgtgatctgttggcgggccggggtgtgatctgttggcgggccggggtgtgatctgtcggcgctctgtgatctgtcagcggcctggggtgtgatctctcagcgggctggggtgcctgtgcggtgatctgtttgcgggctggggtgtgagctgtcggcggtctggggtgtgatctgtcggcggtctggggtgtgatctgtcggcggtctggggtgtgatctgtcagcgggctggggtgcctgtgcagtgatctgtcggggggctgaggtgtgatctgtgggcgggctggggtgactctgcagtgatctgtcggcaggctggggtgtgatctgtcgggctcgggtgtgatctgtcggcgggctggggtgcctgtgcagtgatctgtcggtgggctgaggtgtgatctgtgggcagtttggggtgcctgtgcagtgatctgttggtgggccggggtgtgatctgttggcggtctgtggtgtgacctgtcagcggtctggggtgtgatctgtcagcgggctggggtgcctgtgcagtgatctgttggtgggctgggtgtgatctgttgacgggctggggtgtgatctgtcagtgggctggggtgtgatctgtgggcgggctggggtgcctgtgcagtgatctgtcggcgggccggggtgtgatctgtgggcgggctggggtgcctgtgcagtgatctgtccgcaggctggggtgtgatctgtcggcgggctggggtgtgatctgtgggcaggctggggtgcctgtgcggtgatctgtcggggggctggggtgtgatctgtgggcgggctggggtgcctgtgcggtgatctgtgggcgggctggggtgcctgtgaagtcatctgtcggtgggccggggtgtgatctgtcggcaggctgtggagtgatctgtcggtgggctggctgcctgtgtggtgatccgtcggcgggctggggtgcctatgtggtgatctgtcagcaggctggggtgtgatctgtctatgggccagggtgtgatctgttggtgggctgcagtgtgatctgtcgggctggggtgtgatctgtccgcgggccggggtgggatctgttggtgggctgcggtgggacctgtcagcgggctggggtgtgatctgtcagcgggctggggtgtgatctgtgggtgggctggggtgcctgtgcagtgacagtctgctgtgcactggggggttggaaggtcgaggccactggtgacagaggggaagctcctgagaggtttacttaaaagtaaatgagggatgttgtttggcctttgcccattttgaccaaccagcttattgtttttttcttgcaacaac

SEQ ID NO: 7814 - DNA, 1345 bp, Artificial sequence
  DNA replication origin
tattagccattatcgttattctcattcctcaaagaagccaccctgccgttttccctgtatttcttcagtctgtctttctctcatgtatgcatccctttcccttggcgtacagaatactcagctctccctctttggaaaatatcctcccctctgtcctctgtttgcctctaggtgccatctggctccctggcgtctgttctctgctgttcatacgctccccagggccaagggtgtggcttccccgtctccatccctctccttctccaaggtcactgtcacctcttgcggcacttccaagtccttgccctctacagctttccacactgctgtattctcacatgcagtgatgtactgggggcagatgacactgggtaaggggccgggagatgcaaattgaggctgaccatctgggggcaggggtcagagcttccaagggtctgatgagcaggttctgtgcagggtgggtcaggacgttgccgccagagagggatctcagttcccatcactggagcagagtgcgtctggtcgcaaagttcatggagagccgagtgggtagcttaggtgtggtttgaggacactgtggtcaaggtgaagggaagggccatcagcatttggaattcttgagggtgtccctagggatggagcagagaggaaggggatcccaggcggcgagcaaggagctgccagccggatggtgcgatgggaggtggggaggacagctctggaagtgtggggggctgtgtgcagccctggggactggggagagtggcagcaggatgcatctctacttcgtggaggggtactgaggtactgtctgggtgtcattctgtccagatccaagtgtttgagtgagaggcagagaacgggcagtcgatattagtaggaggcttggagggcatcactggggagaaggcccagcttggatggggatgaggaagagggggaggtaggctggagggaacttggtgggacacatctcgtgcccagagggccagggcacgagaggctggaggaggcacagtgggcctgcagaactagctggaaggcccgtgtagctcagtggctctgcaggagctcccacagcagaaaaggcccccatggcctgactcgctacgggcctctcggctgtcagtgtgagggacaggtggccggggtcctccaacgccctgcatcttcctggctcctcttcttccacgccctaaatgtcagaactctccagaattccgtaccacctgcttggtgctctctgcttatggccggtacctccagccacctgctgggctcctccacattgctgttctctgggcacctgtttgggactcaacatggaattcccttttcctcc

SEQ ID NO: 7815 - DNA, 1208 bp, Artificial sequence
  DNA replication origin
cccttcaaaaagaagagaggtggccgggtgcggtggctcacgcctggaatcccagcacttttggaggccgaggcgggcggatcacctgaggtcgggagttcgagaccagcctgaccaagatggcgaaacctcgcctctactaaaaatacaaaaattagccgggcatggtggcgggcacctgtaatcccagctactcaggaggctgagggaggagaatcgcttgaacccaggaggtggagcttgcagtaagccaagatcatgccactgcacttcagcctgggcaacaagagcaaaactccgtctcaaaaaaaaaaaaaaaaggaagaaaggaggaggaagaagaagaaggaggaggaaggaggaggagggggaggaggagggggaagagggggagaggaggagggggaggaggagggggaggaggagggggaggaggaaggggaggaggagggggaggaggagggggaggaggaggaggaggaggagggggaggaggaaggggaggagagccacaagtgccaggggggcaaacctagcaagaacagtcagtattctccgcactgtgaccccgtcctccctgcgcttctggcggggatccagcccctcagtgttcggaatcctcatggcctcatgaggccaacttggtagagacaccacctcctttcttaaatgaggaaaatggagactcccacgtggaggcatcacccgcccaggcctccgcacagtggggcccttcttccagtcagctgctggccagtgctgaggagggtccctacacacaacacaacccattttatctggccaacacaactctgatgccattcggctctcatgcagttgaaccgtgtcagatgagaagtggctggaaacctccctctagctgtatgcatctcccaccactccccataggggggtctggcctttcatcttacagagagacctaggtgacctgcagaggcaaccctgggtcacctgagctgcaagtcccagttctgggcctggcctgcaatgttcatatattcttccatccattcttgtttttctttactaaacataactgcatgttacaaccagctaggcataaacattaattagaaacgcaaaccaccatactgataaaaacatgcagaaatcctatgaaccagcggcgtaactgggaactttctcaagagcctttgactcttatcaaactgctaactcttgtttta

SEQ ID NO: 7816 - DNA, 1289 bp, Artificial sequence
  DNA replication origin
acggtcggagggaggctgcgtgggaggcccgtcgctcctgcctggtcctccccggggccccagccacatcctttccagtccgcccggtccccgtcacacccggcgggcctccgcagccagtgtgggaaacgtgtctgttggagccgcgtggtgggggtggcccctcggtatcctggcgccggtggggaatttggcaaaagacccgaggccgccagaggccggctccgggggccgccctggtgctgggtctgtccctggcgctggcctggagcccggcgtccttaattgcgggagggactcggatgccaccttacaggcctgtcgcacgcgactgtcctcgcggtgagatgagggcttcccaggcctgtacctggggcgggaggcctctccctgggaggaggagcccggccgcctgcttgctggaagggccgcctggcagggcccgaaggcctccctgctgcccttcctcacagccttcccatccagggctcttatctttcgccctgggaccactcacaccgtcgtgtgggttgtggaagacaagtcaagatgaccagggccttacccgcaagccacagggaccttgacttcacggctctgactctgagaggccactctaactacttgcctgttctgagcagtggagctaggcctcatcagctgacagaaagcctgctgttaagttaatgtgttttaaattaaggccattggttttatttattagggcgatgactgttaagcagccccgattaagccatcctctgctggtgggactagtctcccagaggctggcccctgcggccctgctcaggcaggcctggggatagcacagctgtgctgccgggataacagatgaaatgagacagctcacagcctggcacatggcaggtgcttggtcaacggtggctgctaataatggtaccggaataggtgtgttgggaactgacaccctgctgttgtcactctagaaagcgcatacctgtttattcaccatgctgataccgttgattcagttggagggcagtgcagctagcttgcaaaacagctttctggccaggtttatttccggtgtccccgtgttcttgcaagtcttcaattctccaaactacggtgttttttccttctctgacactcctccctcccctacctcttggcaatatattgtttgcctctctctgaaagcacaggatgccttagccttatttgatgttcaggggcatccacactttctctttcctgctggaaggaagaggctcatcttcatcacgtcccttccccaggggccctag

SEQ ID NO: 7817 - DNA, 1142 bp, Artificial sequence
  DNA replication origin
ccaaaaaacagttaccttgactttcccctccttaccctgtaaggtgttacaacatcgctagaaatgggcatattccgaggacatggtttggacatttctgacgtgtacactgatgtgcctgaagtcagcaaggggatgtttaccagtatgaagtcttgatgaggagaataatagtagcaacatttgttcccctcccctcccctttttcttttcttttctttaatttcctttttcttttctttttaagatggagtcttgctgtgtcccccaggccagagtgcagtggtgtgttctcagcttactgcaacctccatgtcccatgtcccgggttcaagcgattctcctgcctcagctcccgagtagctgggattacacaggcgtgcgccaccgtgcccggctaattcttgtatttttagtagagacagggtttcaccatgttggccaggctgggctcgaactcctgacctcaggtgatccgcccgcctccgcctcccaaaatgctgggattacaggcgtgagccaccgcgcccggcctgttcaggcctttagaatgtataaaagtgcagacgcctcacttgagcgtggctgaggctggggaaagaggtgtggcatccctgaggctgagagcaggtggcttacggagctcccagagcagcaggaggcacttcaggaccccgctagcagctctgccaaggggctgtgggtgtggggatgagggcagggctgtagcccacctgacaatctgtcatccgcctgccgatgacacccccaataaatccattcaatatgaaccaaaactgcgctttctgggagtgcagcttccctctcatctgcttcagggagcgctgcaggttcgccaaacatcggaacaggaaggaagctctgggcgtagtgtcccccgtccagctgataccctgggccagaaaggggcagtgactaagtgccacagcgagctgcctttagaagcagccaggcacctcctctgctgtttgagggaggtgatagcagcagccccgtctttttcggaggggtcggttgagaggtagcccaccctaatacccacagcgaaggtggcagggcctgtcgtcttcacctatcctagggggcttcgcctccttgtctcctcctggatgtgcctcgcc

SEQ ID NO: 7818 - DNA, 862 bp, Artificial sequence
  DNA replication origin
ggtggtagtccaccggcccggcaccgccgccctccaagctcttggccttcgcgccgggggctggcgccacggagccccgcgctagctccagcgcgggcggcgagggcgcggcgggagccccggcgcgggcctccttcagcctcttggtggcgctggagaaggtctcccggcctgagccgaggtagtagaaggcgcagacggccagcgccgcggccagcagcagggcgcagtagtgggagcgcacagcgcccaggcgcgccatggcccgagcgcatgggagcccgcctcggaggaggcccatgcgctacgagaccgcggcgccagcggtgccagcaacgcgggagagccctcgggtacccggacgccggcggccacttagccccggcgccaggcggcggccatgaaaggggcggggccgcgccgcctggagccaatcgcgggcgccggtgcgcggaggggcggggccgggcgtgccgaaaccgctgggtcctaggttccaagggtattagaggaggggttagggtgggatccggcgcccggcgttgggagggggggattccggactccagcgtgctgagggctggcccgctgtcccggctgagaaatggcgccctacgcggcgagccccagaggatatccaagctgagtgttgaagggaatggaggcgcccgaacagaggaacttaggttagccaaaagcgaagctggaggcaccaagaggtaaaactttaatctctgcaccttttttccctcaatttcttggaggctttaagccgtctcggcctctccctgcacacgagctgcagctaggcaatttaaaccggcagctcctcccttttcccccgccctgggaggaaatggcc

SEQ ID NO: 7819 - DNA, 925 bp, Artificial sequence
  DNA replication origin
gccccaagtagagcgctggccgcagggaaacggccggggagtgacagcagcggccagccagccacgaacctggcggccaaggggcggggcatccggcagcaccgcctgcgggcgcccgggcaacgggtctgagcgacggcaacccgagccaatgagcagcgcgaccgtgggcacctccttgccacaaccgcccccgagggccaaccgggatgcgcgggcgtcgctaggcgggacgcaccggttgctgggaggccggcagctgaggttccttgggaaggaagtcacgtggctgcggccgcgcttccctccgagcccccgcctcttctcctgctccccgagccccgccctgctgagctgccagcccagaggagcagtctcctgcaggtctgaggaaggaaatttgcttttcaaagcagattggcagaaatctgaagaggttagaggcagaaattataaaaggaagagataggctaagccacctattcctttcagtttagagaaactgaggccagaagaggagcgaggataactttagtgataaaatccatctttcatgtatttgttccatagcttcataatctggaaattgctcccatgtacatcttctcatatagccagagaccacttcctgaaggagctgccgtttgggttggacatagaaagatttaggcaggtatgggaggtagggtgcttcgtgtggaggaactcctctcaaaactgccgaaagcattccccctcactgacactttgctcctggtggttttcactgttctgccatggtggggttctgaagaccaggctcatcgtactcaccttgcaacacctgcccctctaatccacactttttctagaagcactttaagatacttatcatctgatcctcacggcaggtatttaccatactccttcattttaagatgccatt

SEQ ID NO: 7820 - DNA, 852 bp, Artificial sequence
  DNA replication origin
aggcccctggctgaggcaaatccctggggaacacattccactctgtgaccagcaaccctgtttcccttctccccttccagctcacttcccctccattatctccatccacatccattcccatactgaggccctgttctgtgccaggaactcatctaggagctaggggctcggggccagacgataaaaacaatcgttttcagaaccctacagtcatccctgaggggcagagtcctaaggacacagaacagggtcatcctcaaaaggcacagagcctgtgttaaagaagatgagactgtggtccagagatgagccatgggagtgaaactgctgctataggggctagataggggaaaacgcttcctctcaccccccacagcagtggacagacattgctgggagcgaggtgtcagctcaatctaagaactcccagagtcagagctgtccaaaaacaaaatgagttacacgggggtgtggcgggcttctagcccctggggttgttggagaaacaggctgaatagccaccttatgggcctgcttgacaaggtcccttccaggaccagtggtctgtgaatccgcaggggctggtccaccggaggggccagttctgggtggctcagtctgctgtgctctaacctgtggtgaggacgataaaaaggcctgatcaagaaagagtcatggaaaagagcctggtgatgagcgagctgcggactggacttgggagagggagggaagggagtgtacagggaccataacaaataccacacacgaggtggctttaagcaatggaaatgggctctccgttctgcaggcttgaagtccacatcaacctgcggcagagttggttccctctgt

SEQ ID NO: 7821 - DNA, 758 bp, Artificial sequence
  DNA replication origin
ctgcccggccgccaccccgtctgggaagtgaggagcgtctctgcctggatgcccattgtctgggatgtgaggagcccctctgcccggctgcccagtctgggaagtgaggagcgcctcttcccggccgcccatcgtctgagatgtggggagcgcctctgccccgccgccccatctgggatgtgaggagcgcctctgcccggccacgaccccgtctgggaggtgaggagcgtctctgcccagccgccccatctgagaagtgaggagcccctccgcccggcagccgccccgtctgggaagtgaggagcgtctccgcccggcagccgccccgtccgggagggaggtggggggcgcctccgcccggctgccctgtctgggaagtgaggagcccctctgccaggccgccaccccgtctgggaggtgtacctaacagctcactgagaacaggccatgatgatgatggcggttttgtggaatagaaaagggggaaatgtggtgaaaagatagagaaatcagactgttgctgtgtctgtgtagaaagaggtagacataggagactccattttgttctgtactaagaaagattcttctgccttgggatgctgttgatctatgaccttgcccccaaccctgtgctctctgaaacatgtgctgtgtccactcagggttaaatggattaaggtcggtgcaagatgtgctttgttaaacagatgcttgaaggcagcatgctcgttaagagtcatcaccactccctaatctca

SEQ ID NO: 7822 - DNA, 1057 bp, Artificial sequence
  DNA replication origin
cgaccttaatccatttaaccctgagtggacacagcacatgtttcagagagcacagggttgggggcaaggtcatagatcaacagcatcccaaggcagaagaatctttcttagtacagaacaaaatggagtctcctatgtctacctctttctacacagacacagcaacagtctgatttctctatcttttcaccacatttcccccttttctattccacaaaaccgccatcatcatcatggcctgttctcagtgagctgttaggtacacctcccagacggggtggcggcctggcagaggggctcctcacttcccagacagggcagccgggcggaggcgccccccacctccctcccggacggggcggctgccgggcggagacgctcctcacttcccagacggggcggctgccgggcggaggggctcctcacttctcagatggggcggctgggcagagacgctcctcacctcccagacggggtcgtggccgggcagaggcgctcctcacatcccagatggggcggcggggcagaggcgctccccacatctcagacgatgggcggccgggaagaggcgctcctcacttcccagactgggcagccgggcagaggggctcctcacatcccagacaatgggcatccaggcagagacgctcctcacttcccagacggggtggcggccgggcagaggctgcagtctcggcactttaggaggccaaggcaggcggctgggaggtggaggttgtagcgagccgagatcacgccactgcacttcagcctgggcaacattgagcactgactgagcgagactccatctgcaatcccggcacctcgggaggccgaggctggcagatcactcgtggttaggagctggagtccagcccggctaacacagcgaaaccccgtctccaccaaaaaaatacgaaaaccactcaggcgtggcggcgcgcgcctgcaatcgcagtcactcggcaagctgaggcgggagaatcaggcagggaggttgcagtgagccgagatggcagcagtacagtccagcttcggcttggcattagagggagac

SEQ ID NO: 7823 - DNA, 1139 bp, Artificial sequence
  DNA replication origin
tatgagacaacctgttcacaactgtttaatgaggaggttatccaacattaggaatgatttgatccttcaataaaaaatcaatgtgtgaaggttcctaggcatgaaagaaagttcagaaggatatgtacgaaatattgttgtctctctggggattgggattacagggattttttcctcttttctttttgttaagtttgtgtttcctaaagtttctgcaataaacgtacgatgcttgtataataaaaattataggttttccttaattgcatagtcagggcttgcctccctgcgcctcctaccccaactccccaacatacagtagttctgagggatttcaccccctgctccgggagagagcgggcttagcctggattctgggagaagctcttgcttggtcccagacccaagtaaaacagcagttcctgttgtgtttggggtgtggccactgccctgccctatacagaaaataggatgcgttgcgttattcctttgtttctctgacaagcttgccaacttattcctgttccgggagaaccgggggctgtcagcactgaaagggggctcagaaatcccatctcattttcagatgggggtgctgaggcctggcctggggaaggtgcttggagggtgttgaggcctggcctggggaaggtgcttgggggtgttgaggcctggcctggggaaggtgcttggagggtgttgaggcctggcctggggaaggtgctggggggtgttgaggcctggcctggggaaggtgcttggagggtgttgaggcctggcctggggaaggtgcttgggggtgttgaggcctggcctggggaaggtgcttggagggtgttgaggcctggcctggcctggggaaggtgcttgggggcgttgaggcctggcctggactggggaaggtgcttgggggcgttgaggcctggcctggcctggggaaggtgcttgggggtgttgaggcctggcctggcctggggaaggtgctggggggtgttgaggcctggcctggcctggggaaggtgcttgcacagggtgacatcatttcagggagtagttgcctctgtccctggccagtctccagtctccagcttcatatcctcccactggagagcagagacgatgggggtgtccctgtgtat

SEQ ID NO: 7824 - DNA, 844 bp, Artificial sequence
  DNA replication origin
cggggtggggtgcggaggagaggaggagagaccccggcccttctcacctcacagaccgctcgggctaacttggccccacccccaccatccaccctccaaccccacccccacccgcccccagggctgagcagagacctctgggacatggtcacgcacacacagaacctgtcccagaaggcaggaccccgtccctgccccagcttctggctggcagggctgtgtcaatgacttctggccaagcaaccccaggaaatggcattccgtggggtcaggtggctcctcagtgccttttcctggcttttcatgtaaaatcatggcaggcagcatcgggaagtgtcccacacctctacaagctcagggggtggccacctttacccacagagccaaaacgtgggcgcaggctcccctctgcagtggatgcgctgagggcacacccaggccccggccccctcagcggcatcagagcagcacacagggcccggtgagggtggcctccacccctccaccacaccaggcatggctcggagccaggccggagggagggcgtcagctctgcaatgcatccagtagtttccacccttggctgtgaagagcggcgtttcctgacagaagtttctagcacatgtatgctggcgaggatgcggtcgtctacttgctgggcacacactgtgccaggctgagtggaggcccccaaagatgtgcagccccgcaaacctgtgagtgccgcctcagatggcaacatgatgacaggtctggagcggggagagtctcccgggtcacccacctgcaccctgtgctgggccaggtagtgccccccaccccaccaagattcacatcccttctc

SEQ ID NO: 7825 - DNA, 1316 bp, Artificial sequence
  DNA replication origin
tcaggaaacgccgctcttcacagccaagggtggaaactactggatgcattgcagagctgacgccctccctccggcctggctccgagccatgcctggtgtggtggaggggtggaggccaccctcaccgggccctgtgtgctgctctgatgccgctgagggggccggggcctgggtgtgccctcagcgcatccactgcagaggggagcctgcgcccacgttttggctctgtgggtaaaggtggccaccccctgagcttgtagaggtgtgggacacttcccgatgctgcctgccatgattttacatgaaaagccaggaaaaggcactgaggagccacctgaccccacggaatgccatttcctggggttgcttggccagaagtcattgacacagccctgccagccagaagctggggcagggacggggtcctgccttctgggacaggttctgtgtgtgcgtgaccatgtcccagaggtctctgctcagccctgggggcgggtgggggtggggttggagggtggatggtgggggtggggccaagttagcccgagcggtctgtgaggtgagaagggccggggtctctcctcctctcctccgcaccccaccccgccttgctctgaatctctccctctctctgtctctgttggtctctttccctctctactccccattctggtgtctttggagccctgggtaaggtgtgtgctgagtccggtctggtttggggtagatgttctttgatctgttaccacacctggagggaaagcccctggcccgccccccctccgttcctgcagagccaggccccccaaccagtcggtgggcaggatgcccaccagttgcccccatctggcccagggggacctttcctctgctctccagggaccactgcaggtggtgtggcccctgaggggagcataagggtgcagtgcctgactcaggggacacagaagccccgtccatacggccttttacacagcacagcacccagccctcggcagcccagagcaggaaccaacagggtaggtgcccaggggccccaaaggtcagagttcctcgcacagctgccagggagcacagggaccgcagcacagggtcttctgctcagcaccgggaccccgctcgctgcagctaaagaaacagatacgtccaagggctccacggccggggccgggcacctggaacagggtggtcctggggcggccacatccactccttccaggtgagttcccggtgactctcggcctgcagtcggccttgctgaattctcttaggccacctggctgccccctgctacgcgtccagctgttgatcgccca

SEQ ID NO: 7826 - DNA, 1120 bp, Artificial sequence
  DNA replication origin
ggaacagggtggtcctggggcggccacatccactccttccaggtgagttcccggtgactctcggcctgcagtcggccttgctgaattctcttaggccacctggctgccccctgctacgcgtccagctgttgatcgcccactgacctgtagaagacctggtcagcccctctgtcttccgtcacccatggaggcgcctgcaggtgctccgcgcagcccgcccggccctgcacagacccgaggcggcaccagggggcgctgccggcccgaggacgcgggcgcggggcggaggctgcggggcaggagccgctgtgcgcgttcaggcagctgcccgggacccctggcaccgaccgcagcccccagaggcccccggggggtttccgcctgagcctaaaccgaagacagggcatgttttcagtcatcccgaccccacagactcagcccgttagttcccgcgctgcccggcgccctagtacccagagccggtggggactccaggccaccaaaggcaggggcggggcgggcggttgaaggaagattgggacacggagaagagggacaaggcctggggcccgaggggtcaggacgctctgccagcctcaccacccgcaacacccaggcacggacgcacgcacacactccacacgtgtgaacacgcacgcatggctgcacacacgtgcacagagaggcacagcccgcaggaacacagatgcacgcacacaggcacaggcacgctccctcactcactctctctcacacaccccaggtgcagacacccccacccagaggttgcagctcggatggagaaacaggctgggtcacaaaagccccgggaggcagcccctgctgtctggcgtcttctctggggaaagctttccggagcctgatggaggaagacagaggaaagagacctgtgttccctgatgcactggccagccgcttcccggggaggaggaggcagaaatacacagtaactgattgttgcctttggtctgtgaactgtactatggaacactggaacttactccttcacctgactgcatgtttgtgccccataaccagcctcactttctgtctgcctctcacccacacaccctgcctagcctctgggaaccaccagcca

SEQ ID NO: 7827 - DNA, 986 bp, Artificial sequence
  DNA replication origin
actgacccaggggcaggaggtgggccatcctctcggtggactgaagaccttgtccgaagggaaagcagggccggcccaaggcctggctggaagagtgggtcttggtggcaaaggcggcccgtgggggcagcccacgcgaatgcttccccggcgccctgagcccctgaccgcggctgagcctgcggtactctggcccctctcgtggaaagatgacctgggtctaccatgctcagtatcacccaaaaattcctacagaagtctctcgggacaagaaaaggccttcttccctccctcctcctttcctcttcctttctttcatcagggaacagcttccggctgcctgcactgtttgggcgccgtcataaggagccgtgacggccttcacagagctccggggctcacgggtgtggctgacctgccacaaatggggcgacagaggagagggagggtcgggcaccgatggctcaggagggaagagatcccttctgtatggggagacgggggcttcctggagggcactggagcgaggggctcaccagagtgagacatccaagggatctgggggaccggccatgggacactgcggtcccacgtggctcctggatgtgctgtgtgtttgctgagctggaggggacggggagcccatgtgtgggagagggagaggccatgcacgccctgagtcgggctttacaaaaaccttctgggggcagcaggagaggagccacgcagaggcagagccagggagaggcggtggggtagtgagggggatgtcggggtgcacgggttaggagacccccgagtcctgggacctgcatgctgatagtcaaggttgcagaggcggctgctgtggtgaccacagggcagggagaggcagtggggtagtgagggaatgtcggggtgcacagcaccagaccctcccagatcttctgattcagtcctggggggaccctaccccagatcttccaattcagtcctggttcggcctg

SEQ ID NO: 7828 - DNA, 926 bp, Artificial sequence
  DNA replication origin
ctgacgcgtgtaatcccagcactttgggaggccgaggccggtggatcacctgaagtcaggagttcgagaccaacctggccaatatggagaaacccagtatctactaaaaatacaaaattagccgggcgtggtggcgcacgcctgtaatcccagctactcgggacgctgaggcaggagaattgcttgaacccgggaggcggaggttgcagtgagccgagatcaggccattgcactccaggcctgggcaacaagagcaaaactccgtctcaaaaaaaaaaaaaaaaaaaaaaaaggcaaagcacaattcgcgtgggaagggcagtgtgcagcgttctccgttgtctgttccgcccccaaaagcttccctcctttaggtttaacctgcgcccccgcgctctgcatcagcgcggtccccgaccggtgcagctggaaacactgggcgcctccctgccgggccccttcccgcccctgtggtggtgcagccctgcctcccgcaagacagcactgccttcgtgctggacacagttctatggtggagcctggagtgcctgtatcacaaatcccggagttgggaagtgcccacctttgggccagtgtgatccctgggtctttcccggggtggtctcatgcggccttccactccagtcctgtgtcctgtgccccggttcagaatactacaattattctcgttatttcatggggttattccagcttttcagtttcgtcagtgcctcattccatgaatgctaacttttttcatcctcatagttcctagggttgtctctgaattttcacccagttgcctaccaagatgttgtctgtgtctaatgcaggggatggtgcaggtctgaatatcttactcacagctcacctttttggtgcctttgatccgtgttaggaattatccacatcttctctctgggcag

SEQ ID NO: 7829 - DNA, 1101 bp, Artificial sequence
  DNA replication origin
ggtagggttcgggggcgcccgcgggggtccgggcaggggcgggggagacggcggaggtcggggcaggggacgggggaggccgctggggacccggcaggtgacgggggaggccgcggggcaaccggcagggaacggggttggccgcgggggtcgggacacgggtccggggcagctgcgggggaggcgggaggtgccggggcggtgccaggtggcagctctggaagacgttccacaggaagctctggtcgggcagcgccgcgcccgcagcaggcccagggccgcccaaggccggggcggtaggagtaggcggccaagggccaaggcgcgcggctgggctgaggcacctgcggccacgggcgacctcagagcgactgtgcttccgcctctgccgggggcagggccaggcgttaccgccgcttccgggggcgcaggaaatgcgcgttgtccgggatcctccggcgcaggccacctgcgcgcggggccgggaaggcgcttggaggaaatgtcccgcgccgcgacccgggacaggcagtgatggagcagggatttcgtttgccttttagttcttgtataaaaagaagttttgacgtgaatatgattcacgctaacagtcggaaactctgggcggggcgcggtagctcacacctgggatccctgcgctttgtgaggcggaggcgggcggagctcttgagcccagcagtgcggaccagcctgggcagcggggctagaccccatccctacaaaaattacagcaagtagtcgggcgtggtgggctcctgtggtcccatgtactccgtgggctgaggcgggaggatcgcctgagcccgggaggtcgaggccgcagggagccgagatcactgcagctccagcccggtggacagcgagactctgcaaaaaaaaaaaaaaaaaaagcaagcaggccgggtgcggtggctgacgcgtgtaatcccagcactttgggaggccgaggccggtggatcacctgaagtcaggagttcgagaccaacctggccaatatggagaaacccagtatctactaaaaatacaaaattagccgggcgtggtggcgcacgcctgtaatcccagctactcgggacgctg

SEQ ID NO: 7830 - DNA, 984 bp, Artificial sequence
  DNA replication origin
ccgaccagagcttcctgtggaacgtcttccagagctgccacctggcaccgccccggcacctcccgcctcccccgcagctgccccggacccgtgtcccgacccccgcggccaaccccgttccctgccggttgccccgcggcctcccccgtcacctgccgggtccccagcggcctcccccgtcccctgccccgacctccgccgtctcccccgcccctgcccggacccccgcgggcgcccccgaaccctaccccgaccgacgcggccgcccccatcccctgccccgacccccgcggccgcccccatccccttccgggtcccccgcggtctcccccgtccgctgcccggtctcctggggccgcccctgcctcctgcccggtccctgtcctgtgcgtcgggcgcttcccaaggtgcagagggcgccactgcagacccgaggtcgcggccaccggctcctgggccaggccccgtttctcgcctcgagccgtcgggggagggtctccagggtgcttgtttggggaaagcggaaacagactgtctgggccgctgttaaaatgtcagcagccaaggaagaagcagcgacctggcgtctgctcgggccaggtgacctttatggcggcgccttctgtccctggtcgcttttccactgaatgaatgaccgaaactgtagtaactcatggccagggaatggcttagttatctgagggaatcttgtcttgtctgtgaaaaagggaaactggtgcaaatgggaattcagacaggtcaggaggggaaggaagggaaggattgaggtgggaaaagagagagaaagatgattgtcctcttaggggaagaacacacttggacgtggctcctggggcacttccttgattccgctgtactcctcagcgggaccggagaggcggaggttccaggagggagccttccagagtcggtgcagggttgacaggagacgtttgttttgcttttcctgaactttcgatcgcc

SEQ ID NO: 7831 - DNA, 1022 bp, Artificial sequence
  DNA replication origin
gtgggagaggtgttttagctcggggaagagctgatgttctaccttgagggtcgtgcagctgcagacccggggaggagctgatgttctagattgagggtcgtgcagctgcagacccggggaggagctgatgttctagattgagggtcgtgcagctgcagacccggggaggagctgatgttctagattgagggtcgtgcagctgcagacccggggaggagctgatgttctagattgagggtcgtgcagctgcagacccggggaggagctgatgttctagattgagggtcgtgcagctgcagacccggggaggagctgatgttctagattgagggtcgtgcagctgcagacccggggaggagctgatgttctagattgagggtcgtgcagctgcagacccggggaggagctgatgttctagattgagggtcgtgcagctgcagacccggggaggagctgatgttctagattgagggtcgtgcagctgcagacccggggaggagctgatgttctagatagagggtcatgcagctgaagactcggggaggagctgatgttgtagtttgagggtcatgcagttgaggactttgggaggagctgatgttgttcgtgttgagggtctttcagctggggactcagggaggagctgataatcttgattaagggtcatggagctggagacccagacaggagctgatgttctagttagtggatcttccagctacagagtcagagaggagctgatgttctagattgagggtcatgcagctgaatactcggggaggagctgatgttgtagtttgagggtcatgcagttgaggacttcgggaggagctgatgttgttcacgttgagggtctttcagctggggactcagagaggagctgataatcttgattgagggtcatggagctggaaacctagacaggagttgatgttctagttagtggatcttccagctgcagacccagggaggagctgatgttctagtttgagggtcgtgcagctgaagacccggggaggagc

SEQ ID NO: 7832 - DNA, 1552 bp, Artificial sequence
  DNA replication origin
cacgttgagggtctttcagctggggactcagagaggagctgataatcttgattgagggtcatggagctggaaacctagacaggagttgatgttctagttagtggatcttccagctgcagacccagggaggagctgatgttctagtttgagggtcgtgcagctgaagacccggggaggagctgatgttctagattgagggtcgtggagctgcagacgcggagaggagctgatgttctagtttgagggtcgtgcagctggagacctggagaggagctgatgttctagtttgaggttcttgcagctgcagacctggagaggagctgatgttctagattgagggtcgtgcagctgcacacttggagaggagctgatgttctagattgagggtcttgcagctgcagacctggagaggagctgatgttctagtttgaggatcttgcagctgcagacccggagaggagctgatgttctactttgagggtcgtgcagctggagacctggagaggagctgatgttctagtttgagggtcatgcaggtgaagactcggggaggagctgatgttctagtttgaaggtcttgcagctgcagacctggagaggagctgatgttctagtttgaaggtcttgcagctgcagacctggagaggagctgatgttctagattgagggtcgtgcagctgaagactcggggaggagctgatgttctagattaagggtcatgcagctgaagactcagggaggagctgaggttctagtttgagggtcgtgcagctgaagacttgggaggagctgagattctagtttgagggtcgtgcagcagaagactcagggaggagctgatgttctagattgagggccctacagctgcagacctgaagaggtgctgatgttcgagattgagggtcgtgcagctgaatactcggagaggagctgatgttatagtttgagggccctacagctgaagacccggagagtatctgatcttcgagattgagggtcatgcagctgaagactccgggaggagctgagttgctaatttgagggtcttgcagctgctgacttggggaggagctgatgttctagtttgagggccctacagttggaaatctgtacaggagctgatgttctagtttgagggtcatgcaggtgaaaaatcggggaggagctgatattctagtttgagggccctgcagctagagatgcagacaggagctgatgttgtagtttgagggtcgtacagctgaagattcagggaggagctgctcgtgtatttttagggtcatgcagctgcagacccggagaggagctgatgttaaagattgagggtcatgcagctgaagactctgggaggagctgacgttctaatttgaggtccctacaggtggacaccgagagaggagcttatgttctagattgagggtcatgcagcagaagactcggggaagagctgaggttgtagtttgagggtcgtgcagctggagaaccagacaggagctgatgttgtagattgagcgtcgtgcagctgaagactcagggaggagctgatgttgtt

SEQ ID NO: 7833 - DNA, 1631 bp, Artificial sequence
  DNA replication origin
cggccctcagactggaacatcagctccccactgggtctccagctgcacggccctcagactggaacatcagctccccaccgggtctccagcttcacggccctcaaactggaacttcagctccccaacgggtctccagcttcacggccctcaaactggaacttcagctccccaccgggtatccagctgcatggccctcaaaccggaagttcggctcccccgcgggtctccagctgcacggccctcagactggaacatcagctccccgccgggtctccagctgcacggccctcaaactggaatagtttgaactcagcggggagctgatgttccagtttgagggctgtgcagctggagacccggcagggagctgatgttccggttgtagggctgtgcagccggagacccagggggaagctgatgttccagttgtagggccgtgctactggagacccaggggtggagctgatgttccagtttgagggccatgcagttgatgacccggcggggagctgatgttcaagtttgaggtctgtgcagctggagacccgcgggggagctgatgttccagtttgatggccatgcagctggaggctctgatgggagctgatgttgcaatttgagggccatgcagctggagacctggcggggaggtgatgttccagtttgagggccatgcagctggtgacctggcagggagctgatgttccagtttgaggaccgtgctcctggagacctagcggggagctgatgttccagtttaaggccatgcagctgtatgcccggggggaactgatgttgcagtttgagggccgtgcatcgggagacccggtggggagccagtgttgcaggttgagggccgtgcagctggagaccctgtggggagctgatgttcttgtttgagagccgtgcagctggagaccctgtggggagctgatgttcctgtttgagagctgtgcagctggagatctggtggggagctgatgttccagtatgagggccgtgcggctggagacctggtggggagctgatgttccagtttgagggccgtgcacctggagacccggcagggagctgatgttccagtttgagggctgtgcagctggataccgggggtggagctgatgttccagtttgagggccatgcatctggagacccagttggtagccagtgttgcaggttgagggctgtggagttggagacccgggttggggggagctgatgttccaggttgagggccatgctgctggagacccagcggggagctgatgttgcagtttgaggcggtgcagctggacatgcaggggggaagtgatgttgcaatttgagggctgtgcagctggagaccctgtggggagctgatgttcctgtttgagggtctcggagctgatgttccagtttaaggccatgcagctggagacccggtggggagctgatgttccagtttgagggccatgcatctggagacccggtggggagctgatgttgcaggttgagggccattcatctggagacccagtggggagctgatgttgcaggttgagggctgtgcacctggagccccggggtggagctgatattccagtttgagggccgtgcagctggcaatctggtggggagctgatgttccagt

SEQ ID NO: 7834 - DNA, 1735 bp, Artificial sequence
  DNA replication origin
cttggattccatcagtcttagctggtttgatcaccagggagaagtttggacctcaggcatcctgcttcctaaagataaacagtgttaaggcagggtagatattcacggaggtcatgtgggtattgcactggatgacatcttggcttcagccctgatctgttcagagccctcagcacggtactggaggagaggccttgggccgcatcgtggcatattgtggctttggggagaaagaaaagcagatagtgcaatggaaagagcgtggacttgagagtcagacttgacttcaactcctagctctaccacttaccacctaggtgacctcaagccactttctcagcctttctgagactctgtatcctcatgtgtatcctagagtttgtctgatagggctatagtgagaattaattgaattaagtatagtgagaattaagccaggtctggagaggcctggctactggtgagtgaggtaactgagatcaggtatggagaggactggctcctggtgagtgagttaattgagatgaggtatggagggacctgtctcctggtgactgagttaattgagatgaggtgtggagggacctggctcctggtgagtgagttaattgagatccattagggagggacctggctcctggcgagtgagttaattgacacccggtatggagggacctggctcctggcgagtgatttaattgagacccggtgtggagggacttggctcctggtgagtgagtgaattgagatgaggtatggagggacctgtctcctggtgagtgagttaattgagatgaggtgtggagggacctgtctcctggtgagtgagttaattgagatgaggtgtggagggacccggctcctggtgagtgagttaattgagactcggtgtggagggacttggctcctggtgagtgagtgaattgagatgaggtatggagggacctggctcctggtgagtgagtgaattgagatgaggtgtggagggacctgtctcctggtgagtgagttaattgagatgaggtatggagggacctgtctcctggtgagtgagttaattgagatcaggtatggagggacttggctcctggtgagtgagttaattgagactctgtgtggagggacctggctcctggtgagtgagttaattgagatgaggtatggagggacctggctcctggtgagtgagttaattgagatcaggtatggagggacctggctcctggtgagtgagttaattgagatgaggtgtggagggacctggctcctggtgagtgagttaattgagatgaggtatggagggacctggctcctggtgagtgagttaattgagatcaggtatggagggacctggctcctggtgagtgagttaattgagatgaggtatggagggacctggctcctggtgagtgagtgaattgagatcaggtatggagggacttggctcctggtgagtgagttaattgagactctgtgtggagggacctggctcctggtgagtgagttaattgagatgaggtatggagggacctggctgctggtgagtgaggtatggagggacctggctcctggtgagtgagttaattgaggtcaggtatggagggacctggctcctggtgagtgagttaattgagatcagttatggagggacctggctcctggtgagtgagttaattgagatgaggtatggagggacctggctcctggtgagtctcctggaggcagctgctatctg

SEQ ID NO: 7835 - DNA, 3035 bp, Artificial sequence
  DNA replication origin
ttgtgttcccttccagtcaagcccccacttgccaccacagaatggaacaatcattttttttttttttttagagacagggtctcgctctgtctccaaagctggagtgcagctccatcatggttcactgcagcctccgcctcccgggtttgagcgatcctcccatttcagtgtaaccaccattcttatctctatcaccatagattagctctgcatgtctttgaacttcatataaatggaatcatgcatagataggctcttttgtgtctggattctctctgttaacactgtgtctgtgagactcactcacgctgtgtgtagtattatgcttcatccttttttgttgttgcatagtattccactgtataaatataccacaatttatttgtctgttttcctattgctgtgcatttggattgttttgtttttcactattttgaataaagctgctatgaacatccttgtgtatgtcttgggtatacagatggtcctggcttacaatgattggatttaaaattgtttgactttatgatgggcttatcagggtattaaatgtgtttctgacttacagtatttttgacttaccacgtgtttattgggacgtaaccccttcctaagatgaagagcatctgtatacatccagaatcctgtggagcaactcataacccatgaggaatggaagccgacagacagactcatccccaggacaggtggttctcactacatctcataaagcttcttagaagatcttacaggattgagcaaccagccagccacagcaggggccaactggataacacgtctttgcataggctctccctctgtccctgtcaccctccccttttcctaaccttgttccttgggattatgttttgaaataaattattcagagaaatgaagccaaagctgacccattagccaatagctaggttctgtgatgacagagcttctgggctataatcgtttactgagaagccagcgttcctgaggggataatggctcgttccattcagctgcagcataggagtgagggcagggcattagcagaagataacaccagaaacgtgctctggggcctgttgatgactttctgtgccaagcacagacatttagcctttattctgtatgtgatgggaagccagtgccagtggtgggtttgagcagggaaccagcaaccagtggtgggtttgagcagggaaccagcaatactcaagctctgcttggatggaggccagtcagggaggagttagggcaggaggaccagtcagggaggagacttagggcaggaggaccagtcagggaggagacttagggcaggaggaccggtcagggaggagacttagggcaggagtactggtcagggaggagacttagggcaggaggaccggtcagggaggagacttagggcaggaggaccggtcagggaggagacttagggcaggaggaccggtcagggaggagttagggctggaggacgggtcagggaggagacttagggcaggaggaccggtcagggaggagttagggctggaggaccggtcagggaggagttagggcaggaggactggtcagggaggagacttagggcaggaggaccggtcagggaggagacttagggcaggaggaccggtcagggaggagacttagggcaggaggactggtcagggaggagacttagggcaggaggacaggtcagggaggagttagggctggaggacgggtcagggaggagttagggctggaggaccggtcagggaggagttagggcaggaggacaggtcagggaggagttaggggaggaggaccggtcagggaggagttagggcagggggattggtcagggaggagttagggcagggggattggtcagggaggagttagggcaggaggaccggtcagggaggagttagggcaggaggaccggtcagggaggagacttagggcaggaggactggtcagggaggagttagggcaggaggaccggtcagggaggagttagggcaggaggaccggtcagggaggagacttagggcagggggattcgtcagggaggagttagggcaggaggaccggtcagggaggagttagggcaggaggactggtcagggaggagttagggcaggaggacaggtcagggaggagacttagggcaggaggaccggtcagggaggagacttagggcaggaggactggtcagggaggagttagggcaggaggaccggtcagggaggagttagggcagtaggaccggtcagggaggagttagggctggaggactggtcagggaggagttagggctggaggacaggtcagggaggagttagggcaggaggacgggtcagggaggagttaggggaggaggactggtcagggaggagttagggctggaggaccggtcagggaggagttagggcaggaggaccggtcagggaggagttagggctggaggaccggtcagggaggagttagggcaggaggaccggtcagggaggagttagggcaggaggaccggtcagggaggagacttagggcaggaggactggtcagggaggagttagggctggaggaccggtcagggaggagttagggcaggaggactggtcagggaggagttagggcaggaggacaggtcagggaggagacttagggcaggaggaccggtcagggaggagacttagggcaggaggactggtcagggaggagttagggcaggaggaccggtcagggaggagttagggcagtaggacaggtcagggaggagttagggcaggaggatcggtcagggaggagttagggcaggaggaccggtcagggaggagttagggcaggaggaccggtcagggaggagttagggcaggaggacaggtcagggaggagacttagggctggaggactggtcagggaggagttagggcaggaggaccagttaggaggcagtgacttaggacttcagcagtggcactagaaaggggatggatatgaacgacattgcaaagtaaaactagagagacggccgggcacagtggctcactcctgta

SEQ ID NO: 7836 - DNA, 1411 bp, Artificial sequence
  DNA replication origin
ggggacagccaccagacaggtaaacacactgtgcattgatccttttacgacttttgtgaaactgatggacaggcaggcagggaggggtcctgggagagagtctggggcactccatcttggggtatctctttcgctctcctccttagcgggcgaagctttggcctgtgctggggtgggggaagaagaaggtgatgtggagcatgaagcaaggttggggtggagcaactgagggtttccagcatgggtaaccgggctgattaggactggatccagctgcccctaatgctccactgctgcccagcacttaacctccacactctgtgccctctgatggttgggagaagtctgtgtccagcccttcggccaccagaagaaaatcaagaatggaattcctggttttggagacacaaaaagtcagagagactttatttaaatagagttaatttgaagtaaaccagagagttttgtgtgcagaagcattttgcttaacttagggccatcaccacattatgaactcgtgtgtgtgtgtgtgtgtgtgcacgcgcgcgtgcacaggctagtgtccttctgtgggtgtgtctgcgtgaggacccatccatgcatgtttgatctttatggcctccccctgtgcacctgcgcctatggataaggtatagtcttgtcttgattcccagtattcattctccttgaagaatcctgacagccttcagtcaccttcccttttccagtctcccaaaagcaatggcgccttaaatgtgcggtaaggatgaggtgagtcttgaggtagcctaggccacagctgccccttcaaggcaaggcctcagctgagttcaggaaataggagaacctggccccggagcaaccccagaagcgcaggaccacgaacgtcccgacccccagcagcaagaggccgcccagggccccaaagaagatgccgaagaacgcgtcgagtttcatgctcaggtgctcacagtgctcgccccaggccgtgtagatggagaaggacacacagctggtgaccaagagagacagacaggcggtcagaggcgggagctcagcctcccagcccctcctcttctgctggggaagaagaggttctgtaggagaggctgggctcgccccactctccggagagactgagtcagccctgaggccgtgctgaagtgagaccactgggcaaaggaggcaggtgtgggctttaaaaacatgggcctgggccggcgcgggggctcacgcctgtaatcccagcacattgagaggctgaggcgggcgcatcacttgaggtcaggggttcgagaccagactggccaacacggtgaaaccccatctctactaaaaatacaaaattagccaggcgtggtggtgcgcacctgtaatcccagctactcaggaggctgaggcagaatcgctt

SEQ ID NO: 7837 - DNA, 1268 bp, Artificial sequence
  DNA replication origin
ttcaaagcatgtgctcttcaggaaagcattttccataggaacctttttccacaggaacctttttccctaggaacctttttccctaggaaactttttccataggaagcaccatcccttggtaaggatgtgcagtagtttatttaaccagaccctacttctgaaacgttactattatccaccatgctgatctgaacgtccaggggcatatgtatctgtgcacttctccaattatttctcaggataaacacccgaaaaggaattcgtggctgaaaaggtactgatttagtgttcatcggttgctttctgtgttaatctgtgtccttcccgacagtgaacgtgagcacgctgaaggcttacttcagatgcgatggctacaagggctacgacctggtctacagcccccagagcggcttcacctgcgtgtccccgtgcagtaggggctactgtgaccatggaggccagtgccagcacctgcccagtgggccccgctgcaggtgcatagggctgtggccaggaggtggaggacagtgctggggaacccaagctgggcaagacactgcaaggggtccaggaattaggatggctcgagagatcagagaccagggaagagaggacagtggaaaaggagagttgtgagtgcctgctctgtgtggagaataaaggcgctatattacaaactctgaaacccaaaagagccataggggggcttagaactatttcgaagatgagaaaactgcagcttagagatgacaaggaacctgccccaggacgcagtaggttaagcagcagggcatggtttccaaagccaaacattttttatatttttatgttttgagatggagtgtcatttgtcgcccaggctggagtgcagtggtgcgttctcggctcactgcaacgtccttctcccgcgttcaagcgattctcctgcctcagcctcccgagtagttgggactacaggcatgcaccaccacgcccagctgatttttgcatttttagtagagacggggtttcgccatgttggtcaggctggtctcgaactcctgacctcaggtgatccgtccaccttggcctcccaaagtgctgagattacaggcgtgagccaccgcgccagggcccaaagtcaaaccctcccacctgatctggctgctgcttccctgctgtctccttgtgggaaaagaacctgcagtcctgtgtctaggccagtcctgcccctcagtcaagcgaggcgcctttgcccctgccctcatcagcagtccccggggctccgc

SEQ ID NO: 7838 - DNA, 1816 bp, Artificial sequence
  DNA replication origin
gcctgtaatctcagctattcaggaggctgaaacagaagaatcgcttgaacccgggaagcagaggttgcgacgagccgagatcacgtcactgcactccagcctgggcaacaagagcgaaactccgtcaacacacacacacacacgcacaaaacctggagggtcacatctaaagggacattgcatttgtccagaaatagagagggagtgaaacctcttcacgggtctgtttctcggagccctgccatttccatttcatagttgcttcacacattcattcagtcagtcatttaacaaacatttattgagctaagtggctggcactgttctgggtggtgaggatacagtcatgaatgaataattaaaaagatacctgtgaaaattataaaatatgttgagtaattataaatgctaaggagaaaaaaataaagcagggaaggcaaacatgaagtgtgggtgaatgtgacattttagacagggcggccaagagaggcctcaccaaggaggggacattggaatgaagacgtaaagaaggtgaggggcaagcgtgtggctgtccagggaaggaagggtattccaggcaagagaacagcacgtgtgaagcctgggagctgagcgcacctagcgtgtttgaagaacacagaggagcctgcggggctggagtgcagggagctgggaaggggtccagcgctaggatggagtggagggggctgggaaggcatccagcgctaggatggatggagggggctgggaaggggtccagcgctaggatggagtggagggggctgggaaggcgtccagcgctagtatggagtgaagggggctgggaaggcatccagcgctaggatggacggagggggctgggaaggcgtccagcactaggagaagagctctgagaagctgaactgggccgaaggccactgcaaggatggagagagccagggaagtctctgaagggtttgagcagaggaatgccaggagtggaagaatctgctcagtgaatgcagatgcacagggaaaagcagggtcaggcaagggcagctcctcatctgctcccgactctgaaaaggcctccccaggcctcgggccacttactgagggtggcgttcgcctgctcgtagtttttactgacttccctcgtgtgaagtccgatgcttgcgttgcgcagggccagggtgtcatagatgcatgagctatctccgtcacagttggagatcaaatgttcagcccaggagctgtttttttgcagttgtgagtagaaaacaggggtgaagttggaaggcagctggtcattcctcttgccaaggaggcctgtcccgttgatctgccctgtaacacacagagcgcggtggtaccaggcatggcactcagccttattccatctgtgtccacctctacccctcactttagatggcttggagcggggcggtgggagtgcagggccagagcggtttccagcttctgagtctagaaacacctgctgcagtgagagaggacactccacgtcccccattctctcctccaggtagagagaggcaggtgggctggtggtggtggggacagccctgggggggcacagattcctcagaccttagggaggatggaggtctgcttcctacagggccgagggggacgacataaacataccggctcccctcacctgcccctctgccccaggaccctgcccagactcacaggtcattccaaagtggaaaagcatctcctcagggctccctgggggaatggtggagccattgggcatcctgaagtcgtcctctggattgttattccagacccctgagggacagagtgggaggtt

SEQ ID NO: 7839 - DNA, 861 bp, Artificial sequence
  DNA replication origin
gcaccgcaacgcaccgggccctgcaccgccacgcacccggccctgcaccgccacgcacccggccctgcaccgccacgcaccgggccctgcaccgccacgcaccgggccctgcaccacaacgcacccggccctgcaccgcaaagcactcggcgcggcaccgccacgcgcccggccctgcaccacaacgcacccggccctgcaccgccacgcgcccggccctgcaccgcaacgcggcttcccgcccacctcgctgctcccggtgcggggagggggcggccggcgctccccaacctacctccgccgtcttcatggtcaggctgaaatgtcacagtctggttatccagcaggacacggattgcgtcgtgaggctcaaggagccattggacctggaaggagatgggagggggcctgagcccgacccgcaggtggagccgacgcccaggaaagcagctgggagagcccctggggctggaagctgcgccctgggccgggaggaaggcgctggaggccgcggcctgaggtgatgccagccgccgtctaccgtgtgctcggcagggccaggcatggttttcggattatgccctttagctcttacaacagcccgtgaggcaggtaatgtcatccccattcttactaggagaaaaccaaattaagtagtttcttcgaagccaagcagctgggaaaccgtggggccagagccctaatccaccatccccaggatttactccgggacagctgcgtggatgggctgtgtcctccctccctcctgcccggcttcccctccttcgctctcttccttctcctcggcctcagtatgtggctgaaggtccctgtgggtggaatgcagggaggttcccggca

SEQ ID NO: 7840 - DNA, 971 bp, Artificial sequence
  DNA replication origin
ggggctggaagctgcgccctgggccgggaggaaggcgctggaggccgcggcctgaggtgatgccagccgccgtctaccgtgtgctcggcagggccaggcatggttttcggattatgccctttagctcttacaacagcccgtgaggcaggtaatgtcatccccattcttactaggagaaaaccaaattaagtagtttcttcgaagccaagcagctgggaaaccgtggggccagagccctaatccaccatccccaggatttactccgggacagctgcgtggatgggctgtgtcctccctccctcctgcccggcttcccctccttcgctctcttccttctcctcggcctcagtatgtggctgaaggtccctgtgggtggaatgcagggaggttcccggcacccctcactcaccgtgacggggcccaggctgctggagcggtactgagccgcaaaggcgatgaagttggtggcctgggctgagccagtctgggcggtgcggccctgaagcaggaaggaggagttcccgtcttgggccccgaccagcaggaagtcccccagcccattgaaggtgtaactgacaccatccaaggtggtgatgtgggggtccccgaacatccaggctggaaggaaaaaagagatgctgcctcagcatgacaaatcatgtgtagggctgaggttcctcactgcagtcaggtgcggcacttgtccaggaggactcagggtgaggttcctcactgcagtcgactggggcacttgtccgggcggactcagctggggagatgttcacagagcacagaatcctcccctcaagcctccttgcattttcgtgccccgctattctcactccttccccaactcaggtacaaagcccctccactgaccatccacccatcactggcgtcatctccatcttcccttgtggccacagctctgcccctactccttatccagatgccacctcccggaagcccag

SEQ ID NO: 7841 - DNA, 1026 bp, Artificial sequence
  DNA replication origin
tagggctgaggttcctcactgcagtcaggtgcggcacttgtccaggaggactcagggtgaggttcctcactgcagtcgactggggcacttgtccgggcggactcagctggggagatgttcacagagcacagaatcctcccctcaagcctccttgcattttcgtgccccgctattctcactccttccccaactcaggtacaaagcccctccactgaccatccacccatcactggcgtcatctccatcttcccttgtggccacagctctgcccctactccttatccagatgccacctcccggaagcccagaagctccccctccccagaggctcttcctgggcctgggccctgtcgctcaccgggctgtgggggcctgtatgtagcacagcccacgtggggccgcctctgctggtacagggcacagaggtagggcttgtcattccagcggcagcaccagctctgtggctccagttcctgggctgcggagaacagcagtgagtcggggaggttgaggacctggagaagcttggcagggcagggtggtgttggttgagagcttggcagggcagggcggtgttggtggagagcttggcagggcagggcggtgttggtggagagcttggcagggcagggcggtgttggtggagagcttggtagggcagggcggtgttggtggcaagagcatggctttggaatccagcatggcccttctcatgaccttgggcagtgaatagggtgctgtctcttttgcaggcattggggccactgtgcagcagggcgcatggtaggagctaagcaaatttcctgtcttgagggtggagagccaagtactgctgctctcaacgtgctgggagtggggagggcacggctgacggtctgggaactgtggaaactgccatgggacgggggagagaacgggaggacacagaccacgtgaccccacacccctgcgctctccagctcccttggagcgtctctgtgggagctgactctcagtcttcccccaaacatcctgctcatctgggtc

SEQ ID NO: 7842 - DNA, 1353 bp, Artificial sequence
  DNA replication origin
ctgtgggcggttgaaatgtggattcccgtgtgtgggaggctgtctccgatgtagcagtgcgccatctctgttcccatatgctggggtgtggcaatcagtacgaaggccacatgtcttttgttcttgataattgctgcaaatgtcttctcttacattgagtgtgttcaggttacccctttgattacactgctttcactagtttcttggtgtgctatgaaggagaaaggaggggaattacccaactctaggaatttcacacggtccaggtacacccaaggaaggtgtcacgcaggggtgcatcatcctgcttgtgtcagggaggaggaaaagcccaagagtccccactctgcagcaggcacccagggtggggctgcaggcggctgctccaggctttcctccttcccgggccatgctcggaccccacacctggggacggtgatggcgatagtggtggtggtggtggtggtggtggtggtagtggcggtggaggtggcagtggcgatggtgatggtggtgatggtggtggtgatggtggtgatggtggtggtgttgggggtgatggtggcgatggtggtggtggtgatggtggtggtggtggtgatggtggtgatgatggtggtggcaatgatggtggtgatggtggtggtggtggtgatggtggtggtggcgatggtgatggtggtggtgatggtggtggtggccgatggtggtattttttggggggtggccagtgatggtggtgatggtgatggtggtggtggtggtggtggcgatggtggtggtgatggtggtgatggtggtggcaatggtgatgatggtggtggtggtgatggtggtggtgatggtggtggcaatggtaatggtgatggtgatgatggtggtggcgatggtggtggtgatggtgatggtggtggtgatggtgatggtggtggtgatggtgatggtggtggtagtgttggtggtggtggtggtgatggtgatggtgatggtagtgttggtggtgacgatgatggtggtggtggtggtagtgctggcgatggtggtggtggtggtagcagcagtggcagcatctgttgtatcaaggcctcactcagttctgagggatttgcagatgttactgcatttaatcctcacaatacagtgaggtagatgccactgtaatcccttttatacagatgtgaaaactaagaatcagagagggtcagtaacttgtctgtggtcaccaagctagtaagtggggggatcagcagttgaatccatcactgcctaactccagaaactgggtcttaaccatcacaatacactgtccctagagtctgtcccgctccaaaccctctgcttgttgaagggaaa

SEQ ID NO: 7843 - DNA, 1602 bp, Artificial sequence
  DNA replication origin
gcctgaggaccctgcccacttcagcccacccaatggcctgccctcccctgtcccaggcctgcatttttgccgtgagcttttctgaggtgaagttcaattcaaacttgggctgcaggaaggcctgcagtgtgcagaatgcagggtcgtggcccagacgtccaagacctctggacttgaactcaagcatcttagctcaaactggcccagagagcagagccactcgggcccacttttacctccccatgcctaatctgcagcttcttgagaacaggcgtgagtctcttcctcttggagcctccacactgccctgtccgtggcaggggcacggtccacacttcctgcagtagctttcatcacatttcctctgattggagttattcacccagtccaggagcacaggacgggccctcttgactcactcttgttaggatagaccccctacagcctgattttacaatcaaaggctgaattgtcagcccccatcccccgtcacctgtaggtcttctcgtggccgggttggggtattcctggtcagtctcgcggccgggttggggtattcctggtcagtctcgtggttgggttggggtattcctggtcagtctcgtggttgggttggggtattcctggtcagtctcgtggccgggttggggtattcctggtcagtctcgtggccgggttggggtattcctggtcagtctcgcggccgggttggggtattcctggtcagtctcgtggttgggttggggtattcctggtcagtctcgtggttgggttggtgtattcctggtcagtctcgtggttgggttggggtattcctggtcagtctcgtggttgggttggggtattcctggtcagtctcgtggttgggttggggtattcctggtcagtctcgtggttgggttggggtattcctggtcagtctcgtggttgggttggggtattcctggtcagtctcgcggccgggttggggtattcctggtcagtctcgtggttgggttggggtattcctggtcagtctcgtggttgggttggggtactcctgagtcagcttaatgtcccttgactgcttcctcccacacccatatttaagcctcagtcccctgctgcaggggctgtcacagcagcaactctggcaaagccttccacacagctctttgtctcccctgccagctgctgggggatcctgactgccaggctttgaaaggctcacctgataaaatgtggtcccccgaccagtggagaagtcagcatcgtcccagaacggagccaccagggccacagggtcccggcctgtgaagcctgttgggagtgggttggggtaggagaaaatctggtagtctgactctgggaagatgatctggccattgtctgtgaactgagcacatgggttttgtggtcagcattcagggagggaagtggggaggaaagtcccagccttggtccagctcctcaaaagcgtgacccccaagggtagagctttagagatgctaacaacccctggaagtcacctcctgtgtcctgttttggggagagccctttccatatattctcacagaatgctccgccctcaggccatcccttgcgtcctcgggtggtaggctt

SEQ ID NO: 7844 - DNA, 6360 bp, Artificial sequence
  DNA replication origin
ggggtggtgtgacctgaggatgctgaggaagggatggtgacaggaagagaggtggcatgacctgtgaacactgaggaagcgtcggtgacaggaagagaggtggcgtgacctgtggacactgacgaagcgtcggtgacaggaagaggggtggtgtgacctgtggatgctgaggaagggctggtgacatgaagaggggtggcgtgacctgtggatactgaggaagtgttggtgacaggaagaggggtggcgtgacctgtggatgctgaggaagtgtcggtgacaggaagaggggtggtgtcacctgtggatactgaggaagtctcggtgacaagaagaggggtggtgtcacctgtggatgatgaggaagtgtcggtgacaggaagagaggtggtgtcacctgtgtatgctgaggaagtgtcggtgacaggaagagaggtggtgtcacctgtggatgctgaggaagtgtcggtgacaggaagagaggtggcatgaccggtggatgctgaggaagggctagtgacaggaagaggcgtggtgtcacctgtggatactgaggaaaggctggtgacaggaagaggggtggcctgacctgtggatgctgaggaagcgtcggtgacaagaagaggagtggcgtgacctgtggatgctgaggaagggctagtgacaggaagaggcgtggtgtcacctgtggatactgaggaaaggctggtgacaggaagaggggtggcctgacctgtggatgctgagtaagtgtcggtgacaggaagaggggtggtgtcacctgtggatgctgaggaagtgctggtgacaggaagaggggtggcgtgacctgtggatgctgcggaagtgtcggtgacaggaagagaggtggcgtgacctgtggatgctgaggaagggctggtgacatgaagagaggtggcgtgacgtgtggataatgaggaagcattggtgacaggaagaggggtggtgtcacctgtggatgctgagggagtgtcggtgacaggtagaggggtggtgtgacctgtagatgctgaggaagggctggtgacaggaagacgggtggtgtcacctgtggatactgacgaagcgtcggtgacaagaagaggggtggtgtgacctgtggatactgaggaagtgtcggtgccaggaagaggggtggtgtcacctgtggatgctgaggaagtgctggtgacaggaagaggggtggcatgacctgtggatgccgaggaaacgttggtgacaggaagacgggtggtgtcacctgtggaagctgaggaaaggccggtgacaggaagatgggtggcgtgacctgtggatgctgaggaagtgtcggtgacaggaagaggggtggtgtcacctgtggatgctgaggaagcgtcggtgacaggaagaggggtggtgtgacctgaggatgctgaggaagagctggtgacaggaagaggggtggtgtcacctgtggatactgaggaagcgtcggtgacatgaagaggggtggcgtgacctgtggatgctgaggaagggctagtgacaggaagaggcgtggtgtcacctgtggatgctgaggaaaggctggtgacaggaagaggggtggcgtgacctgtggatgctgaggaagcgtcggtgacatgaagaggggtggcgtgacctgtggatgctgaggaagggctagtgacaggaagaggagtggtgtcacctgtggatactgaggaaaggctggtgacaggaagagaggtggcgtgacctgtggacactgaggaagcgtcggtgacaggaagaggggtggtgtcacctgtggatgctgaggaaaggctggtgacaggaagaggggtggcctgtcctgtggatgctgaggaagtgtcggtgacaagaagagggatggcgtgacctgtggatgctgaggaagggctggtgacaggaagaggggtggcctgacctgtggatgctgaggaagtgtcggtgacaggaagaggggtggcgtgacctgtggatgctgaggaagtgtcggtgacaggaagagaggtggcgtgacctgtggatgctgaggaagtgtcggtgacaggaagagaggtggcgtgacctgtggatactgaggaagtttcggtgacaggaagaggggtggtgtcacctgtggatgttgaggaagggctggtgacaggaagaggggtggtgtcccctgtggataatgaggaagcatcggtgtcatgaagagcggtggcgtgacctgtggatactgaggaagcgtcggtgacaagaagagaggtggcgtgacctgtggatattgaggaagcgtcggtgacaagaagaggggtggcgtgacctgtggatgctgaggaagggttagtgacaggaagaggcgtggtgtcacctgtggatactgaggaaaggctggtgacaggaagaggggtgtcctgacctgtggatgctgaggaagtatcggtgacaggaagcggcgtggtgtcaccagtggatgctgaggaaaggctggtgacaggaagaggggtggcctgtcctgtagatactgaggaagtgtcggtgaccggaagaggggtggcatgacctgtggacactgaggaagcgtcggtgacaggaagaggggtggcgtgacctgtggacactgaggaagcgtcggtgacaggaagagaggtggcgtgacctgtgggtactgaggaagcgtcggtgacaggaagaggggtggtgtgacctgaggatgctgaggaagggctagtgacaggaagaggcgtggtgtcacctgtggatgctgaggaaaggctggtgacaggaagagaggtggcgtgacctgtggatactgaggaagcgtcggtgacatgaagaggggtggtgtcacctgtggatgctgagttagtgtcggtgacaggaagaggggtggtgtcacctgtggatactgaggaagcgtcggtgacaagaagagaggtggcgtgacctgtggacactgaggaagcgtcggtgacaggaagagaggtggtgtgacctgaagatgctgaggaagggatggtgacaggaagagaggtggtgtcacctgtggatgctgaggaagcgtcggtgacaggaagaggggtggtgtcacctgtggatgctgaggaagggctggtgacaggaagagggatggcctgacctgtggatgccgaggaaacgtcggtgacaggaagacgggtggtgtcatctgtggaagctgaagaaaggccggtgacaggaagtggggtggcgtgagctgtggatactgaggaagtgtcggtgacaggaagaggggtggcctgacctgtggatgctgaggaagcgtcagtgacaagaagagggctggcgtgacctgtggatgctgaggaagggctagtgacaggaagaggcgtggtgtcacctgtggatactgaggaaaggctggtgacaggaagaggggtggcctgacctgtggatgccgaggaaacgtcggtgacaggaagacgggtggtgtcatctgtggtagctgaggaaaggccggtgacaggaagaggggtggcgtgaccggtggatgctgaggaagtgctggtgacaggaagaggggtggcgtgacctgtggatgctgaggaagggctggtgacatgaagaggggtggcgtgacctgtggataatgaggaagcattggtgacaggaagaggggtggtgtcacctgtggatgctgaggaagtgtcggtgacaggaagaggggtggtgtgacctgtagatgctgaggaagggctggtgacaggaagaggggtggtgtcacctttggatgctgaggaagtgtcggtgacaggaagaggggtggtgtgacctgtagatgctgaggaagggctggtgacaggaagaggggtggtgtgacctgtggatactgaggaagcgtcggtgacaggaagaggggtggtgtcacctgtggatgctgaggaagggctagtgacaggaagaggcatggtgtcacctgtggatgctgaggaaaggctggtgacaggaagaggggtggcgtgacctgtggatgctgaggaagggctggtgacatgaagaggagtgacgtgacctgtggatgctgaggaagtgctagtgacaggaagaggcgtggtgtcacctgtggatactgaggaagtgtcggtgacaagaagagaggtggcctgacctgtggatgctgaggaagtgtcggtgacaggaagaggggtggtgtgacctgtggatgctgcggaagggatggttacaggaagagaggtggcgtgatctgtggacactgaggaagcgtcggtgacaggaagaggggtggcgtgtcctgtggatgctgaggaagtgtcggtgacaagaagaggggtggcgtgacctgtggatgctgaggaagggctagtgacaggaagaggcgtggtgtcacctgtggatactgaggaaaggctggtgacaggaagaggggtggcctgacctgtggatgctgaggaagcatcagtgacatgaagaggggtggtgtgacctgtggatactgaggaagcgtcggtgacaggaagaggggtggtgtcacctgtggatgctgaggaagggctagtgacaggaagaggcatggtgtcacctgtggatgctgaggaaaggctggtgacaggaagaggggtggcgtgacctgtggatgctgaggaagggctggtgacatgaagaggagtgacgtgacctgtggatgctgaggaagtgctagtgacaggaagaggcgtggtgtcacctgtggatactgaggaagtgtcggtgacaagaagagaggtggcctgacctgtggatgctgaggaagtgtcggtgacaggaagaggggtggtgtgacctgtggatgctgcggaagggatggttacaggaagagaggtggcgtgatctgtggacactgaggaagcgtcggtgacaggaagaggggtggcgtgtcctgtggatgctgaggaagtgtcggtgacaagaagaggggtggcgtgacctgtggatgctgaggaagggctagtgacaggaagaggcgtggtgtcacctgtggatactgaggaaaggctggtgacaggaagaggggtggcctgacctgtggatgctgaggaagcatcagtgacatgaagaggggtggtgtgacctgtggatactgaggaagtgtcggtgacaggaagagaggtggcgtgacctgtggatgctgaggaagtgtcggtgacaggaagaggggtggtgtgacctgtggatactgaggaagtgtcggtgacaggaagagaggtggcgtgacctgtggatgctgaggaagtgtcagtgacaggaagaggggtggtgtcacctgtggatgctgaggaaaggctggtgacaggaagaggggtgacgtgacctgtggatgctgaggaagtgtcagtgacaggaagaggggtgctgtcacctgtggatgctgaggaaaagctggtgacaggaagaggggtgacgtgacctgtggattctgaggaagtgtcggtgacaggaagaggggtggtgtgacctgtggatactgaggaagggctggtgacaggaagaggggtggcgtgacctgtggatactgaggaagcatcggtgacatgaagaggggtggtgtgacctgtggatgccgaggaagcgtaggtgacaggaagaggggtggcgttgctgatgagggccgtggtgaaggttttaccagaccctgaaggtgacagagtgtgggtctcggtttgtggagatgtaagcccagtggatgtgatcgatggaggtgtgggtgggactgttgagaaggtgtcggttgcctgggacgccaggctgatagtgtcagaccctctgctggttcttgtcctctgagtctgggccatccgggaaatggcggctgtctcctgaggagaggcactgggagaagttgggcttgactgtcctgtcggtctccctgcagtggaggcctcagagagggtgggatgaaaggtgccggggacgatcgaagacgccattcctgtgcttactgggatggcaccatgactggctgaggcggacagcaattcggttgttgactgggttgtgtgactgtccctggaggggtttgatgaaaaccttgtcgtctctcctgaggtggatattccttcgcttcctgaaggtgttgtgccactcgccccggatgaggaaggggtagctgtgcccgctgaggtggttcgtgaccctgaggaggccggttcgctggtctgtgtttgtccagaggcctctgtgctctcagcctggtgggtatgggtcatggctgctgctgtgtcaggtgaggtgctggcagaggctgatgtccattgtccttctgggccccctggtgttgacactacagagttggccagagtaagggcacctgttttggaaagtgacgtgcct

SEQ ID NO: 7845 - DNA, 980 bp, Artificial sequence
  DNA replication origin
gcttactgggatggcaccatgactggctgaggcggacagcaattcggttgttgactgggttgtgtgactgtccctggaggggtttgatgaaaaccttgtcgtctctcctgaggtggatattccttcgcttcctgaaggtgttgtgccactcgccccggatgaggaaggggtagctgtgcccgctgaggtggttcgtgaccctgaggaggccggttcgctggtctgtgtttgtccagaggcctctgtgctctcagcctggtgggtatgggtcatggctgctgctgtgtcaggtgaggtgctggcagaggctgatgtccattgtccttctgggccccctggtgttgacactacagagttggccagagtaagggcacctgttttggaaagtgacgtgcctcctgagggccccagggtggcatcatggctgctgggtgctgcctgcagtgctgtggtcggggcctgggttgtgtgaccatccccggtgggagctggggcaaaggttgttgctgcacttatggtgggtgcgtcctgaggaacaatttctgagggcgagtgcccactggctgtgaaggaagaacctggggtggtgactgtcttggtgtcagtcatgggggagacggacctcgtggtttgtgattcttgtgtggtctgcggggcttgagtgtgacccctttgggaaacagctggtgattcctgaggagaggtgcttgtggaatgtattgttgaatgatttgttgatggtgccgttgtaatttgttgggatgtgtgtctatccagcataggtgaagaagatggggatgtggccgtttttatcatctgagtcacactgtagcttgggctgctgagaagagcctctccagtggtccccgtttcttgtgtccattgtgtctgggcgcctgcccctgttgtttttgggagagttgtgctgtgggaggagtatgtggtgggctctcctggttcccctattgctgagaccttag

SEQ ID NO: 7846 - DNA, 1573 bp, Artificial sequence
  DNA replication origin
gggaaaacatgtttaaaatgcattttgaatttaagctgccggctacaaaactgaacaatgtctcccgcagaaacgagaaatcccttggcgtggccatttcttattacagaagccaccctgccacgcacacagacgcgctggaagtatctttcctcagtcacaaccagacgaaggtcattcttgcccagtggcctccctctgaggattctggtttctgacatccgtgtcacaatggcaatgccagtcaccagtctctgaccactagacccacgcccccgggacctacgcagacacccaggaccaatgccagtcaccagtctgtgaccccaggacctaccagacaccttccagggcaggcagggcaggccattttccaaagcaattcgagctaaggagacagcagcagcaaccctccctcctggccctcagagctgaggatcaacccacaggggtgcggtggaggctgagagcaggggtgcggaacccgagtcagcaggggcagtgaggaggctgccgcagtagtcaaagcgacggggaggatgtggcaaagcaaacaagaggacgcgatggggtgaacacttgggaggaagatcaacgagtactgactaggacacaggggacaaggaagagaaagaaatccagaggacccacagctttctgggctggatgtctgggggactgttgttagcatgaacagaaggaaggaagaaagcttgcaaggaaagattgacctggacctgttgcattgcatgagctaggcaggaaatccctgggagggtgaggccagcatatgggtgggaagtcagggagaagtacagatttgtaaggcgtgagagtagacgcagggtggccagagagggaggggcagcaggagagggaaagggctggagacatgtcatctgggcgtggagcgggggagagaggtggcaaggggagtggagtggagggcccgggagcgtggacggtggagcaggacccgtcagcttcaatgagggtgaggctgggtggtggcacggggccgccggccagggagagcacgtggaggggggggcgcaatacacatctgtcagattcatgaatgaatgaatggatggggccgaactgatgagacgcgtgaggactggagaaaatcgtttttgctgttgggaaggagattctggtagctctgaggaaaacggcttgagcgaagtgagtgaggtgggggcagagcgagcagtgcgtggtaaagaagaggcggcaggggaagcccggctttcatgctgctggagggacgaggaggacacagacggatgacagacttgttttaggccaacagacacctgaacatgctcacaggcaggagagaaggagaaaggcagaaagaacgtcggagacacagaggcagagcagtgagccatccgggcaggagggagccccggggccccggggagggtgcggagaaggctctgggcattgaaggagatgaagggcacggctttggttctttcagtgaagtagaaaatggagggtcacggggagagaagagagaggagagacctgtttctctccaatatcaactctttaggcgcaaatc

SEQ ID NO: 7847 - DNA, 859 bp, Artificial sequence
  DNA replication origin
acatggggggaaggtggagagagacccagagagggaaagaagaggaagagaagagggagagagaaagaagagtggaggccgtgcgcggtggctcatgcctgtaatcccagcactttcggaggccaaggcaggagatcacctgaggtcaggagttcgagaccagcctggccgacatggtgaaaccccgtctctactaaatatacaaaaattagccggtcgtggtgggccccacctgtaattccagctactcaggagtctgaggcaggagaatcacttgaacctgggaggtggaggttgcagtgagccaagatcgcgccactgcactccagcctgggagagagagcgagactctgtctcaaaataaataaataaataaataaataaataaataaataaataaatataaaataaaataaaaaataagaagaggagaaaagtggggaagaggaggcatgaactggcagatacgggacaagatctgaggggaaagacagagggagaatgctcgaaagagagagaaaagagaacagagggccagagagcagcccggcgatgtctggaaggatccatggtgagagcccaggcttactcgcagagagaaagacaggcagagccagagcaagaggaacagagtcaaggagaaagatgtacacccttgtgtacagagctgggggtagaggggatgccaggaaagctgggtgatggagacggaagaaaactcatgtaaagctgcagggtgagaggacgagacaggtgagacgcagacaaactgaggaccctgggaatggagagaggagaagatcgggagacagcagcaagcaagggaagcgacaaggaggagaggggcaggccggccggg

SEQ ID NO: 7848 - DNA, 770 bp, Artificial sequence
  DNA replication origin
ggagggaggagaggacccaggaacccggctaggagggtggcccacccatttccagtgtgacctgttcccattcccccatgtctcctcccatccctcccgccactcagctcaggctgatgagaagcagagcaacgggtgtatcggtgttttctttcctggtggggtagtggggtggggctgaggagagaaaagggtgattagcgtggggccccgccctcttttgtcctcttcccaggttccctggccccttcggagaaacgcacttggttcgggccagccgcctgaggggacgggctcacgtctgctcctcacactgcagctgctgggccgtggagcttccccagggagccagggggacttttgccgcagccatgaagggggcacgctggaggagggtcccctgggtgtccctgagctgcctgtgtctctgcctccttccgcatgtggtcccaggtaagtgatggagacagcagatgaggctggctgcggggagcacttgggggaggtgggagctgtcagagaaagaggtccggggagacagagagagagagagagagaataggggaaagggagacagcgaagaggaagagaagggagagaaaaagagggagagggaaaggagaaagagatgaatgggacaacatggggggaaggtggagagagacccagagagggaaagaagaggaagagaagagggagagagaaagaagagtggaggccgtgcgcggtggctcatgcctgtaatcccagcactttcggaggccaaggca

SEQ ID NO: 7849 - DNA, 2273 bp, Artificial sequence
  DNA replication origin
gacacaggtggcaaatccggggacctggatgctgggtcaccgacttcatgttcttgctgacttcctggcctcggttttcttctccttaaggctgggtgaatggaatgagtttagatccctggacctccaggccctcctgtgccccggggtggccctgcttcacagggatgcccgtaagaagacgttgcatgcgtaaaaatcatgccctgctccaccacagaggtgagatgagacaggaaatgagctaattggcgtgagaatgcttggcacttttagggaaaggagaaaccgaatcccaagagaatgacagtggcctttgtgtgaccctagtaccagggcccctgctttcgccatggcctcagatagaggccacatacagcaggtgctgggcccccagcccacccacctccctgctttcaccatggcctcggatagagaccacatacagcaggtgccggggcctccagcccgcccgcctccctgctgaaccatggaataaggagctgcagaggaggaaagattttggagtcgtgctgacctgggtctgaatcccagctcggagggcctgctgccacatctgtacgtgggcatcctcttttacgtgagtgtctcgggtcgggtcctcccagaagcaaatgctgagttggtggaaggaatgtgaaggctataggggagtggcacctgcttaaggagaaggaggccgggctgggcaggaggatgtggcacctggtaaggagaaggaggccgggccgggcaggaggatgtggcacctgtgtaaggagaacgaggccgggccgggcaggaggatgtggcacctggtaagaagaaggaggctgggccgggcaggaggatgtggcacctggtaaggagaaggaggccgggctgggcaggaggatgtggcaccttgtaaggagaaggaggccgggccgggcaggaggaagtggcatctgtgtaaggagaaggaggccaggccgggcaggaggatgtggcacctgcgtaaggagaaggaggccgggctgggcaggaggatgtggcacctggtaaggagaaggaggccgggctgggcaggaggatgtggtacctggtaaggagaaggaggccgggcaggaggatgtggcacctgcataaggagaaggaggccgggccgggcaggaggatgtggcacctggtaaggagaaggaggccgggcaggaggatgtggcacccggtaaggagaaggaggccgggccgggcagaaggatgtggcacctggtaaggagaaggaggccgggccgggcaggaggatgtggcatctgtgtaaggagaaggaggccgggccgggcaggaggatgtggcacctgcgtaaggagaaggaggccgggctgggcaggaggatgtggcacctggtaaggagaaggaggccgggctgggcaggaggatgtggcacctggtaaggagaaggaggccgggcaggaggatgtggcacctgcgtaaggagaaggaggccgggccgggcaggaggatgtggcacctggtaaggagaagggcggaggccaggctgagcaggaggatgtggcacctggtaaggagaagggcggaggccaggctgggcaggaggatgtggcacctcgtaaggagaagggcggaggccaggctgggcaggaggatgtggcacctcgtaaggagaagggcggaggccaggctgggcaggaggatgtggcacctggtaaggagaacggcggaggccaggctgagcaggaggatgtggcaccttgtaaggagaagggcggaggccaggctgagcaggaggatgtggcacctggtaaggagaagggcggaggccaggctgggcggaggatgtggcacctggtaaggagaaggaggccgggccgggcaggaggatgtggcatctgcgtaaggagaagggcggaggccgggctgagcaggaggatgtggcacctgtgtaaggaaaaggaggccgggctgggcaggaggatgtggcacctgtgtaaggagaaggaggccgggctgggcaggaggatgtggcacctgcgtaaggagaaggaggccgggctgggcaggaggatgtggcacctgcgtaaggagaaggaggccgggctgggcaggaggatgtggcacctgcgtaaggagaaggaggccgggctgggcaggaggatgtggcacctgcgtaaggagaaggaggccgggctgggcaggaggatgtggcacctgcgtaaggagaaggaggccgggctgggcaggaggatgtggcacctgcgtagggagaaggaggc

SEQ ID NO: 7850 - DNA, 1393 bp, Artificial sequence
  DNA replication origin
gctcactgcaaccttcgcctcccaggttcaagcgattctcctgcctcagcctcccgagtagctgggattacaggcatgcgccaccacaagtggctaattttgtatttttggtagagacagggtttctccatgttggtcaggctggtcttgaactcctgacctcaggtgatctacctgcttcggcctcccaaagtgctgggattgcagatgtcagccactgtgcctggcctgaatctttaaaaagtagatgttaacaccctgttttacaaatgagaaaattaaactgaaaggttcattttttgttgaaacaatgtctattaagtgcctatctgtgccaggggtgaagctagaagcagagataaaggcagtggggaggaaggctggtgtctctgctctcatcagcctggtctggaagcagataataaacacaaaggccagcaaataattataactgccataagcattatgaagggaaagcagagacactctagggacatacagcagggtaccgactttagctggcagtgagaggctggcagagggatgcctgaccaggggccagtggaggagggtgaggttagccaggcagaggctggcaccactgctgtgggccgaggatggcctgtgctaaggccctgaggtagagagacactttgcccatcctaggatctgaaagaagtccagggggattggagcagagggagcgggatgagtgaggtgggcttacacagcgggggattagggcagagggagcgggatgactgagctgggcttacacagcgggggattggggcagagggagtgggatgagtgagctgggcttacacagagggggattggagcagagggagcaggatgagtgaggtgggcttacacagggggagattggagcagagggagcgggatgagtgtggtgggcttacacgggggggattggggcagagggagtgggatgactgagctgggcttacacagcgggggattgggcagagggagtgggatgagtgagctgggcttacacggggggattggggcagcaggagtgggatgagtgagctgggcttacacggggggattggggcagagggagcgggatgagtgaggtgggcttacacagcggggcaggaggcaggttctttgggtttccgagctctgtgagcatcagaatgtcctgaggaagctgatttcagtgcaggctctggggccggccatgccctccctggagcctcagtctgtgagtcttccctgggacctgtttccccaagtggtgccgaggcaaatggccggatgacgacatttcaagggtgttattggccatctgaaggatctgggactttccctttttttttttttttttttgagacggagtcttgctctgtggcctaggctggaa

SEQ ID NO: 7851 - DNA, 1067 bp, Artificial sequence
  DNA replication origin
gcgtcctccgcgggccggggtggggcctccctgtctgcgcgcgccccctgccggcggcacccggccctgcggcttcagcgcgtcggtcccggctggagctgagcgtggctggagaacaaatccacagccaagtgtgcgtccggctcctccgggaagcagtcgtgagatggggattaaactccccagggttctattaggggaggtgactgtgtgagagaaaataaggaggcagccagaggagctgggagagccttcagacggccatgcaagtctgcacctgcgtgaaggaacgagggagggagcgccccagacccgccgtgtgccttcctacccctgccctcccacccctgccgcagccagccgctgcctggggctgccccgggaggcccggcctcagcgcacaccacgctcaggtgtgcagccttccaagggctgcagctgggcctcggagtgatgggaggtcccttcctcttcgtggccacctcaccagtgtcatggctaggaacgtgggctttcgtcaagaccgcctgggcataccccactcccgcctgggtgtaggatcgcgaacaactttctcacccttctcgagccttggttttctcttccgtatcatagacatcaaaagaatttgccacaaagagtggtcacaatgctaagtgcttggcatgcggtagagactcgatcatccttagctgttgttattcgtgtcagaggcgtgtgaaccagagcgactgcatcttgaatgggagctgggtaacatgaggccgaaacctactgggctgcattcccagatggtgaaggcattctaagtcacaggatgagataggaggttggcacaagatacaggtcataaagaccttgctgataaaacagggtgcagtaaagaaaccggctcaatcccaccaaaaccaagatggccatgagagtgacctctgggcgtcctcatggctacacgcccaccagcaccatgacagtttacaaatgccatggcaacatcaggaagttcccctacatggtctagcaaggggaggcatggataatccaccccttgtttagcatatcagcaa

SEQ ID NO: 7852 - DNA, 1008 bp, Artificial sequence
  DNA replication origin
gttaatttttgtatttttagtagagacctggtctcgccatgttggccaggctggtctcgaactcctgacctcaggtgatcctccctccttggcctcccacagtgctggggattacagccatgagccacggtgcccagccaacactgaaattttaaatgttactttaaacagaaatatggaaacacagaggtgagaaagaggtgtgcaaatcatggggtcctaaaaagtgccattcctggagccgctcagggtcactgcaggtgctagggaagcaagcctccttcaaccagagaggctccaattccctcttgtactcatttgaaaaccaagtggctaaaatgtccaaataaacacatttaggaaaaacgatttgctgggccctgtgagcgcctccctcccgcagctggagagctgtgtctccctggccgggagcggcctgcgaggtgttgggcttcctcccagtgtggcaggctctgggacagccctcctggggcacggagcggggcagactgtggggctcactcacttgtggtgggcagggccccaggagcccagaaggtggcagccggcctgctccaggttccagtcgaacatctccagcactttgtggcactcccctctgggccgcagacccagcccgaagagctgctccacctgggggtaagggtggcgccatggacacgcgggcccagggcaccgactagggtggggaagaggggagtcggagccagggggcgtggggctgggggcagcagaaccaggcttcagggtccctgagagccagagtgagcaggaggtggcggtaccttcagatactgggcagccctctgcacgctccagccgtggcactgcagggccgcctggcactcctctgtggtcaccccatgcaccatggcctgcagctgggcacacccacccctgtcagcaccactagggcccactgctccaggccccttgggccctgccccgcttcgcccacagccaggctgggtgctcaccatctggatc

SEQ ID NO: 7853 - DNA, 1287 bp, Artificial sequence
  DNA replication origin
gactagggtggggaagaggggagtcggagccagggggcgtggggctgggggcagcagaaccaggcttcagggtccctgagagccagagtgagcaggaggtggcggtaccttcagatactgggcagccctctgcacgctccagccgtggcactgcagggccgcctggcactcctctgtggtcaccccatgcaccatggcctgcagctgggcacacccacccctgtcagcaccactagggcccactgctccaggccccttgggccctgccccgcttcgcccacagccaggctgggtgctcaccatctggatcttgtctgctggccggcccgcctctggcccatcgccagggcagcccctctgtggcagccgagcagtggccctcgggggtggtggccgggcccctgggttgctgttgttggtggagaagttggccttggggtccaaggcagcctggggcatcggccgcacggtggccgtgggggcggcgggggctggggtgctgggtgggggcagcagcagaggcacaggcaggggggtaggctcctcggggctctgggcctcacgcaggaagcgctggtagcgctccaggtaggatggtcgctcgggcagcaagtaatagtgggtgctgctgaccttcttgccatcccggacgatgggcaggatgcagggaccagcccgcgggccaggggcctggatcacctggggggtggcgtacttggggtctgaggcaaagctctgggtggtgggcatggtcttcccaggtgagcttgagagccggggtggcagcggggagctgccaggtggtaccagggggctgggtgtcctcgagccttgaggggacaggggctcccgcggaggcacccggggaggggaagcaggtccaggccactggctggtctcctcctcgcccgggggggctggagacagctggacgtgtgggcgcgtgggccgaggggggatgggtacccgaggaggcacctggggcttgtcgtcaccccccgggctgggagagggggccggggagccggccggagcctgcagttgcctcatgcactcctgctgtagcgcctggaagatctctgcggtctgtgcggagctgggcggcttgcccccaccctggggcgggaggaacaggttgtcctccaggggagggggcggccgcgcctgctcaggcacaaaggcgtagttggtctggccctggctgggcccggcagggacccccgcgcccacgagggtgctgttgatggagcagatctcaaagtcatcctcatcctgggccacgtcgtc

SEQ ID NO: 7854 - DNA, 1144 bp, Artificial sequence
  DNA replication origin
ctctgcggtctgtgcggagctgggcggcttgcccccaccctggggcgggaggaacaggttgtcctccaggggagggggcggccgcgcctgctcaggcacaaaggcgtagttggtctggccctggctgggcccggcagggacccccgcgcccacgagggtgctgttgatggagcagatctcaaagtcatcctcatcctgggccacgtcgtcataggcgggcggggggggcagcgggcgtgcgtcccagtccaccacaggcgtggggtgcaggggccggggcagtgcccgcgtggggctctgaggcggggtctcgtccagcagggagcaggcgtccatggccagctgcgccagggagggcgcgcagggccgtagggccgggaccacgggctcctcaccgaagtcgatgagcgtgacctcagccccgctgcctcggctggccttggtgcccggcacccgcgccgagggcttcgccagccacagccctcggggcaggcctggcttccgcaggcccagcctcttgaagtcgctggacaaggggtcttggtcctcgctcacagggtcataggttggttctgtgatggaaagggagagcccaacaggaaggcagtcaggcagggtctgggacacgaggggaggtggcacgtgggagagaaagccaagtgtcccccagcaaccctccactcccaactccccccgaggtctgaggtcagccaccggcggccaggttctcagcgcacctccgaccactccatcaggagggcggaacctgctctgcccggcagccccatgtgggccggtgagccccgcctcgctccgtctaagctgcagcaagcaacactggctcctgcctgacgctgcctccaccagcacaagaccccggcggccctgctcctgcgccctggcgagttagtgagccctcatccccgcccctgtcacggcacaccattagtgcaggcacggagccgcctcctgccatcaggggctataaggactatccttggagaggacagtactcctgaccaacggccacaaagcccagacagcgcctgcaggtctgggaggcagcgaggccaaggcagaagccagggccacactcgtgctccagaagctcagacaggtctgggagggagtgaggccgaggcgg

SEQ ID NO: 7855 - DNA, 1663 bp, Artificial sequence
  DNA replication origin
ccaggttctcagcgcacctccgaccactccatcaggagggcggaacctgctctgcccggcagccccatgtgggccggtgagccccgcctcgctccgtctaagctgcagcaagcaacactggctcctgcctgacgctgcctccaccagcacaagaccccggcggccctgctcctgcgccctggcgagttagtgagccctcatccccgcccctgtcacggcacaccattagtgcaggcacggagccgcctcctgccatcaggggctataaggactatccttggagaggacagtactcctgaccaacggccacaaagcccagacagcgcctgcaggtctgggaggcagcgaggccaaggcagaagccagggccacactcgtgctccagaagctcagacaggtctgggagggagtgaggccgaggcggaagccagggccacactcgtgagcagaagcccaggctccggggggcgggctcgagggggggcaggcatgctaggccagggcagccgcggaagctcacagcacacacccacccacctcccctccggcccagccgcccaggctctgtaccttccaggagaggagtgagagagagggggcgggggcgggggccaaggcatcggaagcagccccacttactctgagtgaagaaggcaggctgaggtgggcgaggtggaggctcccctgcaagaaaggccatgcggacagggggagagagacggagcaggacagaggacaaaggagggagacggccggacgagagggcagagtgtagagagacgaagggagagaagtgaatgggggcgagtgaatgtacaagcccccagcaaacgggaggccgcaggcggcaggatgaggaacacggcggtccagtatgataggcagaggaccgggagatggaggaggccccaggcagagccggagccgtggggtggttttggcttgggacaggagagcaggattagggggaagtgaggaaagccaggatctgagctcggccgtggaaggagggaggagggacgccggggcggacgggcctgctgcagacccagcccgaggaggcccacctcggcggatacagctgcctgtcttccaccccacgcccagccggagccagggacacagctgtcccgcctgctgccctgaccccactgtccccaaaaacagaacagcagccttagggtggcctgtgaagacagtgccccttcctgagtagccgatgagttagggacaccagggagcagaggggctcttacttttcacccctcctagatgctgggggggccgggaggtgctcagttccacgctcaggaggtcgggggggtccatggggtttcccagatacagtctgtgggggagagagctgggtcaagagagcaggggaagcgtgtggaggggtggcagaatctcatcagagccccttcgtcctggaggaaaccgggtgtagtcttgggtctgaagcacaggcctcccgcctcccagtccacagaacctgaccgcacgtctcagctggggggtgtcctggagagaaggcagagaaaggacacctgaccccaggatggaaagcctaggacctcagggactccaactacaccctacaagggcagaggtggtcctccacaaccccccaggcccccagcccacaccaggcagcggccagagg

SEQ ID NO: 7856 - DNA, 1937 bp, Artificial sequence
  DNA replication origin
ttacttttcacccctcctagatgctgggggggccgggaggtgctcagttccacgctcaggaggtcgggggggtccatggggtttcccagatacagtctgtgggggagagagctgggtcaagagagcaggggaagcgtgtggaggggtggcagaatctcatcagagccccttcgtcctggaggaaaccgggtgtagtcttgggtctgaagcacaggcctcccgcctcccagtccacagaacctgaccgcacgtctcagctggggggtgtcctggagagaaggcagagaaaggacacctgaccccaggatggaaagcctaggacctcagggactccaactacaccctacaagggcagaggtggtcctccacaaccccccaggcccccagcccacaccaggcagcggccagagggcagacactcctgtcccgcaggccacgatggagggcctaagaacggggcatcccagctatggtgcccagccagggtgggcaggaggcacccttctgccacatggccaggaggtgcgggagaggctgggccacctgtcctgctccggatccaccctccgtccctgcaccaactgtcagtatctgagacttagtcactggggctgattaaagcctggaggaatggggctgggctggccacagcatgccaggagtggggcagagggcaccagcctctcctggaggtgtctgcagtctttcaccccaactctcaggcccttgctgggttctttttaggcaaaacacatgggctgagccctgtgagcttggggttccagtgtgtgtgggcccgctgtgtgggttctggtgtgtgggggcccgctgtgtgggttctggtgtggggggactcgctgtgtggggttctggtgtgtgggggcccgctgtgtgggttctggtgtgtgggggcccgctgtgtggggttctggtgtgtggggcccggtgggtgaaggcccctgctttccacgcctctcagggcagaccagagtatcagaagtcagcaggagaagggctgcagaggccaggggcctggaatccccctgcggccagcagagaggcttggaggcctggcgcaagaagcttcggggggtggggggtggcatcccggaagtgactgattctgcgtgtccttcccagatgcccctcggtggccttatcctcttacataggagacagggcctctcccaggtatggagtgagctccgtagagtactgtgtggtggggaggcggagctgccacctaacgttccctctgcagtccccaaggtccccagtcccactctggttctggaaagcaggctcactcccatgtggacctgcatacatccccagggcctgagccagcaggttcacgtctccaggactctggcaccaccagcaggagaaggaaaaccactgctcgtgtgcaggggtcacagggtcacagggtcacagggggccacaggggggtcatgggagaagctctcctcctcagcagctcccaccgggttcctcccaagttcattttcctaaggcccgagtaccaagaggggttacagctgtggctccggggacctttccaccaaacaggagtccatcctcagaagctcctgaccctactttcatctacagtgagtgggaaagcttctctcaggacccctgcatctgagcagcaagtgctaattcagagtgcatttacagccttccccttattgggggggtgaacctgtttcacagatgaagtgtctcagagttaggagatcggccccccaaagcttgaaaatggcagggacagcattcccctggagaacgctccccggagaaccctcccctggagaaccctcccctggagaacattcccctggagaaccctcccctggagaaccctcccctggagaaccctcccctggagaacattcccctggagaaccctcccctggagaaccctcccctgg

SEQ ID NO: 7857 - DNA, 2058 bp, Artificial sequence
  DNA replication origin
accctcccctggagaacactcccctggagaacattcccctggagaacccccaccaggctgggcttcctagggttccacagcttcccgagagtaaggccagggtgaggaggggagagtggcgggtcgggggctgaagcccgggcgaaagggtgaagagcagattccgcccacgcgtgccgtgctgagggccctggagtcccgagcggggccaggtcagcatccatccccgcccagtactcactcgtcaatcctgtccgggaagccccagcagtggcgggggtcactgtcgccatgccctgtgtggatgaagctgttctgcaggggctggctgatgtcctgggccgacaggccggccacggaggtcaccacgttgcgagggaagggccccacacacagcgtccgtgtgttctggccacgccaccagtagttctcggccctgcgcgacagagatggcacggtgaacgccaggcgtggcggggcagccccggcactgggaccctcctcacaccctggccactgtggcagaagggggatggagctcaggcctcaggaccaggctgtgtgccaccggccctcctccccaacagcccccgtgacccaccatgccccgtacaggcctgtttgcacacggccttacccacaactctctaggtgggtcaggcagctttccctatggtttgcaaataaggaggcacgctggaagctgctgcagcaggcaacatgacctgtccacggttaccagaaagatcccagcagacctgggacccaacgccagctttcaggtctgtggggccagcgccccgcccacacctcctcctcacccctcagttccctggcaaggccggggccccagtcctcttctggccacttgatttcactcctcggctgggttccaggagttctgagaggtgcgggggtgccgggggacacctagggccttgcactaggctgggggccaggcctccagctacaacctgcctcccgaatgcagacgcgggagagtctaggagcactcgggcaactcagtccctccctccaccgcttcacctgcttccggagctttccaccacctcccggaaggcctgcgggagcctccccgtctcctcaggaggggctctacctgtgtccaaaagggaactcagctctcccacagtgaccagacagtagggctgccagtccccctctgacctcagacacgaaacctctgctgatgtggcctaagccggggcctgggcaggggcaggggcaggggcaggggcaggcaggccaggaagcacagggctcccgcaagacactcctgactcccgaaggctctcacaggttgtgaggctcccgcgtctgctgctggacttgtcatacgtgatgccgtgagcagagtctgggcaggcgggggcggtgagagccccgtgggcagtgtctgggcaggcgggggcggtgagagccccgtgggcagtgtctgggcaggcgggggcggtgacagccccgtgggcagagtctgggcacgcgggggcggtgacagcccagagctgctagggtggacacgtgtggcaccacactgcacgccctccccaccaacccccacttctcctgtcccagggccaaagcgtgaagaagggctcctctgaaacccagccaggccggggagagaggacggaggaggtggcgacgcctgggcacccagacccacagccttgtaaggtgacgaggcctggctggagcggggtgactccggaacagcccatcccagagaccaaagtcaaacccgagagcaccacggtcggcggggaggcggggggcgcggggcgcggggagacggggctgtgctccccctgcccagcctcctcatacacagggccactggcctggccccaccacacacagccaccctgtgattcccaccctgcctgcagggagggaaggaaggagagaggacagtaccccgagacgagacgagtcccatctgaaaaatagcagggccactcgaaggagcagagccccggctccccagcacgcacacagcctcccacggcggcccgtagaggaggaaccccggcaccg

SEQ ID NO: 7858 - DNA, 1425 bp, Artificial sequence
  DNA replication origin
tgcaggtttggagctgaggggccagggatgggattgcaagcgtggcgctccggggagcattctggaaataggaagattaagggtgggggggtcccctggaagtacctggcagggcctccagcccgaagtccagcctcatgaccgtgtccacctccacgagctggaaagccgtgggcctggcccctcttgtgctgctgccggagccccagatctttaccacctgcttcccttgctctcagcaggagcctgtgtgcctgccagtgtccccaggggtgactcagagtggcctgtgtttggggcgtgtgtctctggagctggtgttttaggtcaccgcccgggcaaggcgggcagtgggaggggccgggagcggctgctcctgggagggttgtgggtgtgccccgccccgcccttccgtcgaaggcccccgttggccccagccgctggttccctgtggctgctgctggtggggctctgggggctccttccccctgggccaccagccctggcttggaaccacagcacctgccctccgtgcctggagctgctcaggaggtgggaggtgaggggcaggaggccacaacagccggtgaggcttgggagcgggcctgggtgtcggtggtggcagagcttgactctgcccccttgtttcttcagtccctgaatatctccatgtttgtttggctgcctccgtctccatgtctccaggcggatggctctgtgtgagtctttgggcctgggtgtgcatctgtgggtctgtgtttggagttccctcctagcctggccttctcttcgccgtggcttcccacttgcgaagctgtgtccagtatttgtttcctggtgcggagtctgggaggccacctgccgcagctctgactgagtctaggctcagtccttctcagggtaccaggctgtgggcagaggggagacacctagatgtttcgtgctgtgtctagatttggagacacaaatgatgactggtctttcccaggggctcgtttggaggaaggggtggctggcagcacttttgttccgcatacagagcgggtgttggaatccattgcgggtccttggcctggtctggccctggagcctcggcttcctgtggtgggtgggagccaggcatccgggttatccctccaggcctgggcgcctgggacccctagggagaagagcgggcgggcgttttgaacagaatgtccggcattagttgagccatttctggactaccttcggcccggacgggaacgtggtgctgagatttccagagctggggcagccttaggcagttctcagcaccggcctctgttttccatcttgtctaccccagagatgttgaccagaggcccgggggcagcaggaggtagaaggttcatgcggaggtgttgggcccttttcctgctcccccaggaagtcctcatccgcccc

SEQ ID NO: 7859 - DNA, 2095 bp, Artificial sequence
  DNA replication origin
gcctccccccacttcccgtgcctcccaccacgccccgtgtctcctctcacgccccgtatctgtatggcctcagggagagcccagcaaagagacggggagggaaaagctggggcctgccctccttctctagcccttgccacatccacttgttccgaggctccagacctgggaagaagggactggggctctggagagggcccctcccaggcaggcagatcccttctttggaggccaggcatggcagcagccgctgcagctgtggatgggctggagggaaggcgggaagtgaagggctgggcgctctgtttgtcgtcaaactctgcacctcctcaccttcagatcctgcataagatcgacaaggagggggagcggctgccccggcccgaggactgtccccaggacatctacaacgtcatggtccagtgctgggctcacaagccagaggacagacccacgtttgtggccctgcgggacttcctgctggaggtgagggacaggtcagcccaggagagctggggtgttcaagctgaggggctacccaggcgtcagtcccagagttggccacgaccttcctcttcctccaggcccagcccacagacatgcgggcccttcaggactttgaggaaccggacaagctgcacatccagatgaatgatgtcatcaccgtcatcgagggaaggtagggagtgcagggctgggccccgccctgggatcgcttgaagggcacaggtcggagggacctgtggacagatctgtttggcctccaagattcccttggccacatacaggctggcggttgggcctgaaccctgcagtgtgaggggaggacaggcctgcctccgtcttcctagtgcctttccctgcccagcttccctccaccaccctttcccactgggctgcagccctggctgtgtggttgggccaggctgcctttatggaggggtagggagtggcctggcctcggtggcagcagagttctggactcccgtgcttcctcctctgctcctccccgcttctctccctgcttcttcctggcacagggactcagccatccacctgggtgcgtttcagtagctgaagcagcccagcctgccctcttgcagctttccatccttcctgctgagcccaccaccccctcccaggcctgcctccagcctctggtcctctcttcccatctccccttgggaggaccctctctatacctaaccctcctcccacagcctctcgggagtccctgtcttccacctgagcccccgcagttctagcgcctgccctgaggccccaccactgctggccctgccttgtgctggctgatccccagggtgtctgagcaactggctggggcagggcaggtttcaggtacctttgaggcaggggcagtattgaggaccaggaagaagagtgaagtggaggaaatcccctgtgctcgcagctcctgactcaggccaggcaaggatggggctagggctgcttcccagggagcctcttccacctgcactgcagcttttggagtctgcggccttcggtgcaatcctgtgcctcttgggggtgggtggaggagacctggggggctgtgtggagtgtgacctgcaccgctgtggccccgacaccccgagccttcccaggcccggctccctcacccttgggcccagggtctgggaataggaatgacatactgagactgcagggcctgtggttaggggtgttatgctggggaagaatgcagaaggttctagaaagagaggcctggggacaggaggcaaacagtctgcaggtttggagctgaggggccagggatgggattgcaagcgtggcgctccggggagcattctggaaataggaagattaagggtgggggggtcccctggaagtacctggcagggcctccagcccgaagtccagcctcatgaccgtgtccacctccacgagctggaaagccgtgggcctggcccctcttgtgctgctgccggagccccagatctttaccacctgcttcccttgctctcagcaggagcctgtgtgcctgccagtgtccccaggggtgactcagagtggcctgtgtttggggcgtgtgtctctggagctggtgttttag

SEQ ID NO: 7860 - DNA, 1914 bp, Artificial sequence
  DNA replication origin
ggctgatgcgagcactacctcagaatgacgaccattacgtcatgcaggaacatcgcaaggtgcccttcgcctggtgaggggcaggtgctgccagctcacagagtccctgcagacccaggcctcaaagcttctggggctttctggacccaccacagcccctggttttgcttgggcctgcccttgtctgttctaagcctggggtgccctcctttgcacccattcgctcaccatccatctaggaattcttgagggcccacgtgccagggtctgggtgctggaaatcacagggatacatgctgtgggactctccaaggggctttgctgggtggggtgatacggggatagatgctgtgtcctctccaaggggcattgttgggggtcgtgtttcagggatagatcctgtgtcctctccaaggggcattgctggcgggggggtgttatagggataaatgctgtgtcctctccaaagggcgttgctggggggggggtgttacaaggatagatgctgtgtcctcttcaaggggcatcgctgggggggtgttacagggatagatgctgtgtcctcttcaaggggcattgctggggggggtgttacagggatagatgccgtgtcctctccaaggggcgttgctggggggggtgttagagggacagatcctgtgtcctctccaaggggcatcgctgggggcgggtgttacagggatagatgctgtgtcctctccaaggggcactgctgggggggtgttacagggatagatgctgtgtcctctccaaggggcactgctgggggggtgttagagggacagatcctgtgtcctcttcaaggggcattgctggcgggtggtgttagagggatagacactgtgtcctctccaaggggcatcgctgggggcgggtgttacagggatagacgctgtgtcctctccaaggggcattgctgggggggtgttacagggatagatgctgtgtcctctccaaggggcactgctgggggggtgttacagggatagatgctgtgtcctctccaaggggcactgctgggggggtgttagagggacagatcctgtgtcctcttcaaggggcattgctggcgggtggtgttagagggatagacactgtgtcctctccaaggggcatcgctgggggcgggtgttacagggatagacgctgtgtcctctccaaggggcattgctgggggggtgttacagggatagatgctgtgtcctctccaaggggcattgctggggggcgggtgttacagggttagatgctgtgtcctctccaaggggcattgctggggggggtgttacagggatagatgctgtgtcctctccaaggggcattgctggggggggtgttacagggatagatgctgtgtcctctccaaggggcattgctgggggggtgttacagggatagatgctgtgtcctctccgagggtcattgctgagttaggtgatacagggatatatgctgtgtcctcttcaaggggcattgctgggggggtgttacagggatagatgctgtgtcctctccgaggggcattgctggggggcgggtgttacagggttagatgctgtgtcctctccaaggggcattgctgggggggggggtgttacagggatagatgctgtgtcctctccgagggtcactgctgagttaggtgatacagggatatatgctgtgtcctcttcaaggggcattgctgggggggtgttacagggatagatgctgtgtcctctccaaggggcatttctgtggggaggtattcaaaggtttcctaaaacatcagggaagttcgccagggaaagactcgttggtaagcatgttctagggagagctagtggtagacaggcccaggccacagcaggccttgtagatgggccagggctgcttacctgtgcactaggggtg

SEQ ID NO: 7861 - DNA, 1550 bp, Artificial sequence
  DNA replication origin
tgtctgtctccgccagatacggacacgtgagcagcctgtgtgcggtgaggccttcacagcccctctcggcacgcctggaacaggacctcattgacaagtgtgccttaacttagccctgctgtgtctgagcgttggggccagtgtccagcgtggggtggtggacctgtctggacccagaacgtctttgcttggcttccctcctccctgaccctctctaatctctgggtttctctggtcatctgtccctgctgacagcttccttccccacagcctgtccccacctctccccacaccttgtcctaatttgggtctgtggtgtagtgagtccctggtctgactcagtggaactttgcccattgtctggaagacaatgagagaggaagtgagccagccgtggtctttcctccccacttctggcttcagggctgggttggggggtgggcagggccgaacagctgcagtgggattgggcagcagagattttcctggctgcaatccggcaaaggggctgtctcttgggatcctttggcttttcctggaaacactgtcctggtcctttgcccgggttttagggaaggatgagtagtgtcgggatggtggaggcaggagaagagagcagcgtggtttgctgagatttaggggtcttggatctgccactggctcctgataggtccctgggcggtcagtggcctccagatttttgttgtgtcttcagtgaaatgataccggtccccactgcccagctcacctcccggggctgcaggaggcaccggagataatggctgtagagggtcttgtaacctgaacattgcttgcaaacataaggaattctagttactgggaggaagcacagggcagaggccagaagaggccctcagatttgaggcaccctagcccagacggataaggatccaccagctctgggggcgtgagacccaagctggcaagaatctgcaatctggagccaaggctgtgggtgcctcagtggaggccgagtcagaccgacgtggccagctttgaccctcatggcctcctttcttctgtcccttgaccttcggctcctccctgtccaccctggcctccgagtctcctccacttttccttccgtctcagccctcagctctaggcgcccctccagagacccagctgtcttcccaggccccttcccagcaaggactagcttcatctgaaccacacacacactcacggttcaacctcagactaaaattatcctctcccctgggcaggatgaagggcagccgactccctggtgagggtggagacagacagcaccaaatggtcaggccagagaaggggccagggctaaaaatggacaaggaggtgtctgtggagggcccctgcggctccatcgatgcgggttagggctggagtctgcggggtggcgggtgcaggaagggagggtggggcaggactgggaggagactccgaccttggctgggcggtgccctccctctccacacagctgggtgtggggccgctcagccacaggctgcatgcctgtcggtctctttctggcaccctccttgagg

SEQ ID NO: 7862 - DNA, 1097 bp, Artificial sequence
  DNA replication origin
tcctgccgccctcttggcagtgattcagaaaggtcctttttcagccagtgtcagagctgctcagctggggagggagggagagagggagagagagaggcaggcaagagggagggcggccgggcgggcagttgggtggggaagccggggagtagggctggactgtgaccactgccctggagagaagacagaaacaggacagaggatcccggctgcagccagcgtgaggaaagctctgctccctgccagaccggccagctgtggaaacccagcggggcttgcagcagagcggaggggcccaccccgttcttcctcatttcccacccctggtgtgggatttggggggctcctgggcagagtgcgaagctccggagccgaggccactggatccccagtgactgctcgggggggtcccgctgcgtggagatgccggcagcacgtcggttccctggcctggagctctccttccctctcctggccagactgcggcgacgcctgtacacagtgagtggggggcaggggctggactgctggggactggttgggctcctcagcaccagcacttgactgagaggcagaaagcaagactgggagcggctgagggaccccgccagtgagggcttgacggggagtccgggccaagtggcctctcctgcggctgctgcattccttcttcttggcctgtgtgtttgcacgccggccacagagtagtgacggacacaggtgtgcagactccatgaggtgcgggggccaggaccatgcagaattggagagtgtttgaactctggaggagctgcagccatgccctgtgctgcacaaagaaccttgggctggagggggacttagaggggaggcggacccctgcggagtcaccctggactgagaccctgaccgcttgcctcaccagcatcccggagttccttcccgtcctcccacatgcatcccctgtgcagagctgcgctgttgctgggtcagggagcatggagtgcacagctgaacagaggtgcattagctggtgtttcagggagagggaacaggccgggctgtgctttctgaagagcttcaggggaggggcctctgggtctcccccagccctgacc

SEQ ID NO: 7863 - DNA, 956 bp, Artificial sequence
  DNA replication origin
gtctgctcctgggccaggggacagagagcggtgtgtttatgtgggtgtggcggtggtgacttagtgatgctggcatctgcctgtgtgtgcatggatcccctgggaccccaaaaagctgcccgttgggctttcttccatgccccaagggagtccaggaagtactgctaggattggggttcagtcttttaggagaactgagtctgtatgtcctgggcattcccgtttactaggcttctgaatatgaatatcaagccagatgtccttgtttgcttttgaaaatatggtcacggtgttgatggatggggtagcttcccttccccttggagagaacgcacttcctctcccgaccggcagagggcagtagctgacaggagaaagggggactcggtaggagcgttggggcttaaggtcgggctgttttcctgggcgaggagaaagggggccgggccgggccgggcgcggtggctcacgcctgtcatctcagcactttgggaggccgaggcgggcagatcacctgagacgaggacgctgaggtcaggaattcgggaccagcctggccaacatggcggaaaaaaaaaaaatagctgggcacggtggcgggggcctgtaatcccagctactcgggaggctgaggcaggagaatcacttgaacccgggatcgcgccactgcactcaagcctgggcgatagagcaagactctcaaaaaaaaaaagggggtgggggttccaggagccggcctggcgctgacccacacatactttgcttcttcccgcagctggattactgggccagttacaggtcttgttcttactggacatccaaggtcaggcatggggttctggtgactttgagacacatatttctggggacgctagagtttttaatctggccattctgatccagcagacccattttgaaatagagggaataaccctgcttaaattgttccccggccc

SEQ ID NO: 7864 - DNA, 1099 bp, Artificial sequence
  DNA replication origin
gcctcggaggagggggtctcagatggagtcggacggaggcccctctgctgtgggcttctcggatggccccttaccgtgaatacgggggactcgtgaatccccaaggccccagttggtggctctggggccctggaggcgggctgagggctgagtggagcccggttccgcggccggcgaaggcagagccccggctctcggtgggggtcagcccggggctggcacagctggctcactgggagagggtgggagccgcgccccggagaggaggaacggagctgggacgggctgcaggagggaatggccgcaggccggcaggaggaggggcgcgaccacccggccgccggccgatggcggatgaggctatgggggctgagacgcagtagcggccctgcacttctggaggatgctcgaggcccggccccccaggacgcagggcagtgacgctgccggtgccgctgcggggcgggggctgcgggcgctgcttctctccctgaccgcagccgctgggatttggggctccatgggggagagatctgcttaccagcgcctggctgggggcgaggagggaccgcaggtaatggggaaggctaggggatagccagatacctgggccccagaccccttcgtctgctgtgagccgggctcagccctgccccctgcggcggcctcaggagtgagagtgtctgctcctgggccaggggacagagagcggtgtgtttatgtgggtgtggcggtggtgacttagtgatgctggcatctgcctgtgtgtgcatggatcccctgggaccccaaaaagctgcccgttgggctttcttccatgccccaagggagtccaggaagtactgctaggattggggttcagtcttttaggagaactgagtctgtatgtcctgggcattcccgtttactaggcttctgaatatgaatatcaagccagatgtccttgtttgcttttgaaaatatggtcacggtgttgatggatggggtagcttcccttccccttggagagaacgcacttcctctcccgaccggcagagggcagtagctgacaggagaaagggggactcggtaggagcgttggggcttaaggtcgggctgt

SEQ ID NO: 7865 - DNA, 1980 bp, Artificial sequence
  DNA replication origin
tagtgttggcttgtgatgttttcagcgggatacaggagcgcagaagcagagtttaaggggtgatgctgagcccagtttggatatgcaatgtgtggtacctgtgcagcctcctggtggagctgccctgtaaatgtctggaaatgcgggtctggagccacaggaattcaggaatggagatagcacaaggtggtaataggagtccctggaggcataggtgaccccagggagcacagcatcagtggagaatagaaggaaacatgagttcaaaagtcttaggaaataccaacagttaagaagctgggggcggggggtggggggggggtgggggggtgagggggtgggcaggcgcagtggctcatgcctgtaatcccagcactttgagagagcaaggctggtagaatgcttgagcccaggagtttgagaccaacctgggcaacatgacgaaacctcatctctacaaaaaatacaaaaattagctgggtgtgatagtgcacgcctgtaatcccagctactcaggagatggaggcaggaggattgcttgagcctgcgaggcagaggttgcagtgagccaagatcgcaccactgcactccagtctagggcacagtgagatcctatctcaaacaaacaaacaaaaaacatgtggggtgaagaggcttcagggctggaccatgggcctagcactgccagcagacacagccttgcctgccctcaggacctcagctgccaggcccccctgggagggagtgggcccccgtgtcctggagatggagagactatggacagtcatggcgtgtgtctgaatcactcccttttctttcttgggccctggccagcctcctccccagaccagtgtgatgtcaggcccagccgacctgaaggtgcagggttgcctggtgcaggttcctctgggatgaggttctgagggcacccagcctggccttgctccagaagcctgggctctgcgcacagaggggtgagttaaggctgactaaacttggtggggctgacatgtggaagcaagataatcctctggctgggggaggagctgtaagcccccctctcctcatcagtatgttcttttttccttcagggcttggagaagaggtaggtggaggtgggagagggcgggctgggaggtagggttggcatatattcctgagaatacggtagattgttttggaaaaatcctcttggccggaaattgcctgtcatgtctgcgccttggtgtggatttgtcacttcgcatgcagttggagaggctggagaggggaatggacagcagagctgggctggtttccagcctcttgtttcctttagctctgcagagtggagatataaagagacaagtgaagagcagagggggtgtacacgtggggtggattctcgaactcctagaggtagtttagatcctgtggatgtcttacgataggatggtactaggacgccagagatttacagggggaggtgaggcagggagaaagcaggaaagggcactggtttggatcagatcctttatccagccagggcaagaagggaggggcctggtattttctgccttgccttctacagtctcccggctttgcagctactcccaagactagtatgtgcctttagctgcagtaagatgccgaggagcttctgtacagcatagaagcaggcgttcgggggcctcgccggcagtcatccacctaccctggtgtgcttggggtgtggaaggggctgtgtgaggagagtgggccgtagagggagcctcacctagtgaccttccagggtctggctcagccttgacgctgcgtggggaggagaggtcacagcatctgtctctcctctgccccaacccagggaaggtgccctgagctcagccctaaatacctggtactaaagagtcagtggctgcttcagatgccaccagaatgagaagcggtgccttggggccccgggggagaggaagagcctctgccctgggacttcctgtgccg

SEQ ID NO: 7866 - DNA, 2076 bp, Artificial sequence
  DNA replication origin
tgcaggaggagggcggggtgggcccggggctgcaggagcgcggcggccgcggccacgagcccagccggggggtggtgtgggggccgccggacggcgcgggctgggggcgcccgccgtggtggacgggctcggcgggctggcctgtggcgcaggaggaggggctggggccccgcgggcagcaccaggagaagggcggaggcagccccgcagtgcaggagcgcggcgaggcccgggccggggtgcaggagcgcggggaggggagcccgcggaggctgctgcagcagcccgaaccggcgtccgagtccggggaaggcccccgcgagcgcagggaggggccggaaagttccggcgaactgggggagcggcagtgggagagcgtcgggcgggaggcggtggtcctgggagcggccccggcgccccgaagccgccccgagctggtggggagggcccggccggtggggccccgggggcctgcgggggaggggcgcctgggggtgcaagaggcgaattggctgcccggggtgcaggagggacaggtggtgcgggctgtccaggaaacctacctgaacgggaaggagccccaggagggagagggacccggcgaggggctcaggacccggaggcgccggcggaggaggaggtggtgactggcaggcccgggccccacggtacctccggggctgaaggggacgcaggatgtaggggcatggggagtcgggcgcagaagagtgcggggaaccgctgagctctgggagccactgcctgagggcaggccgcggccggcgggaacctcttctgccgtctcagcctgggcgtcgctgaagctgtgtctgcggggaggcagcggaaggcggcaggtaaggaagcccagtcctgttagctggagttggtgtgcttggaagtgagaggctgcaggtccctggcgagagcgtagactccacactgccctcgttcttttggcctttcatccctggagggaggaagcagtgcagttttcagcggcaaggcaggacctctcccccgccagtactgtgtatggtaattggagtgatagggcatcttcttagagtctaggcagcaggcgggacgtctgggtggctgccaggtctgtgcagagggaagagaggggtagccccagggaggagctgcaggacggtcccccctccacctgccccccgatggcagtaggggtgcctccatgctatatgctctgcatggtgcagtcaacacacaagtcctcaaaacacgtcccacagaagggaagagggcagcgtgggattaacagaaccttatcttgtaaccctgttggtcacgtgagctgagatgagtgtgacagctagtggcttgggtacggcacgagcctggcccgcttctgccacgccgtcctgtcacagctgatttaccctgagggcccagagccaaggatgattagtgggcggaaggagggagagcaactggtgagccctctcgtctctgggtgggacgacccagcgttagaggggcgggagaggagggtgcacttgcaccccagggctctgggctgcctctgtggccccaccctggggaggtttgcagatgggccgctgtggtatcatgggctctgcacctgtcaggacaggagctcccagcccagtctagaggtagggcttgtaggggccaagggtgggggctgtatttggcttgttgactccctcgtggcctgagtgccagacctactcattccgcctcgtgcccccagggggcttggcgggctgcttgtgggccttactctcctagagctgttcgcctcttacctggcactgtcaggtgcttgcttcccctgcccctgggtggggatgggtgcagggttgctgcttgcccagggccttagctagaggaccctcctctgccccagcccgaggtgtggctgtgagtcagatggacccagacccctgtcccgaaccagactgggtgctctcctctgggggcagagggagtggtgctggaggtagcagctgctggaggagccggttagcccgctcctcagacaaactcaaacccgcctgtcagcttcatcccatgcctgtcgcgctgcca

SEQ ID NO: 7867 - DNA, 1361 bp, Artificial sequence
  DNA replication origin
ctcagcccgccgcgctcctcctgcgcgacccgccgggggcccccgaccggctcggcccagcgcactcgcttgccccccagaggccgcgcgctcccacccctccagatggtgctgccctcggcgcccgctcacaccgcccgcccgccccggccctcccctcccgccccgggccgcccccgagtcccgcgcccgcctccccgccctcgcctccgggcgtcaacgtcggcccgccgggcgcccgccccgcgccggcccccgcaggtgagcgcccgcccgccgtccctcctgccgagcgccccgagcccgcctgcgcctgcgcctgcgccgccccggggtggggggtgggggggagtcggcccgccctcttaaagggcccggcctcatcgctcctcccccggctcctcccccagcctccggggccctaccccgctctccccgactcccccgggcccggcctgcgccttcctgcggtgccgaggagcggtggcgccctgggtgaagaagtcccgccgagtcgaggggcgcaatggaggagcgccggaacaggtctctcattccgagtagctaccgttgcactgtgcgagtgtaaaagtcacttccacccggtctcagttgttccaacctcagttgaagtgaggaggttggactggaaggtttctggggtcactccagtgaggctggggttctagtcccaatctcaccgtggcaccccaaaggcccagaaacccggaccatcacctctctttccccggggccaacggagcactcctgaaggagggagggtttgtctcaggcctgacgattcctgatgaggacttgggcagaaacagccccaggcaagcggaccttcattcctgcacttgagccgtctcctccctgcccccaccccagaaggagaaaacccagcgctcggattcccagcggcggggcagcctgcaggccctgttcccagcccacagacccatgtcccagcccaaacggaggcagccctgggcagcgggcgcgtggagcccaagggctcagggccactcagcccttgttactgtccctcatctagaaaatggatgtaataacaaaacagttcacggtaggtggcaagatcagacacatcggaaactgtgtagggctggctctttctgcgctcacactgtccagcaatgggccccagggacttggccagagcgcagtagggcaatgagaaaggggtggcttctggaaacctacacgaggcccagtctgggtggatttgggtggcggtcccttgcctgcgaggtgggcagggcaactttctactaaattatctaacactgccagtaatggcagcccttccccagggagccaggaggctgggccaggaccac

SEQ ID NO: 7868 - DNA, 1560 bp, Artificial sequence
  DNA replication origin
cccaccgggtctccagcttcacggccctcaaactggaacttcagctccccaccgggtatccagctgcacggccctcagactggaacttcagctccccaccgggtatccagcggcacggccctcagactggaacatcagctccccgccgggtctccagctgcacggccctcaaactggaacttcagctccccaccgggtctccagcttcacggccctcaaactggaacttcagctccccaccgggtatccagctgcatggccctcagactggaacttcagctccccaccaggtctccagctgcacggccctcagactggaacatcagctccccgccgggtctccagctgcacggccctcaaactggaatagtttgaacccagtggggatctgatgttccagtttgagggctgtgcagctggagacccggcagggagctgatgttccggttgtagggctgtgcagctggagacccggggggaagctgatggtccagttgtagggccgtgctgctggagacccaagggtggagctgatgttccagtttgagggccgtgcagttgatgacccggcggggagctgatgtccaagtttgaggtctgtgcagctggagacccgcgggggagctgatgttccagtttgatggccatgcagctggagactctgatgggagctgatgttgcaatttgagggccatgcagctggagacctggcggggaggtgatgttccagtttgagggccatgcagctggtgacctggcagggagctgatgttccagtttgaggcccgtgctcctggagacctagcggggagctgatgttccaatttgagggccgtgcacctggagacctggcggggagctgatgttccagtttgagggctgtgcagctggatacccagcagggagctgatgttgcagtttgagggccgtgcacctggagacccggcgggaagctgatgttccagtttgagggccgtgcagctggagacctggcggggaactgatgttccagtttgagggccgtgcatctggagacctgggcggggagctaatgttccagtttaaggccatgcagctgtatacccggtggggagttgatgttccagtttgagggccgtgcatctggagacccggtgaggagccagtgttgcagtttgagggccgtggagctggagacccggcggggagctgatgttccaggttgacgcggtgtagctggagacccggggggaactgatgttgcagtttgagggccgtgcatctggagacctggtggggagccagtgttgcaggttgaggaccgtgcagctggagaccctgtggggagctgatgttcctgtttgagagccgtgcagctggagaccctgtggggagcagatgttcctgtttgagagccgtgcagctggagacccggtggggagctgatgttgcaagttgagggctgtgcacctggagccccggggtggagctgatattccagtttgagggtcgtgcagctggcgatctggtggggagctgatgttccagtttgagggccatgcagctggggacccggcaggg

SEQ ID NO: 7869 - DNA, 770 bp, Artificial sequence
  DNA replication origin
atccccactgggttcaaactattccagtttgagggccgtgcagctggagacccggcggggagctgatgttccagtctgagggccgtgcagctggagacctggtggggagctgaagttccagtctgagggccatgcagctggatacccggtggggagctgaagttccagtttgagggccgtgaagctggagacccggtggggagctgaagttccagtttgagggccgtgcagctggagacccggcggggagctgatgttccagtctgagggccgtgccgctggatacccggtggggagctgaagttccagtctgagggccgtgcagctggatacccggtggggagctgaagttccagtttgagggccgtgaagctggagacccggtggggagctgaagttccagtttgagggccgtgaagctggagacccggtggggagctgatgttccagtttgagggccgcgcagctggagactcgggggtagccgatgttgcagtttgagggccgtgcagctggagacccgggtgggaaccaatgttccagtttgggagccatgcagctggaggcactgcggggagcagatgttccagtttgatgttcctccctgggtctccaggtgcacggccatcaaactggaacatcagctccccggccctcaaaccagaacatcagctccccgccggatctccacctgcacagccgtcaacatcagctcctccccgagtcctcagctgcacgaccctcaagttagaacatcagcttctccccaa

SEQ ID NO: 7870 - DNA, 1393 bp, Artificial sequence
  DNA replication origin
tggagaggagctgatgttctagattgagagtcgtgcagctgtacacctggagaggagccaatgttctagattgagactcgtgcagctgcacacttggagaggagctgatgttctagattgatggtcttgcagctgcagacctggagaggagctgatgttctagtttgaggatcttggagctgcagagccggagaggagctgatgttctactttgagggtcatgcagctggagacgtggagaggagctgatgttctagtttgagggtcatgcaggtgaagactcggtgaggagctgatgttctacatggagggtcttgcagctgcagaactgtaggagaactgatgttctagtttgagggtcttgcagctgcagacctggagaggagctgatgttctagtttgagggtcttgcagctgcaaacctggagaggagctgatgttctagattgagggtcatgcagctgaagactcggggaggagctgatgttctagattaagggtcatgcagctgaagactcagggaggagctgaggttctagtttgagggtcatgcagctgaagactcgggaggagctgagattctagtttgagggtcatgcagcagaaggctcagggaggagctgatgttctagattgagggccctacagctgcacacctgaagaggagttgatgttcgagattgagggtcgtgcagctgaatactcagagaggagctgatgttatagtttgagggccctacagctgaagacccggagagtatctgatcttcgagattgagggtcgtgcagctgaagactccaggaggagctaaggtggtaatttgagggtcttgcagctgctgacttggggaggagctgatgttctagtttgagggccctacagttggaaatctgtacaggagctgatgttctagtttgagggtcgtgcaggtgaagactcggggaggagctgatattctagtttgagggccgtgcagctagagatgcagacaggagctgatgttgtagtttgagggtcgtacagctgaagattcagggaggagctgctgatgtatttttagggtcatggagctgcagacccggagaggagctgatgttaaagattgagggtcatgcagctgaagactctgggaggagctgacgttctaatttgagttccctacaggtggacacccagagaggagcttatgttctagatgagggtcatacagcagaagactcggggaagagctgaggttgtagtttgagggtcgtgcagctggagaaccagacaggagctgatgttgtagattgagcgtcgtgcagctgaagactcggggaggagctgatgttgtttgttttgagggtctttcagctggagactcagggaggagctgacgttctagattgaggg

SEQ ID NO: 7871 - DNA, 1060 bp, Artificial sequence
  DNA replication origin
gaccagagcttcctgtggaacgtcttccagagctgccacctggcaccgccccggcacctcccgcctcccccgcagctgccccggacccgtgtcccgacccccgcggccaaccccgttccctgccggttgccccgcggcctcccccgtcacctgccgggtccccagcggcctcccccgtcccctgccccgacctccgccgtctccaccgcccctgcccggacccccgcgggcgcccccgaaccctaccccgaccgacgcggccgcccccatcccctgccccgacccccgcggccgcccccatccccttccgggtcccccgcggtctcccccgtccgctgcccggtctcctggggccgcccctgcctcctgcccggtccctgtcctgtgcgtcgggcgcttcccaaggtgcagagggcgccactgcatacccgaggtcgcggccaccggctcctgggccaggccccgtttctcgcctcgagccgtcgggggagggtctccagggtgcttgtttggggaaagcggaaacagactgtctgggccgctgttaaaatgtcagcagccaaggaagaagcagcgacctggcgtctgctcgggccaggtgacctttatggcggcgccttctgtccctggtcgcttttccactgaatgaatgaccgaaactgtagtaactcatggccagggaatggcttagttatctgagggaatcttgtcttgtctgtgaaaaagggaaactggtgcaaatgggaattcagacaggtcaggaggggaaggaagggaaggattgaggtgggaaaagagagagaaagatgattggcctcttaggggaagaacacacttggacgtggctcctggggcacttccttgattccgctgtactcgtcagcgggaccggagaggcggaggttccaggagggagccttccagagtcggtgcagggttgacaggagacgtttgttttgcttttcctgaactttcgatcgccagcttgtttggtcttcttgatgttatagggttgatagagaggagtggagtgatatcggacacccagcttcggcaagct

SEQ ID NO: 7872 - DNA, 1789 bp, Artificial sequence
  DNA replication origin
accagtaagaaagtaaatccttttgtaaactcagaggaagtattaatatgggcgtttgagcaaacatttaagtgttaggacaaataattaaaaactagcacaggcacccctgaagcatgataggatggcaacagaagggctgatttagtttccaagaaataactgacaggcaatgttgtgcgtgtgtctactacttaggaacccaaaacaaaccttcagaccgttttcatgagtactgagaccaagaaaaccactgggcagtgggtggtctggaaatgtaaatgttgatggtactccagtaaagagtcatggaacaatgcttcatattgaaaatgtttttgtaaatgtgggtttcaaggtttcaaagtgaacccatatgtgttaggagaaaagacacaccaaagaagtaaaataattgggtcaatataaaaagtagaatattgcccagagagaagatgtggataatttctaacacggatcaaaggcaccaaaaaggtgagctgtaagatattcagacctgcaccgtcccctgcagtagacacagacaacatcttggtaggcaactgggtgaaaattcagagacaaccctaggaactatgaggatgaaaaaagttagcattcatggaatgaggcactgaagaacctgaaaagctggaataaccccatgaaataatgagaataattgtagtatcctgaaccggggcacaggacacaggactagggtggaaggcggcatgagactacgcgcacaggaaagacccagggatcacagtggcccaaagctgggcacttcccaattctggggatttgtgctacaggcactccaggctccacggtagaactgtgtccagcacgaaggcagtgctgtcttgcgggaggcagggctgcaccaccacaggggcgggaaggggcccggcagggaggcgcccagtgtttccaactgcacggggtcgggggcggcgctgatgcagagcgcgggggcgcaggttaaacctaaaggggggaagcttttcggggcagaacagacaacggagaacgctgcacactgcccttcccacccgaattgtgttttgcccttttttttttttttgagacggagttttgctcttgttgcccaggcctggagtgcaatggcctgatctcggctcaccgcaacctccgcctcccgggttcaagcaattctcctgcctcagcgtcccgagtagctgggattacaggcgtgcgccaccacgcccggctaattttgtatttttagtagatactgggtttctccatattggccaggttggtctcgaactcctgacttcaggtgatccaccggcctcggcctcccaaagtgctgggattacacgcgtcagccaccgcacccggcctgcttgcttttttttttttttttttttttttttgcagagtctcgctgtccaccgggctggagctgcagtgatctcggctccctgcggcctcgacctcccgggctcaggcgatcctcccgcctcagcccacggagtacatgggaccacaggagcccaccacgcccgactacttgctgtaatttttgtagggatggggtctagccccgctgcccaggctggtccgcactgctgggctcaagagctccgcccgcctccgccccccaaagcgcagggatcccaggtgtgagctaccgcgccccgcccagagtttccgactgttagcgtgaatcacattcacgtcaaaacttctttttatacaagaactaaaaggcaaacgaaatccctgctccatcactgcctgtcccgggtcgcggcgc

SEQ ID NO: 7873 - DNA, 1057 bp, Artificial sequence
  DNA replication origin
cgggacggtccccagcgggtccgagcggagcgggcgccgggtccccgcgccccctgcccggggatcgggaaggggctgggagagccctgggccggtgcgagggggagccgcggagtgtactcgggggcctggggagctcggtccttagcaggtaggccgcgtcccggtgaaggtcgcgaccccgcgggcttgctgggcgtcccctccgccgctttggtccgggcctggggtccggcgacctcgcgggctgaggtagcccctcgcctctgcctggcgggtggactcggggaggagtcgtgtctgcccagggtcaccggggtggagtcctggctgggccgggcctctgccgccgtctgtgagggttgtcctgcggggccgcccgcagcccgtgggtggggccggcggggcgggtgaaaccgcccgggtgggtgcgaggagtggccgggctcggccgggtgggtgtccggtgggaagcgcggcgcgcccgagcttgggcttgcagttcccctttccagagagcgcaaatctgtgcatgtccacttcgggatcttggaagttaaggacctgtactttgggtcccgtttggtggcccttgtgccacaaaaatgtgccggtgtttaaaagcagctgtgccagtttttaaaaatcagacggagagctcagggcactgaccgagcgaggactccaggacctgtgcttgcctgtgcgctgagtacctcgagggccgggctcggcttagtccaggatgatggtcagggttatacttccctgagcccttgctctctgagtgtctgagtgtgccctctacgattgcatcttcagaatcggccttctaggattttatttaatcaagcgaaattggataggtttagttgtttggttcttttaaatgaacttagccacccacctcttaattacaaagtaattttaaattgcagagtaaaaatctcaataggaaccaaggcattcagcaatagtgatttgaattatgcctgtgattgtgcaattttctcctttttgaaatagttattgaaaatctctttgaattaaatgtgag

SEQ ID NO: 7874 - DNA, 1875 bp, Artificial sequence
  DNA replication origin
ctgggaggagctgacgttctaatttgaggtccctacaggtggacacccagagaggagcttatgttctagattgagggtcatgcagcagaagactcggggaagagctgaggttgtagtttgagggtcgtgcagctggagaaccagacaggagctgatgttgtagattgagtgtcgtgcagctgaagactcggggaggaactgatgttgttcgctttgagggtctttcagttggagactcaggaaggagctgatgttctagatttagggtcatggaactggagacctggagggaagctgatgttgtagtttgagggtcttgcagctgcagaactggagagaagctgatgtagtttcagggtcttgcagctgcagacccagagaagaactgatgttctagattgagggtcacgcagctgaagacttggggagaagctgatgttctaacttgagggtcgtgcagctgaggactcggggaggagctgatgttgacggctgtgcagctggagatccggcggggagctgatgttccggtttgagggccggggagctgatgttccagtttgatggccatgcagctggagactctgatgggagctgatgttgcaatttgagggccatgcagctggagacctcgtggggaggtgatgtcccagtttgagggccatgcagctggtgacctggcagggagctgatgttccagtttgaggtccgtgctcctggagacctggcggggagctgatgttccagtttgagggctgtgcatgtggagacctgggcagggagctgatgttccagtttaaggccatgcagctgtatacccggtggggagttgatgttccagtttgagggctgtgcatctggagacccggtggggagccagtgttgcaggttgagggccatggagctggagacccgggggggagctgaagttccaggttgacgcggtgtagctggagacccaggggggaaccgatgttgcagtttgagggccgtgcagctggagaccctgtggggagctgatgttcctgtttgagagccgtgcagctggagatctggtggggagctgatgttccagtgtgagggccgtgcagctggagacctggtggggagctgatgttccagtttgagggccgtgcaactggatacccggcagggagctgatgttccagtttgagggccgtggagctggagacccgggttggggggagctgatgttccaggttgagggctgtggagctggagacccgggttcgggggagctgatgttccaggttgagggccatgctgctggagacccagcggggagctgatgttgcagtttgaagtggtgcagctggagacccaggggggaactgatgttgcagtttgaagcggtgcagctggagacccagcggggaactgatgttgcaatttgagggccatgcagctggagaccctgtggggagctgatgttcctgtttgagggcctgggagctgatgttcctgtttgagggcctgggagctgatgttccagtttaagtccatgcagctggagaccctgtggggagccgatgttccagtttgagggccgtgcatctggagatctggtggggagctgatgttgcaggttgagggccgtggagctggagacctggttggggagctgatgttccagtttgagggccgtgaagctggagacccgggggggaactgatgttgcagtttgagggccatgcagctgggtacctggctgagagctgatgttgcagtttgagggctgtgcacctggagccccggggtggagctgatattccagtttgagggccgtgcagctggagacctgacgggagctgatgttccagtttgcaggccgtgcatctggagacccggcaggga

SEQ ID NO: 7875 - DNA, 814 bp, Artificial sequence
  DNA replication origin
ggggacttcgggtcctcgcccttgaaggccgcaggccctagtgcgccggctccgggctgcgggtccgggagcgcgggcgcagccaaggtgcagctgcgcggcgtgcggcgccgggggaacacgtggctgctccaggaagtcgccccagggaacggctgggattcgtgggtgaccttgggctcctaaaccttcggttccccgggctccgggcgggccccgttctcactgcggaaagggacaaagctgtccccgattcggttactagcgtgttacaggcattaattagatacgggtttctgtaaacttacccttcggctctggtacaacctgatcttgccatgctctgcctgttcgccttgtgtgtggattctgttttctcaaggcagaatccgactgaacgccgcaggtgttcacattaagaatattgctagcagttctcactacaagacgggagccataggagtgacttatttgtgaaagatacttggagattagcggtgtggtcagagggctgtgctggattgatgggcgccggagaggccgattgtgtcacattctgctggacagttcttttaaggttgggagggtgggtaagaaaatacattctgattcggctcttttcggataacgctttccctctgcttactgcttgtagagacctcacttacccgggggactggattctgcagctttttccattttcttccccgttgataagaggattaaagtaggaaattgtatttggctaccccatgcttatatgctaagcttactgtgaaaattaaggttaggctgtctagagtacttgtggacc

SEQ ID NO: 7876 - DNA, 1260 bp, Artificial sequence
  DNA replication origin
tgtactccagccagggtgacagagcaagacactgtcttaaaagtaaaaataataaaaataaataaaattaataattaaagaaataaagaaggaacaccacaggggagcaggcctggtgtctgaatgttaaggtaggccctctgtggatgtgcatccttaaccttttcctgattagatcattaaaggtgcagcaatgctcctgctcatatgacttttttttttttttgagatggaatcttgctctgtcgcccaggttggagtgcaatggcgcgatcttggctcactgcaacctccgcctcttgggttcaagcgattcttctgcctcagcctcctgagtagctgggattacaggcgcgtgccactatgcctggctaattttttttgaaatttttttagtagagatggggtttcaccatattggtcaggctggtctcgaactccagacctcgtgatccgctcacctcggcctcccaaagtgttaggattgcaggcgtgagccaccgcgcctggcaactcatatgacttttaaacacttctctttggggagagagattttagagaatgggagtaaagagaaaggcggtgagaatcccaagtactttctctatcttagagcagaagaaataaagggaagagtaaaagcccaaggcccagaaacggatttgcttcttaaagggctgttctgtgtccctacgggcctgaaggtcagtttatgtgcaatgctttttaaggtatgggttgctttcttgcattgtagctactacctccctggcctgctggttactgaccagagggagggagagggtgtgattgtttggaaagagtttaaacagtgacaagaattgaattttatttatttgttattcattgcacaatccaataacagcgatggcaatgaaaacgaaagttaatctacaatcctatcaccctattaagtcacttgtttctattttcccttttattccctcatgcattaaacattacgcaaagcactccgctagtcttggttaaagtgcagcttgtatacattctgaataaaaatttgcattttgcttttcttttcctttttgtatttctgaggctgcaaaatacatcttcacaagagtggctttaatagttacctaacattccatcctgcacgtacatttcaaggcactgccgcagtgcaatatccaacatttaagcgtcaacgccaacagattggacctagcactgcagggactggaggttggtcaaggtcaggcggaggctgccaggcta

SEQ ID NO: 7877 - DNA, 1976 bp, Artificial sequence
  DNA replication origin
aaatacaaaaaatagctgggcatggtggtgggtacctgtaatcccagctactcagtaggctgaggcaggagaatcacttgaacccaggaggcagaagttgcagtgagccaagatggcacttctgcactccagcctgggcgacacagtgagacatcatctcaaaaaaaaaaaaaaaaaaaaaaaaaaaaactttagctggctgagcggcacgcgcctgtagtcccagctactcaggaaggtgaagcaggaggatcccttgaatccaggagttcatgagctatgatcatcccacagcactccagcctccgtgacagagcaaaaccctgtcactaaaacaaaacaaaacaaacaaacaaaaacccatagagcacaaatttctctacagcacaaatttcaaccttaatatatgcaaatgttaaagcgggagtgggagggttcccaggatggaatgcaaactgttataaagaacctcaccatgctacaaacatgacctaacatccaaggggaaggaagggaagtgctgggtgttgaaggggatggaagggaagtgctgggcattgaaggggatggaagggaagtgctgggcgttgaaggggatggaagggaagtgctgggcgttgaaggggagggaagggaagtgctgggcgttgaaggggagggaagggaagtgctgggtgttgaaggggagggaagggaagtgctgggtgttgaaggggagggaagggaagtgctgggtgttgaaggggagggaagggaagtgctgggtattgaaggtgagggaagggaagtgctgggcgttgaaggggagggaagggaagtgctgggcgttgaaggggagggaagggaagtgctgggcgttgaaggggatggaagggaagtgctgggtgttgaaggggagggaagggaagtgctgggcattgaaggggagggaagggaagtgctgggtattgaaggggagggaagggaagtgctgggtattgaaggggagggaagggaagtgctgggtattgaaggggagggaaaggaagggaaatgctgggtattgaaggggagggaaaggaagtgctgggcattgaaggggatggaagggaagtgctgggtattgaagaggatggaagggaagtgctgggtattgaaggggagggaagggaagtgctgggtattgaaggggagggaagggaagtgctgggtattgaaggggagggaagggaagtgctgggcattgaaggggatggaagggaattgctgggcgttgaaggggatggaagggaagtactgggcgttgaaggggagggaaaggaagtgctgggcattgaaggggagggaagggaagtactgggtattgaaggggagggaagggaagtgctgggcattgaaggggatggaagggaagtgctgggcattgaaggggatggaaaggaagtgctgggcattgaaggggatggaagggaattgctgagcgttgaaggggatggaagggaagtgctgggcgttgaaggggagggaagggaagtgctgggcgttgaaggggagggaagggaagtgctgggcgttgaaggggagggaagggaagtgttgggcgttgaaggggatggaagggaagtgctgggcgttgaagggggtggaagggaagtgctgggcgttgggggtggaagggacgtgctgggcgttgaaggggatggaagggaagtgctgggcgttgaaggggatggaagggaagtgctgggcgttgaaggggatggaagggaagtgctgggcgttgaaggggatggaagggaagtgctgggtgttgaaggggatggaagggaagttctggatattgaaagagaaggaagggaagtgctgggtattgaaggggatggaagggaagcgctggtctaagtgactttggaaataagtgaagactataagactaaaaataaaaggaactgtacataagcactgaactctaacagcaaaattgtttcccatgggga

SEQ ID NO: 7878 - DNA, 1464 bp, Artificial sequence
  DNA replication origin
atgattatgccactgtgctccagcctgggcaatagaatgaaaaataaatttaaaactgtctctgaaaaataaattaaaaagtgagtcaattagcccagcccacattcaaggggacggttttacacaggaaataccaagaggcagggatcactgagcgtcatcttagaggctgcctcccacagcaggcgaatgaagtattagaacaccctcggtagcgagtgctgagagggccagacacggtggctcatgcctgtcgtcccagcactttgggaggccgaggcaggaggatcacctgaggctaggagttcacaaccagcctgggtaacatagtgagatcctgtctccccgtcgaaatttttttgattaaaaaaaaaaaaagcgctgagagaggaaatcccaggctgttgcaggcatatgagagaaaaacaccagcctctgcccgaggacgcatgagagaaaaacaccagcctctgcccgaggacgcatgagagaaaaacaccagcctctgcccgaggagaccaatgagggtttcccagaggaagcagctctgggttgagacttaacagatgagaagatatcccagggggccagggggtataagagcatcccagggaaagggaaagcaaaagacggaagtgtgggttcagggggcagcagcacgggcagagcctggggcagagggtgacaggaaggtgggggagagctagctccgggaggactcacctgctgtcctcaggtgttggtgctttatcttggaggcactgggaagccgtggccagggttaagggggtgagatgccaggactgtgctttagtgctctctgcagttactggctgggtagaggagaccgaggagcagaggtgggaggccggagaccagggaggaggctgtggcaggcatccaggtcaatgctggggggctggtctgggcaggagcagagggagagggaaagaggagataattgggaggtcgatgtgaacaatggggcttctacagtgccggcccagagggatgaagtagttcgtggggtaggcgaagggaggcagggagagggagggccaactgtgtgaatggagggagcggcccagggcagctcagcgaggcccgttggctgcacaggcaggtggtgagcgggcggggtcttgctccttgcggggtgcgaaagttggcagggttgggtggtaaccttgggaacctgagaagaaaggtcagggtggagatgtcagccgccattttggccccaggaggtccatccctatgcccggttgattgctctgctttgtgaacacaaccatggctcagccgcagacccaggattagaactctacaaaaagggcttcttggcttgttgtggtggctcaggcctgtaatcccaacactttgggaggccaaggcgggtggatcacctgaggtcaagagtttgagaccagcctatccaacatggtgaaaccccgtctctactaa

SEQ ID NO: 7879 - DNA, 1782 bp, Artificial sequence
  DNA replication origin
ataaactggggaagggttgaggccctgcctctcctgaactgggcaagggtcgaggacttccccatgggtccaggcctccagcattacatcaggaggtagcctggggaggacagagcactgaatccctctggcatcagctcctctggccagccctgcacctgctctgtggggctagggcctggggaggtgtcccaaaatagcccgcaggggcccgggagctctggccttcaaggtcagacactagcactgagaatcctggtgaggctgtcttcccagaccccgcctggcaggccggctgggcacggctgcggagaaagacagggcaggctccccaggcactggcccccgcggcaacctctcctgtctctaaaatcggatgtagattaagaacgctccatctggcaagaccaaatggaattcggcagaagcataaccaggacactgggttttggatctgtgactctccacacatgcagaggacaaaaatacaagagaaaggggtcaggagagaggcgtatgatggggggcgggggtgtgatgtgtgtgttgtgtgggtgttgtgtgtctttatgatatgtgtgtgtacacctgtgttgtgttgtgtgtgtattgtatgtgttctgtgtgtctgttgtggtgtgtgttgtgtgtgtgtgatgtgtctgttgtgtggtgtttgtattggtgttgtatggtgtgtggtgtgtgtgtgtctgtgtgtgatgtgtctgttgtgtagtgtgtatgtatggggtggtgtgtgatgtgtgtgtctgttgtgtggtgtgtgtatgatgtatgtccgttgtgtggtgtgtggtgtgtctgttgtgtagtgtgtgtatatggggtggtgtgtggggtgtgtgtggtgtacgtgtgtttgttgtgtggtgtgtctgttgcatgatatgtgtatggggtggttgtggtgtgtgtctgttgtttggtgtgtgtgtgtgtgtgtgtgtgtctggggggttgtgtgctatatgatgtggggaatggacattgactcagtgtgtggtgttgtctgttgtgtgttgtggtgtgtgtatctgttgcgtgttgtgtggtgtgtggtgcgtgtgtgtgtctggggggttgtgtgctatatgatgtggggaatggacattgactcagtgtgtggtgttgtctgttgtgtgttgtgtgtgtgtgtctggggggttgtgtgctatatgatgtggggacattgactcagtgtgtggtgttgtctgttgtgtgttgtgtgtgtatctgttgtgtgttgtgtggtgtgtggtgtgtgtgtgtgtctggggggttgtgtgctatatgatgtggggaatggacgttgactctgtgcgtgtggtgtgtgtgcctgttgtgtgttgtgtggtgtggtgtgtgtgtgtgtctggggggttgtgtgctatatgatgtggggaatggacagtgactcagtgtgtgtggtgtgtgtctgttgtgtgatgtgtgttgtgtggtgcgtgtgtgtgtctggggggttgtgtactatatggtgtggggaatggacattgactctgtgtggctggaaagtgatctttcaagagaggattaaccaaaggaaatgggaaattgaggtcaggatggataaggaaaacatggggcaaactgggtggtcagagaaagacgaggatggcctctaggctccaagagcaccccagataaaaggctggaataggggcaggagagaagccccccgtacagagggttattccagggcctgagggcatcccctccaccccagaggagtgaaggtgg

SEQ ID NO: 7880 - DNA, 855 bp, Artificial sequence
  DNA replication origin
tgaggcaggagaatcgcttgaacccaggaggccaagatcacaccactgcactccagcctgagtgacagagaaatactctgtctcaaaaaagaaaaaaaaagaaagaaagaagaaagaaagagagagagaaattgaacggtattaatagtagcgacatctagagcactcacttgtaccagctgctactctatgtcttaaactcacccatgctgcccattttacagttggggaaagtggacgcctaggtggctaagtaatatacccaggatctctctgctggtatgctgtggagctgtgatgtgaacatgtgtgaactggatccagagaccttgctatcaaccacaggcagagttgcagcccagggatggaggaggaagggaatgagatttggggcatgtgaagaaggcctgaggcaggtgctgcgggctgcgggaaggagccctgcctggtgaatcgcaggccacgttagggtccctggaggctggagatcctggatcaggagggcagcattctgggcaggggagggagggcaggaagaaccacaggatgtgagaagggcgaaggctgcccagaaaaggctgaaacgatgcactgaggctggggagggtccacatgcagaccagagcgggctgatgaggaagggcggagctggggagtcacaggtgggggagccaaatatgggtgtggtggagtgattgaagggtgactgggatgggaggtggtgggcagagagggcgcctgtgtccttccagctgtctgatacctgcagctcctccctcatcaatgctgcccatcagttttcctagaacagccagtgacctgctgaaggagtctcatggcgcggatgtccaccct

SEQ ID NO: 7881 - DNA, 1497 bp, Artificial sequence
  DNA replication origin
cccagctacctggaaggctgaggtggtaggaccgcttgaaccggggagggaggtcgaggctgcagtgagcggtgattgtgcctcaaaagaaaagaaaagaaaagaaaaaggaatctggcggggtcacggagcgggtgctaaaggtgcaccgcagatctggacgggcggggacagcggggtggagtcaggctttcaagggggtgggcgggatgagggtggagccaggggacggggcgggtgggcgggcgtccggggggcggggcggggctcggggcggagtcgggcctgaggggcggggccaggggcggggcggggctcggggcggagtcgggcctgaggggcgggcgtccgggggcggggcggggctcggggcggagtcgggcctgggggcggggccaggggcggggcggggctcggggcggagtcgggcctgaggggcgggcgtccgggggcggggcggggctcggggcggagtcgggcctggggggcggggccaggcgtgggggtcccgcagcccggttccttaacccgcgcagcatcgtggtggccgtgtccgccgcgggcctcctggtgccgctgtccctcctgctgctgatccaggcactgtccgtgagctcggccgaccgcacctacaagggcaaggtacgcggggccgcgggtggtcagcttgcacctcggggacctccgcgcttcccgcgctttctccactgcccttggccctgatagcctgacccccacccgcgatggtgcctcgttaggtccctccagacccagctcttaagaggctccaatctcgcctcctccgggagctcagtggtccctgtccttcctgggggcctactgtgtgctaggcggtttggattctttgagcgatgggaatagaggtgagtaaggctacattccacactcgtgttgatgaggaacctgaaatcagagtaacacccaccagatacccacgaacactcagagagggggccggtcctgagctgtgtggcgcagactcaggcattgagggttgagggaggaccacatggtagggtaggacgtgcagcttaggggttcgggagagacagaagacggagaggagggcattgcgggtgaggggacacctttgcaaaaactcagggaagcctgaaagtctgtggaatgttgataggatggagaggaaacaattctaactggggcaagaaggtggtgtgggcaaccaagtcgactgcttctgttggccacattaaaaaggtccaggctggggaatggcgtgaaccggagaggcggagcttgcagtgagcccagatcgtaccatgcactccagcctgggcagcagagcgagactctgcctccaaaaaaaaaaaaaaaaaaagaaaagaaaagaaaagaaaaagttccaagctgtgccccgtggctcatgcctgtaattctagcgctttgggaggctgaggcaggaggatcacttgagccccggagtttgagaccagcctgggcaacaaaacgagactt

SEQ ID NO: 7882 - DNA, 1403 bp, Artificial sequence
  DNA replication origin
gtgatgactcttaacgagcatgctgccttcaagcatctgtttaacaaagcacatcttgcaccgcccttaatccatttaaccctgagtggacacagcacatgtttcagagagcacagggttgggggtaaggtcacagatcaacaggatcccaaggcagaagaatttttcttagtacagaacaaaattgagtctcccatgtctacttctttctacacagacacagcaacaatctgatttttctatcttttccccacatttcccccttttctattcgacaaaaccgccatcgtcatcatggcccgttctcaatgagctgttgggtacacctcccagacggggtggtggccgggcagaggggctcctcacctcccagtaggggcggccgggcagaggcgcccctcacctcccggacggggtggctgccgggcggagacgctcctcacttcccagaccgggtcgcggccgggcagaggagctcctcacatcccaaacggggcggcggggcagtggcgctccccacatctcagacgatgggcggccgggcagagacgctcctcacttcctagacgggatggcggcggggaggaggcgctcctcacttcccagactgggcagccgggcagaggggctcctcacatcccagacgatgggcggccaggcagagacgctcctcacatcccagacggggtcgtggccgggcagaggcgctcctcacctccaagactgggtggcggtcgggcagagacactcctcagttcccagacggggtcgtggcctggcagaggcgctcctcacatcccagatggggcggcggggcagaggcgctccccacatctcagacgatgggcggccgggaagaggcgctcctcacttcccagactgggcggccgggcagaggggctcctcacatcccagacgatgggcggccaggcagagacgctcctcacttcccagacggggtggcggccgggcagaggctgcagtctcagcactttgggaggccaaggcaggcggctgggaggtggaggttgtagcgagccgagatcacgccactgcactccagcctgggcagcattgagcactgagtgaacgagactccgtctgcaatcccggcacctcgggaggccgaggctggcggatcactcgcggttaggagctggagaccagcccggccaacacagcaaaaccctgtctccaccaaaaaaatacgaaaaccagtcaggcgtggcggcgtgcgcctgcaatggcaggcactgggcaggctgaggcaggagaatcaggcagggaggttgcagtgagcagagatggcggcagtacagtccagcttccgctcggcatcagagggagaccatagaaagagagggagagggagaccgtggggagagggagaggggagaggggag

SEQ ID NO: 7883 - DNA, 993 bp, Artificial sequence
  DNA replication origin
cccatcgtctgagatgtggggagcgcctctgccccgccgccccatctgggatgtgaggagcgcctctgccaggccacgaccccgtctgggaactgaggagtgtctctgcccgaccgccacccagtcttggaggtgaggagcgcctctgcccggccacgaccccgtctgggatgtgaggagcgtctctgcctggccgcccatcgtctgggatgtgaggagcccctctgcccggctgcccagtctgggaagtgaggagcgcctcctccccgccgccatcccgtctaggaagtgaggagcgtctctgcccggccgcccatcgtctgagatgtggggagcgccactgccccgccgccccgtttgggatgtgaggagctcctctgcccggccgcgacccggtctgggaagtgaggagcgtctccgcccggcagccaccccgtccgggaggtgaggggcgcctctgcccggccgcccctactgggaggtgaggagcccctctgcccggccaccaccccgtctgggaggtgtacccaacagctcattgagaacgggccatgatgacgatggcggttttgtcgaatagaaaagggggaaatgtggggaaaagatagaaaaatcagattgttgctgtgtctgtgtagaaagaagtagacatgggagactcaattttgttctgtactaagaaaaattcttctgccttgggatcctgttgatctgtgaccttacccccaaccctgtgctctctgaaacatgtgctgtgtccactcagggttaaatggattaagggcggtgcaagatgtgctttgttaaacagatgcttgaaggcagcatgctcgttaagagtcatcaccactccctaatctcaagtacccagggacacaaacactgcagaaggccgcagggccctctgcctaggaaaaccagagacctttgttcacttgtttatctgctgaccttccgtccactattgtcctatgaccctgccaaatccccctc

SEQ ID NO: 7884 - DNA, 1490 bp, Artificial sequence
  DNA replication origin
atctttttgtcattagtaccacttaatccttctttttcatattttttattataaaatataaacaaattaagacaaatcataggccacatgtgtatcttcaacctggacctgcactgaacttcaacacattccaactcatgctccatatgaatgtttattaggcaactcaatacatccaataatgagcttctcatactcccctctcccccaaaacaaaatatatacttgttgttaattttgttctgcacgctttcacaaaataaaataaaataaaataaaataaaaaaatacggctgaatggcattctgggcattcagaaccttttaccaagataactgagggtatctttctctgtgttcattctacccaagggaaaaatcctgtatgaaatttgtatcactttttctgtgagttaccaagagaataaaaataaacaaagaaatttgtatcacattataatcaaaattcctgttttccatatttgccaagcaaatatggggtgtgtgtgtgtgtgtaaagttagtgatcttacaaacctagctgagtaccctctgctctggcccgtgagcctgacatttttttcagtgtgtgtgtgtgtgtgttgtgtggtgtgtgtgtgtgttgtgtggtgtgtgtgtgtgtgtgtaaagttagtgatctcacaaacctagctgagtaccctctgctctggcccgtgagcctgacatttttttcagtgtgtgtgtgtgtgtgtgtgtgttgtgtggtgtgtgtgtggtgtgtgtgtgtgtgtgtgtgtgtgtaaagttagtgatcttacaaacctgagtaccctctgctctggcccgtgagcctgacattttttttcagtgtgtgtgtgtgtgtgtgtgtgtgtgttgtgtgtgtgtgtgtaaagttagtgatcttacaaacctagctgagtaccctctgctctggcccgtgagcctgacattttttttcagtgtgtgtgtgtgttgtgtgtgtgtgtgtgtgtaaagttagtgatcttacaaacctagctgagtaccctctgctctggcccgtgagcctgatatttttttcagtgtgtgtgtgtgtgtgtgtgtgtgtgtgtgtaaagttagtgatctcacaaacctagctgagtaccctctgctctggcccgtgagcctgatatttttttcagtgtgtgtgtgtgtgtgtgtgtgtgtgtgtaaagttagtgatctcacaaacctagctgagtaccctctgctctggcccgtgagccttaatcctagcgagggctcgctgcggtggtctaagggcctccagatcccacccgggtaggacttcgcacagatgcagctcccgcgccgggagtgagcccatcctggcacccgtgtgcacagtcaccctcgaatcacggctgaacggcatccgacgcgagtggcttcctgcctctattctacccatctccttactcaggacgccatcgcgggtttcccagggccaaccattcccgccgcgcc

SEQ ID NO: 7885 - DNA, 1095 bp, Artificial sequence
  DNA replication origin
ggtgtaggagagggaagggatgccctgagaaggtgggggttaggagaagggaggggtgcactgggagggtgggggtaggagagggaagggatgccctgagaaggtgggggttggagaggggaggggtgctctgggagggtgggggtaggagaggggagaggtgccctgggagggtggccagaggacaggggaggagtgcacagggagagtgggggtaggagaggggagggatgcacggggagggtggaggtagcagaggggaggggtgcatggggagggtgggggcaggagagggcaggggtgcttggggaggggttgtaggaaagaggaggggtgcactgggagggtgggggtaggagaggggaggggtgcactgggagggtgtgggtaggagaggggaggggtgccctgggagggtgtgggtaggagaggggaggggtgccctgggagggtgggggtaggagaggggaggggtgccctgggagggtgggggtaggagagaggtggggtgccctgagagggtgggcgtaggatatgaagcaacagtgactcctaccccaggggcccaagggtcctggggcagggtggggtcaggaatcgggagggatggggtgtctcttcccccatcaaccctctggctgacaggccaccggactcctcagtcacagcaaggaacctgtcctgctcctgggagcagggcgcctgtggagaacggccccctcacagcctgcccacactgctgcgatgtccccgcatgtctgcacatcctccctccgagacggtcccatcgtgcagtgcggggcttgcagtgtgtaattctgtgttgaggcaaattaaccacccagggtgttaacaactcacaactttaatccactgcccacccagatgtctgaccggggcccaaggaaagatgggtgtgtggttggcctttcaagcgggtgctctagatcatggggccaggagacgccgttgtgcaggaatgcatttagtgccttcaaatcacggcacctctgagaaagcaccgtctacacacttcagcaacatcaacccccctgacgatctcttctacagaaaacgttcccatcagaaaagtct

SEQ ID NO: 7886 - DNA, 1052 bp, Artificial sequence
  DNA replication origin
gtccacctctttctacgcagacacagtaacaatccgatctctccttcctttccctacatttcccccccttctattcgacaaaaccaccatcgtcatcatggcccgttctcaatgagctattgggtacacctcccagatggggtggcggccgggcagaggggctcctcacttcccagacggggcggccgggcagaggcgcccccaccccccccacttcccagacggggcggctggccgggtgggggctgccccccacctccctgatgggcggctgccgggcgtaggggctcctcacttcccagacggggcggctgctgggcagaggggctcctcacttctcagagggggcggccggtcagagaggctcctcacctcccagagtgggtggcggcggggcagagacacttctcagttcccagacggggtcactgccgggccgaggcgctcttcacatctcagatggggtggcggggcagaggcactccccacatcccagacgatgggtggctgggcagagacgctcctcacttcctagatgggatgacggccgggcagaggcgctcctcacttcctagactgggtggcggccgggcagaggctgcaatctcggcactttgggaggccaaggcaggcggctgggaggtggaggttgtagcgagccgagatcacgccactgcacttcagcctgggcaacattgagcactgactgagcgagactccgtctgcaatcccggcacctcgggaggccgaggctggcagatcactcacggtcaggagctggagaccagcccggccaacacggcgaaaccccgtctccaccaaaaaatacgaaaaccagtcaggcgtggtggcgcgcgcctgcaatcccaggcactcggcaggctgaggcaggagaatcaggcagggaggttgcagtgagtcgagatggcggcagtacagtccagcctcggctcagcatcagagggagaccgtgcaaaggggagagggagagggagagcgacttcctcatttcctaattgaataccctttatttatttctcttgcctgattgc

SEQ ID NO: 7887 - DNA, 826 bp, Artificial sequence
  DNA replication origin
ttggcctcccaaagtgccgagattgcagcctctgcccggccgccacccagtctaggaagtgaggagcgcctctgcccggccgtcatcccatctaggaagtgaggagcgtctctgcccagccacccatcgtctgggatgtggggagtgcctctgccccgccaccccatctgagatgtgaagagcgcctcggcccggcagtgaccccgtctgggaactgagaagtgtctctgccccgccgccacccactctgggaggtgaggagcctctctgaccggccgccccctctgagaagtgaggagcccctctgcccagcagccgccccgtctgggaagtgaggagcccctacgcccggcagccgcccatcagggaggtggggggcagcccccacccggccagccgccccgtctgggaagtggggggggtgggggcgcctctgcccggccgccccgtctgggaagtgaggagcccctctgcccggccgccaccccatctgggaggtgtacccaatagctcattgagaacgggccatgatgacgatggtggttttgtcgaatagaagggggggaaatgtagggaaaggaaggagagatcggattgttactgtgtctgcgtagaaagaggtggacataggagactccattttgttctgtactaagagaaattcttctgccttgggatgctgtttatctatgaccttacccccaaccccatgctctctgaaacatgtgctgtgtccactaagggttaaatggatgaagggcggtgcaagatgtgctttgttaaacagatgcttgaaggcagcatactcgttaagcgtcatcaccac

SEQ ID NO: 7888 - DNA, 1880 bp, Artificial sequence
  DNA replication origin
cccattcccaggtctgggctggcggggggttgggggatctccctccacgctactaggagacagagaacgagggtatcgggagcgggggggggctgtctcccgcctgaacccggagaccccgacgccgtcgtcgcctcttcctcaggagggaggacggcagctgtgggtaaagcccgaaggaggaatgcctgaaggtaaggggaagcccggggcagacccgctgcccgctccggaccccactctccaccttccggtaaccgcgtctcttaccggtaatggtggtgaactgttgaattaaccccttcagcgccgaggacgccgcggagcccccgtgggcagccatcttaccgccgccgccgccgccgaacaacaacacagacacacacggactgccctcccccacttcgccgtgcggtgtgcgcaggcgcattgaccgcccctcgagccccgcccctcccgtccccagcggtctgcgcaggcgcattttccgaccgggcccgcgcgctcccagctctcgggttggctgctcggttgctgcctgctcagtgcatcctttttgccattgctggtgccttcctctccgggctccaaggctagcctcgcaggcgcggtgtcgattcctagattccgaaggaagcttcggtctcggcagatagttcttcgcatttcagcttcgcaagctttattgacagagccaactgccgatgacagcatttttctgttttgcggttgtaccgcactctattaggtttcctgcaggtcccatcaaaatgcaaaccctacctcctcgctttgaagcgactctccccgtactcgccccccagcctctaaactaatggcttagctaaccgattgcgacgagtgaaataccagaacccttcatgccaaagaaagcacttagcgcggggttgccacccagtaggttttcataaacgattgtttagtctgctttccttaaataaattggccatcacgtctcccgttagggtcttaatgagaccccaagaggcgtcatttgtataaaaagaaactctgtatatgcagtagaggaaagaaaacatatagaaaggagactggaaaagtgtgctcaaaacgctggtaacggttacctccagagaagagaacgatcgggacgatggtcaaagcggaccttacttcgagtttcttatttatctttttatttttaaacaaacattattggccgggcgcggtggctcatgactgtaatcccagcactttggaaggccgaggtgggagaatcgcttgaggcaaggagttcgagaccagactgggaaatatatcaagaatccatctcaaaaaaaaaaaaaaaaaaaagatattcgtgtgttccttgaataattttaagtattttgcaaaacagttacatgagtggggtgcgctcaaatccaataatcccccaccttgcccataaagttaaaagagattccaagtgattccgtttgttttagcctcccaccttccaacctccacccacatattttgcatcttcataggaaaatggcccaataaaagatgggatgagctgtctgaagaattgacacatcctaagagtaaacatgctattggggagaattaagaaagagccatgtcaaatcaaggggtatagttttttgttttgttttgtttgacagggagtctcgctctgtcgcccaggctggagtgcagtggtgcaatctcagtttactgaaagctccgcctcccgggttcaagcgattctcctgcctcagcctcccaagtagctgggattacaggcacacgccaccacgcctggctaatttttgtatttttaatagagacgaggtttcaccatgttgagcaggctagtctcaaactactgacctcaagtgatccacccgcct

SEQ ID NO: 7889 - DNA, 1117 bp, Artificial sequence
  DNA replication origin
gcggaaccaccgcggcggcgctgccctgagtggaaatgcggcctccgcagcgggagaagatgctgggagccggatggggcccggaggcgcgacaccgcagttctccgtacttgaagacacccatccaggccaccttttcagtcggctgcagggacacgtcctacaagggcgtgctggaggctgagctagcaaagctggggcgagggcgggacggtggatcattcgcagacacatcatcacaccagggtgtccggcaccttacccaaggccaggaatagcaactcagatgttaaatcgtgtcaaacatctgtggagaagatggcacctttttcttctccttctttctctctctctctctctttctttttttttttttttttttttttttttttttttttttttttgagatggagtctcgctctgtcacccaggctggagtacagtggcgcgatctcggctcactgcaacgtccacctcccgggttcaagtgattctcctgcctcagcctcccgagtagctgagattagaggcatgtgctaccacgcccggctaatttttgtatttttagtagagacggggtttcaccatgctggcctggcaggtcttgaactcccgacctcaggacatccgcccgccttggcctcccaaagtgctggggttacagatgggagccaccgcgcctggctaatttttgtgtttttagtagagacggggtttcaccatattggccaggctagtttcgaactcctgtactctagggatctgcctacttcagcctcccaaagtgctgggattacaggcataagccactgcccagccaagatggcacttttgacaacatctgtttgtccagatcagcaatgagtcagcaattgacttctacagaagtttggctttgagatgactgagacaaagacagataaaggataagaggatggagcctgcagatgctcaggagttgcagaaaaacctcaaagtcccttccgatcagaatggagatatgcaaaacacaactgaacaagtcacaaaatgaaccttcttgcacttgcttgttgacaaaaaaagacaagcccattgattttcaccccctctttcttgtaaagctttcctgcactgc

SEQ ID NO: 7890 - DNA, 802 bp, Artificial sequence
  DNA replication origin
gcgccgccgccgctacagccagcgccgcccgaggctgccccagcccccggggccggcgccgccatcgcctcaccagccggccctagggccgccgctgccgccgccgcttcccgccgtctctgctcggaaggccaagcctcgcccggagaccggagcggctcgctcaccgcccctgtcagtgccaaccgccggcgcctccaccactcccgcccctgcccgggggcgtccgccgcgcgccccgcctcactgagggcagacgcaccggctgcaggggcgtcctccgcccctcctccgcggctcagcgcgggcgccgaaaccgcccgactcgcccggcctctccgcggcgcgccagcggctccgccatgcgggttgagggcacgaagcaagggcgcacgcccagctcgttcgcggttcctctcggccccggatgtgactgtttggctgcgccgcctcacgcctgacgctcgacgggattgggcgccggcgggtgaggttatcactaggcgccgaggaggggagcgggaagcgcaggtatgaggctggcgccggtggcttcgatgctgctttccggtgacttcgatgctgttttccagtgctttttcctttttctggtctggtggctccgcgtctgctctcctgggctccctttcctgtgacgtttccctgtgtccgttaggtccttgcttcagactccagctcaacgcatgaaacttttctctccttgcttgccgggtcctggctccccaacctttttgtgtagcttgggcagcggaggccgtctttacctggtcaggccctctcg

SEQ ID NO: 7891 - DNA, 973 bp, Artificial sequence
  DNA replication origin
ctgccagagagcggaggcccggcccgaagaccccagactcgcctcccgcccacccgcccccacgtgaaaaggcaccagatcctaagcgctaacagcgaagggcgggaccggcagagggctccctgcggcgcctctcgaggcgcgagcgaccggaaggaaaggcgggaggctcagcagcgcggcggtgggaggagcgcgcccttgctgatttcatggaggcccggggccgcgggcgctgttctccttcctgtgccgagtgtggtttgctatcaagcggtggcagttcagccacaatcaggggcagggggagggagaggccccccgaagaggcagaggccctgcctcggccgccctgagcctggaaggtgattggctagagcgactcccggccgggagcggaatgaatggcggggaccggggcctctgggtggtgcgaggtatgttgggaggtgcgggttttaatcggcagttgggcagtttagccacacgggccgggggcagggtggggctggcagagaagggaagctggtgaggcggaaacagggaggagtaggtttttctttcttctcacaccggcaaaccagaggaagcttaacctatcggaaccaattactagcatgaacctagcactgagctcaaaggctgaattttagacctttcactgctcccatgcacaccctgcctggtcacggcttctcaccgtctttaccaagatcagtcacacctgtgaagccctgctcattcatctcgccaattcccttctacaggacccagtgcccagacgccactacccaattcccccagccttggaatctcctcctctctgccaggtcctcaccactgtgttcttggcgatttcactaaagattcacctcctcaaaactggccccaattagtcccaccctgttcaacctactatctccacttaacggcaaatggcacctgacaccctcagaagtcagactcctggcaa

SEQ ID NO: 7892 - DNA, 1538 bp, Artificial sequence
  DNA replication origin
cactgataggacacttccatgttatctttgcaccacctggactctttgatcatatgttgatactgtcggtgtttcaggacaggaagaggcagtgtccccacagaggtcagtcaccggagtcagtggctgcgggaggccatgggcagcagggagctagaggagctgatctcaggattggagaccgccacctcctccaggaggagaaacacgcggggaagagcccccagccccaccccacccccgcactgccttcagcctctgcattgacccctccgcttttccaggatgggcatcatgaggcgttgagtggtaccaatgtgggcggtgggctctcctctttccggttttaattcttggttcttaaaaactccgttccaaatgagggaaatgaaactactgaacactctcccccagcagccagctgacgtggggcaagagaacaattcccagttaaggccccaaaggaaatcccctccctgccatgtgctgaggctggagaagtgggggctggagaactggagaagtgggggctaggagaagtggaggctggagaagtcggggctaggagaactgggggctggagaactgggggctggaaagggggggctgggagaagtgggggctggagaactggggtctggagaagtgggggctgaagaagtggaggctggagaagtggggactgggagaagtgggggctagagaagtgggggctgggagaagtggggactgggagaagtgggggctagagaagtgggggctgggagaagtggggtctggagaagtgggggctagagaagtggaggctggagaagtgggggctggagaagtgggggctgggagaagttggggaggctctatctagctcactgctccgccaccaaggtgaagggcctgtctgtggccagcggctgagagcccacagcacagcggagaaccccagaggcaggagcaagaggaccatgattttgcccggggtgagccgccagttccaggtccccatggctccactgctaggtgcaatccctgtgctcctctctcacagacctgtctggagtggggagcagccctggctcctcccatggctcccttgcacaccgagttgtgtcccctctcacaggccagctgtagccccctcccctggtcttgaataggttgccatctggaaaagcagtcaggggtcggggtggagggcagaagccaaggctccctttgatctccttgggaggctgagaagtcccacaagtgacaaactcttatgaagcttagtttaagaaagaaaagagatccccacaccctcagagggcaacagctagagaattatacaaagtgggttgaccgccatcattccttccttccctctcttcgtttctttcctccttctttcttttttgtggagatggagtttcgctcttattgcccaggctggagtgtaatggcacgatctcagctcactgcaactgccacctcccgggttccagcaattctcctgcctcaacctcctgagtagttgggactacaggaatgcaccaccacgc

SEQ ID NO: 7893 - DNA, 1119 bp, Artificial sequence
  DNA replication origin
ccgcgcgtgagcccggtcgccgccccgaggagcagccaggcggccgcccgaaccgccgccacccgagccgccaggacgccggaagccggacgcccgagaggggcgcgcggggccaggtgcggacgcaggaaggggcctggccgcccgcagctcctaccgcgcgctgccccagatttatcggctgggaccgagtgctgggtgcgcgcgcctagcgcccgcggttcccagctgcctgcagccccggcccccaagggttcccgcgcggcgtggggcggtcgtccccgcccagctgttccttgctccgcccacccgggggcgggcgaggagctgcgcacgcgcggggacgcgcgcccggcctgtcgctgtggaaaccgctaggccagcgctcgccgggacctggaatccctgtacgccgaggtgggagccggtggaccggtcccccagccggcccccacctccgcttcccggtgtttgagggttcgggcctcccgccggggagttcacccctcgggctcgtcagtagggctgtggctgtcgcctcttcctgcagcgccaggctccgcccggtctcacagtcggcttaggggctttgcgtgcactgcggttgggtggaaaaacccactcctggttgtttagacgttggcctgcagacgatgtcatttctgtattcctctaagggtaagaaagccagccttgcactagtggagacgtgagtagggagagaatcgtctactctttggggacattcgtacccttaggtgctgtggggcttcctaacaagattgtgggcagttactgatctctggggagaggagtattcgtgtccaggaagaataattggataaacgtgccgtccttcttcctaaacagagtggaatctgtaagcaggccaagagagcatccaggcggcttggagtggaatagagggctctagagcgggtgtctcaaagaggaaacagagtgtatgtcaaaacatactatccaaaactgaaaatagccgggcaggtggctcacgcctatagccccagcactttgggcgaatcacctgaggtcaggagttcgagaccagcctggccaagatggcgaaaccccgtctctactgaaaatacaaagattagc

SEQ ID NO: 7894 - DNA, 1421 bp, Artificial sequence
  DNA replication origin
gtacagggattccaggtcccggcgagcgctggcctagcggtttccacagcgacaggccgggcgcgcgtccccgcgcgtgcgcagctcctcgcccgcccccgggtgggcggagcaaggaacagctgggcggggacgaccgccccacgccgcgcgggaacccttgggggccggggctgcaggcagctgggaaccgcgggcgctaggcgcgcgcacccagcactcggtcccagccgataaatctggggcagcgcgcggtaggagctgcgggcggccaggccccttcctgcgtccgcacctggccccgcgcgcccctctcgggcgtccggcttccggcgtcctggcggctcgggtggcggcggttcgggcggccgcctggctgctcctcggggcggcgaccgggctcacgcgcgggcccgccgcggccttcaccgccgcgcgctctgacgccggtaaggggggcggggcttggggggccagagcgtgggagcggtcccggctcccgggcctctcggcgggttgcggggatgtggggacccggcgcgggacctagatcagtagggcgagccggaggaggtcagacactagagccgtgtgccctccttccctcccgtgcgctttgctctgcggcggatcccgggtctccgggagagtcgggctcgggccctgcggttcccaggctggactggccgccctgttactaaagttctgagaaggaaagtcagccgtcaagcgtcttgggatgctcttgagctgcacgaagcttctgatcaccaaggggccaggcaaggccttagcgccctgtgaggcctgagaatccccaaactgaatgtaggactccgtggcaaactgctagttgttcgtgcaagtagtagttggcaaactgcttgtactactgagacgggcaagtgcgggaataattacaataaagggtaaggtttgatgggaggaaagcacaaaccctacaagtttctccatctgtaaaatgaggatgtttctgtcatccttggtatcatttagatccgtttagtatctgtcaatcagtgcagttctgcttgtgtgtttacatattgggttttcaagtttatctaaacaaaggattatgaggccaagaagattttttttttgagatggagtctcactctgttgccaggctggagtgcaatggcgcgatctcggctcactgcaacctccgcctttcccaagttcaagcaattcttctgcttcagcctcccaagtagctgggattattacaggtgcccgccaccatgcccagctaattttttgtatttttagtagagacggggtttcgccgtattggtcaagctggtcttgaactcctgacctcaggtggtccaccctcctcagcctcccaaagtgccaggattacaggtgtgaactaccatgctcggccagaagaattt

SEQ ID NO: 7895 - DNA, 937 bp, Artificial sequence
  DNA replication origin
gtctctgcccgggcgcccatcgtctgagatgtgggggacgcctctgccccgccgccccatctgggatgtgaggagcgcctctgcccggccaagaccccgtctgggaggtgaggagcgtctctgcccggccgccccgtctgagaagtgaggagaccctctgcctggcaaccaccccgtctgagaagtgaggagcccctccgcccggcagctgccccgtctgagaagtgaggagcctctccgcccggcagccaccccatctgggaagtgaggagcgtctccgtccggcagccaccccgtccgggagggaggtgggggggggtcagccccccgcccggccagccgccccatccgggagggaggtgggggtcagccccccgcccggccagccgccccgtccgggaggtgaggggcgcctctgcccggccgcccctactgggaagtgaggagcccctctgcccggccaccaccccgtctgggaggtgtgcccaacagctcattgagaacgggccaggatgacaatggcggctttgtggaatagaaaggcgggaaaggtggggaaaagattgagaaatcggatggttgccgtgtctgtgtagaaagaagtagacatgggagacttttcattttgttctgcactaagaaaaattcttctgccttgggatcctgttgatctgtgaccttacccccaaccctgtgctctctgaaacatgtgctgtgtccactcagggttaaatggattaagggcggtgcaagatgtgctttgttaaacagatgcttgaaggcagcatgctcgttaagagtcatcaccaatccctaatctcaagtaatcagggacacaaacactgcggaaggccgcagggtcctctgcctaggaaaaccagagacctttgttcacttgtttatctgctgaccttccctccactattgtcccatgacc

SEQ ID NO: 7896 - DNA, 2048 bp, Artificial sequence
  DNA replication origin
agcacatcttgcaccgcccttaatccatttaaccctgagtggacacagcacatgtttcagagagcacagggttgggggtaaggtcacagatcaacaggatcccaaggcagaagaatttttcttagtgcagaacaaaatgaaaagtctcccatgtctacttctttctacacagacacggcaaccatccgatttctcaatcttttccccacctttcccgcctttctattccacaaagccgccattgtcatcctggcccgttctcaatgagctgttgggcacacctcccagacggggtggtggccgggcagaggggctcctcacttcccagtaggggcggccgggcagaggcgcccctcacctcccggacggggcggctggccgggcggggggctgacccccacctccctcccggatggggcggctggccgggcggggggctgacccccccccacctccctcccggacggggtggctgccggacggagacgctcctcacttcccagatggggtggctgccgggcggagaggctcctcacttctcagacggggcagctgccgggcggaggggctcctcacttctcagacggggtggttgccaggcagagggtctcctcacttctcagacggggcggccgggcagagacgctcctcacctcccagacggggtcttggccgggcagaggcgctcctcacatcccagatggggcggcggggcagaggcgtcccccacatctcagacgatgggcgcccgggcagagacgctcctcacttcctagatgggatggtggccgggcgcagacgctcctcactttccagactgggcagccaggcagaggggctcctcacatcccagacgatgggcggccaggcagagacactcctcacttcccagacggggtggcggccgggcagaggctgcaatctcggcactttgggaggccaaggcaggcggctgggaggtggaggttgtagtgagccgagatcacgccactgcactccagcctgggcaccattgagcactgagtgaacgagactccgtctgcaatcccggcacctcgggaggccgaggctggcggatcactcgcggttaggggctggagaccggcccggccaacacagcgaaacctcgtctccaccaaaaccagtcaggcgtggcggcgcatgcctgcaatcgcaggcactcggcaggctgaggcaggagaatcagacagggaggttgcagtgagctgagatggcagcagtacagtccagcttcggctccgcatgagagggagaccgtggggagagggagagggagagggagagaggagaaccgctttaaccggggaggcggaggttgcagtgagccgagatcgtgccattgcactccagcctgggcaacgagagtgaaactccgtctcaaaaaaaaaaaaaagaagaaaagttagaagccaggtgactgaatttcaaggaagtgtgcaagtaccatatggatggatgggactgtatcattctgggtccaatcaggagagagaagccatacagtaatttgaacatgaaaaaacataattgactgactataacagggtaattgagtaatgagggattagccagtaaaaaaatagagctctaaagaacattggaatagcaaaagtaagaagcagctacttcccctagggctgagatagaccccccaccccctgcctgggaaagagctattccttttcccagagctgagatccagaccttattggagagagcgtggttgtaaatcactgaatggcagagatgtttctgccatttaatggttctttgttggccatagttgttggacatctgccctttagggtgccaaggagaattattaactctgatacaaaactgctcaaaaagagtatgtggggtggctccctgttgcagtagactcagtgctgctggccaccttcccctattggagtctgatgctggaggagctgcctgcccatcaggagtcttgtgacaactggaaccaggaagcaaaactccttttcttctgtgatgtctctccagcgccctatatcgacaaagct

SEQ ID NO: 7897 - DNA, 1328 bp, Artificial sequence
  DNA replication origin
cgaggctgcgtccgcgatggcggaagcggaaacgcgcggaggcgagcatctcattggacccaatccgagggcggcgtgtcgtcatcaagctgcgcgggggcatagacgtccgggtcgggcgccgcggggcggaagacgagggcggcgaggtcgggttccgggcgcttggagaagatggtgctgcggcggctgctggccgccctgctgcacagcccgcagctggtggaacgtctgtcagagtcgcggcctatccgacgtgcggcgcagctcacggccttcgcactgctgcaggcccagctgcggggccaggacgcggcccgccgcctgcaggacctcgcggctgggcccgtgggctccctgtgccgccgcgctgagcgatttagagacgccttcacccaggagctacgccgcggcctccgaggccgctcggggccaccaccaggtagccagaggggccctggcgcaaacatttaatcctgggctgtgcggggccgaggccgcttgcttttccttccgggctctacagtggcatcaatgtggaggggtcattccgggcactgcgcgcggcttcgaatcccgactgggattgttggcctgcagacatcccacgcataagagcctaggccagaccgcccgctccgttgaagtcttgtgattggacaagacacagtgtggagacagccctaagcctaacagagatgaaggtaggctgggtccagacacggcacctacggagagccacggaccgaagccagagagcctttcctctgcaagtgggactgaaactcttgacagatgctgctcaatctgactggtatagcaggacagttaattccagggacgatatggatgaaaagacaaccctacagctgccaaattcctttgattaaatgtgtgagctggttgataggcatgagtgtgatacttctcaggcaagatgtgttaagaataccggggactgtaggcctatggtaataataaacacgtattttatgaaatgagtcttctgtgctgggacttgctcattgcactctatgtgttatctcactccttacaacgacattcacatgaggaagcagattactttttggatttttttgtagagatggggtggtctcgaactcttgggcgcaagtgatcctcccgcctcagcctcccaaagtgctgggattataggcaagagccactgcgatggaaacagaggctgctgcttaagttgcccaaagtcttgcagagtgggatgtgagcagaggcatttgactccagggcctaagtccttaacacagctctgcagcatttaccctgatactcaaccccttccttcccca

SEQ ID NO: 7898 - DNA, 927 bp, Artificial sequence
  DNA replication origin
cccagtgccctcaggaggcccatttgtgcagaggcctggaggccgacttgcagccgttgccacgcagcctgcagggcctgggcatgcagcaccccgaagagcaggaagccgttgactgccaggtgagtgagccgcgcgtgcgtgccatgtctcgccaggttttggggattcaggttgtagtgcaagaagttgacaggtgtcaggacaaggttcctggatgtagcggggctggagaaataccagctgtccgtggccacaaacaccgctgctgtgagggctgccccagggagcagcaccagggcctcccgggtcagagacttcaaaccagggtttgtggctccacgagtgccccagaggtagagggggaccacagcaaaggccagaaaggtgggccggttgaagaagccagcagccacaatgcctccaagaagccagctgcgccaccgtggacccggcgccggctccttgcgtgtagggccccacgttacatgggaggataccagcaccagcagccacgtgaagaggagtccctcaatggtgttggagaaggtccttgtgtagaagaccagggtgacgtaggaaccagacagcagggccagggcgttccagcgatccgcccccatcggcggggccaggtggtacacggccccgtccagagcaaaggaaagggcagtgaggaggagtcgaggccccaccagcagcgcatagccgctcaccaggccaggccacggccccagctcctcccagagcctgagcagccagaaggtggaaccagagatcagcagggggaagagcaccgagcggcaggagctgctggggtaaaactcccagggccgcgcggcctgaacgcccaggatgtcctctgcagagagaggcagaggtgagccagtaccaagctcagggatgtagtgggcaaaattctaggag

SEQ ID NO: 7899 - DNA, 1624 bp, Artificial sequence
  DNA replication origin
cccgcccggcgttgcccggcccgagggacggcggcgcccccaggaccctccccagcgcggccccagctcgctccgggaccgcggggccaggccgggcgggagcgcggggacgtacacggcggccccgcccgcgcgctcctcctccctcccggcccgccctgcgccggcggcggcggccccagtctccgcgctgctgaggcgcgcccggccgctcccacggcctcccctccgccctgcggtcccgccgcctccggggcctcctgggaccctggccctcgccgggcaggacgccgccagcgctgaaggcgcagcccggaggccgcgcgggtgagtcggtgcgcagccccagcggctccagaggagcgggtgcggggagggcgagcggaccaagtcggccgcgttcccaccttgcgcgcagccgggagaccagcaggcccagcctctagggaggagggcaggggagctgggggccgccccccgcattctcgcaggcacctgtccctaggccggggtccgctggctcgaagcactgacccgccccggacctagggggacggaggcagcggtgacatttgcccaggaagggcggcagtgggtaaactccactccagggcacgggtctgggcgcaggttgaggcctggggttgaatctgcttctgctagaggccagtgttctcagggaggcccataacccgactgggtctcagttccccctggtatgaaacagcaacagggcaagaggaggaaaccatgccacgctgcaaagctctgagcacgaagccgagaagaatctcggctcccggcctcgggggctgcacttcgggccaggcctgcactcccaggataagaggatggcctcctgccccaggggtggcatgggggcgcgcaaaaagcaaaggtgaccctgccagggagcacccagcgctccggttggtggtcatggggtctttgcgtgggactcacagtgtggccgggaaagttctgtaatgaggacatttctcatcattccttcttctcaaaagtcattcgtcagccccagacacctttgcctcggaaaactgagaactactttcaaaatcgtcaacacccccatctcctgctacagagcggagtccccactttgcagaggcgcactgcaaggtcgcgggtggttaaatggtgcgccctccttgatgaagatgccttgttctctttcactctctatgtgtgtttaatgttgtgtgttgcgttctctgtgaagcgaaggataaacacgggccctttcaggcaaccgaaggaagaaggcggccagcatcagatcttcccgtgcttcaaggtggagcaccctgcagggcttactgcagcgctcagggtcaaagtgaggatgcagtgcggcaccaaaaggcaaatggactctggagagccactctcaccttgtacccctggagtagaccccgaggactggaggactggaacaagatcttagtcctgagggcgggagaagcagcctttggtggttgcacaggggcccggcttttcccgaagtcttaaagcctgctccaaatgccagattcagacaaaggggccgaaccttgggcccgccgccttctcccataagcggcaacccagcagctttgccaggaag

SEQ ID NO: 7900 - DNA, 1471 bp, Artificial sequence
  DNA replication origin
atcaatgtccaaatggacaaacagcctgtggcatatccatacaatggaatactactcaccagtggtaaggagggaacttgatacacactttagtaaatacctgaaattttaggttgcttcagtatccattttgaatatagggttaacaatttcatactagaagcagggcttagtcaccttggatacagtttccagctctctgctggaaacagtatctcaacacattccgtccagatatctggtcctaggtagccacctcctggtaactgcctccttgtgggatgtatacatacaaccaactagactcaccccactgacgcccacaccctgcatggactatgcagatatgtctcagtgaccacccctaagtcacaaggtggccccacaggactccagttcgctcctctaggtgaaccaattagagctccccttgggaaaactgcttgagtaatgccctgcactccaataaaagcctcagcccacaggtccgtctctctctggctccccccacccccacaacgattgtgtacagtgtccccaagacattcccgacggccctcagtgtgccctcttcccctgtggatctgtaagtaataggaccacttctgttagttcctgtgtttcgttgtgttgcctgctctgtgtcatgcctgactgagacgctcaaacgtaacgttttccctggtcagggctttccctagagagcagctatcttggtaggaataaactagatacaggtcagacaagaagcacaaggagatctgccaggataaatatgtctcctgggagagggacacccggtcacaggtcagccaggatacagaggtgccccatgaaaggcccacggcaaacacccacgcccaaatcccaggagccctgtcagggcagagttggcctttacagtggctctccagggaggtctcaagaccaaggtagaggaaaatacaacacacacacgccacacgggcgacgctcagctgcatggtgccaagcgaagaaagccaggcacaaaagaccacacggtgaatggttctccttgcatgcaattgcgagagaggcaaagggcagtgacagaaatcagaggagcagttgtctggaaccagggcggaggggaggtgaggggttagctgcagaggggcaggagggtacttttgggaggagaggacttcttgaactcggggggagactagcctggtggtttcgcgtgtcagaagtcatggaactgagccgggcatggtggcggggcctgtggtcccagctgctcgggaggctgaggcaggaggatcgctggagcctagaagttcaaggctgcggtgagccgagatcgtgccaccgcactccagcctgggcgacagagaccctgtatctaaaaaataaaggaaaaaattcatggaactgtatacttccatgtactgtacttaaatttcctggtatttatcgtatgtatagaatacctcacatcttaataaag

SEQ ID NO: 7901 - DNA, 1103 bp, Artificial sequence
  DNA replication origin
gtcggttctgtgagctttctagggaggcgggagggagggggcctactgtctcagaggcagaatgcaccaaaagcacttttcaaaggccatctgtgggcagaggcactaactggagactgcaacagatgttttcatgatcgagctagtgtgagtcggctcagaacagtcaccctccacagaggcacctgtgagcctccgttaaagaggacgattggccacattccaccacgaagcctctgggattctgcctgctccctccttctcttcctgccctctttggaaggcctcctccagactccaagcccagcctgtgatggaatcaccgtagccccagtaaaccaatctgtgaccgtgggacacactgcaggggtggagaggaaagcttgcctttgaaaacagtaaaatacattcacctatgtctcttcccttggcaaaaaactgtgtgtgtgtgtgtgtgtgtgtgtatgtgcatgcacctgcatgtgtgtgtgcgtgtgtgtctgcatgtctgcgtgtctgcatatatgtgtctgtgtgctgtatgtgtgcgcgcatgtgtgtgtgcgcatgtctgtgtgtgtctgtgtctgcgtgtgtctctgtgtgtgtatgtgtgtctctgtgtctgtatgtgcgcgtgtgtgcatgtctgtgtgtgcatgtgtctgtgtgcgtgtctatgtgcgtgtgtgtctgtgtctgtgtgtctatgtgcatgtgtgtgcatgtgtgcatgtgcatgtgtgtgcatgtgtgcatgtgcatttgtgtgtgtgcatgtgcgtctgtgtacgtgtgtctgtgtgtgtctgtgcttgtgtgtgcacgtgtctgcgtgtttgcgcgtgtttgtgcatgtgtgtctgtgcatgtctctgtgcatgtgtgcgtgtgcgtgcgtgtgcgtgcgtgtctgtgtgcgtctgtgtgtctgtgtgtgcgtgtgcgtgtgtgtctgtgtgcgtgtctgtgtgcgtgtgtgtctgtgtgcgtgtgtgtctgtgtgcgtgtgcgtgtgtgtctgtgtgtgcgtgtgtctgtgtgtgcgtgcgcgtgtgtgtgtctgtgttaggggcaggggagttgcagtttcactgcaaggc

SEQ ID NO: 7902 - DNA, 1163 bp, Artificial sequence
  DNA replication origin
gccatgggggtgctggggcatggctgcctgactcacaaggatttcatttcctttttctggggcctcggtggccatgtgtccgctatacaccctgcttctggcctgtgctgactggtccagtggtagatgcctgacgcacactgggccaatcagatgatctctcccaggaattccaaattgaagacaagaaaacaggctctggagtaatagcagtagtgacagtgaacatccttcctgcacccaccgtgtgccaagcactgtgctgagtgttttgtgtcttagactctatgccatgtgccaagcactgtgctgagtgttttgtgtcttagactctatgccgtgtgccaagcactgtgctgagtgttttgtgtcttagactctatgccgtgtgccaagcactgtgctgagtgttttgtgtcttagactctatgccgtgtgccaagcactgtgctgagtgttttgtgtcttagactctatgccgtgtgccaagcactgtgcagtgttttgtgtcttagtctctatgccgtgtgccaagcactgtgctgagtgttttgcatcttagactggatcttcacaaccacctcaccaagctggtgatcgtactgtgtgtttttcagatgaggggctagggtgcccaaaggttaactttcctttccagaagttcagggtagggaagtggtagcatgaggcgagctggagtgactgtgcagctgagactcgtccatgtgatgcagagacaaagtcggtcaactctggccatccaggtccccaggaattgactggctttgtgataactgagccgacttcatggaaaatggcctgtgtgcagtggtgggcaagacctggctctgggagatggccacagcggcgaggggtggtggtgtgggggccaagtgaagccatgagagagggaagcagagaaaacctccccttccagagggagagcagagcactgatgaagaccagccgggcccacccccacctcagtagataccacagagcacccactgtagggtctctgggagatccgctccccacgcccccctccagtgagttagcagcgagcttgccagagaaaagatgtgggccgcttattttggaggtgtggggcagggggcagcagagaagtttgcacccttctctgcacccatccacagaagggc

SEQ ID NO: 7903 - DNA, 1275 bp, Artificial sequence
  DNA replication origin
tgcgctgggagggaggccgagcccggggaacgccgcgtgccctgcctcgtcccccactgtggccgcgccagctccatcccgggccagccgcgtccacgggccccctcccgagtctcctcaggctctcgcctcccctacccccgtgggatgcccaccgcccgcacccacgcccgagcctggcggcagcagccgccccccgcctgaagggagccggaggtgacccaggccgcgggctcccgaggcccctgaagggctgcgcgtggggacccgccatgcttctgggttccgaacgggggtgagctccgtctcctcacccggccccgcacccgctgggcctggggacccctcactccccgtgcccgcccctccgcgaggcagcagaaagcgcccggccggggcctctctctactccatcttgccacagttgtctgagaagccagaaaaagtttccagaactggcagcccttaaaaaaaatgaagaggaagagaagaaatgggagcaggcagccctcgtcagcagaccgggagccgcgtgggcgcggagccatttgcattccggtctgcgggggctcggggatgctggtgacaggcccggttcccggtggctcgcccccacctgcgggcgtcgggaaggatcccttccatctctcagccgcagaggaggccctggcagcgccccggctgtagccatgcaaccccgaggagtcccgggcaccttcaccccaccgggaggggccacaaggacctgggcctcggccaccaagctttgtcccctctcgctgtggggggctagtgattctcctccgacctgacgattgcttggttttttcaaaagggagttttgtgcggtgagaagtgtgtttctgtgtggctaactctgggctagcgtgccgtggccattgaaggtgtggcctgcgtgggtgcagtgtaagtgacgctggattgtcaggtggcagcaggggacccctgctgtgtcagtgctaatgaaacatgttggttggtttctaaaataaagccaaacaagccagcacatgcagaggcttggaccctgatagaaacttctgctgccgatttctttcgttttgttaggcactcaaaggcctacctgctccaccgagaagggcagattccattctccaagagccagtcagggaccactctcatcctctagtcagtgaggccccccgcgcccttcttcgacctggactggttctctggctcttgcagggcctccgctgccctggcacattccagctgcctccaccccatcaggct

SEQ ID NO: 7904 - DNA, 1853 bp, Artificial sequence
  DNA replication origin
gacgggggcgcggggctgcggggaggaggcgggcgggcccctcgggcgacaccgcggggcgggcggcgggaagcccggactcagcggtttcctgggcaaccggcctcctccggcgcggcccgcgcggctccaggtggcgggaggcggcggttggcgggaagggccgcgcgggcccgggggcggcgcctcaggtagcagcgccaggtggcgcccgtgggcggcggggctcccggggaggcgcctgctcccgcccacgccgggcccggccttcgcgagcttccttctggattccagcgcgaagccgccgcggaaactccccgggcgggcatcggagctctggggcggggcggccgggctcagagggcgggcgggagcaggcgggcggcgagggcgggcagcagcagcgggagcaggggcgccccgggcgccggggccgctggggacgaacgcggcgggtcaggccccgaagcccgggccgcggtggccgcctcaggcgcccgctctggggtgggggtgggggcatctttcgggaccgaactcgccgcagcctccctctttgtgctcctttcccctgctgcccttccagatgcgctctttccagaaaggcagcacacgcatgtctctgccgtggccccagatcctccccgcgccgccgttttgagcgttcacactcattacccaggtccgtctgggagacccgccgggctcccgccctcccggcccgcagcctcctggccaaaatcctcccgggacaccccacctggactgctgcgaacgggcctccacccgcctccccggacccgcagcgccccccgctccctcagggttctggggtgaaggggtctgaatagcaccaggggaggcggcagggcgggcctgtcctacctgcgcccgagcactgctgagacgacatcccttccagcgccgccacgtagtccagccccagccagccgcggtaggtggttttctctccgacaggcaccgcccggacggtggcatccttgaaaagcaggtcttggccatgatagttggaggagtcgaacattttgaacccgttcttattgtggtcgtctccaaacaggtcctggaagcaccgcaggcagacgacctgctcctcactgggctcaggcagggtcacccgcccagtgccgctagctgcaaattgctttacatacagtgacccaaagagcaagtcatttcagggccccaccactctgattggaagtcataagcttgacaactgattggcctctgtcacccaagcgggtgtggggacactaggcccgcaggtgccactggaagaggcgttcagaagcactgcggtgctccagctcctggatgcaggtctgaggcctgagatgtccaggaagaaagacccagaaatgagggatggtgtgggtgggattcctgagcgttctgctaggcctgctgagcacttcttggccttttccataaggctttctcactctgtcttacagatatctccccacaaacctaaacaatttcgagagggacttgtgttctgcaaccagtcacagaatatcaggtgagctgggcgtgtcttcactgacccacccgcccagggatgctgcactcctctccaccctgctcagaatcactagaatgaccgttctgtggctacagccctaaaagagctactaaaaagaccagaagtagtatgagaacttatgaatacgaatataaataaaggacatctggagaacatgcatgaatgtctatgtaaagtgttaagtactgatcaaggaggaacgaaggagtcaggtggctctcagtctttttggagggactcgcagatcctcctgaagatctgatgaaagctgtcagccttctcc

SEQ ID NO: 7905 - DNA, 1424 bp, Artificial sequence
  DNA replication origin
cacagttggctgagctggaaatgaaacccacagtgagaagagcatctggctgatactgagttatcccacgtggtcatttaggaggaaatgtttagttcccccgaaccatttttaaatgacagtcgctcccagtgctgtctgctgccttggtggacccggtttgggggtcactgatcgggtccactccccagctttgctcagactgaagctggaaggtggaaccattctcagcagagtccagatgagagcccgggccccctgctgaccctgggggcttggcttggctctgaagaaagttctgctgagtgacctctctacctccttcccacagctgtcagcgactattttgggggcagctgcgtcccgggggcaggagagaccagttactctgagtccctctgtcgcctctgcaggggtgacagctctggggaaggggtgtgtgacaagagccccctggagagatactacgactacagcggggccttccggtgagcggagtgggggcagggaggggccgagggcagggaggagctgaggccacaaatgctggggaaaaacacctttgcccagagagggccgtggagggggaagtggcatgttggctgcgtctcatcaaagcaccctttatatagttctgtgccctggttagtttaaaaacatccagctggaatatgccaaaccggatttgctcatgaaatcaacgtgtttggtatatttagtgaggtgagggctccaagagaagaaaatggaaaaaacagccttttggccactcccatgtccccattctcagaccagcagggagcggggtcaggggagtgtgtctggacacctggggccggcccgtctctgctgctggttgcggctggcaccttgggtaacccttccgtggatgcaggagactctaacagctcgtggtccaattccatctgcctgcagaggaggaaatgtgctcagcaggattggaaaggaagcttctcgggcccctctagctacctcacgtttccacctggagcagggaagcctgctggtgccccacactccagatgttatctgactggatgcggttttcggcttagagagaagaaacagtcctcagcacccctgagcgggacagccttgcccctccactccccgtgtccttggccatgcacacattctctctggctctcttggagcctcagagccctctcctgatgtcgcccgccccgatctgctctaatccctgtgcattttctgcccgtggggacccaagcagaccctttgcccaggaggtctgacctgcctccaacactgggcagtgacatcagcagatcgtgtaaaagtcaatggtcccttccactgaggattctgcggcatggcatgaaaaggccttctagtccaatcccctgcctcagggtagaatgctcttcaaaacaccctgaaaa

SEQ ID NO: 7906 - DNA, 1158 bp, Artificial sequence
  DNA replication origin
ttccccagcagctggtgcttagctgggtccacatttgctcacatcaggggagttatttagctggacagaaagcagaagccagcaagtccttgctttccaagagcctaggcccctaggagaacttggagggtttgggggaatggtgtcagggtcatgggaagaagggtgtctgggaggagcaggggagccgaggaggggcttccccagatgaggagcggcgatttcctggtgctgagggggttgaaggagagtgagacagaggcagagacagagagaactagcgatgtggccccaagtcgctcacgaccctgaatgctgcagggtgtgtgtggtggggccagggctctgcagccttgcaaagcgttcccctgtgccaaggtggctccaaggggctgctcaggcaaaacacagactcagctgtgggaactgatgcccagagggtctcccatcgcacgggcgcacacacgcaggcatgcacgcgtgcacaaactgcccggtggtgtgggaggccatatcagaatgaagttgagttctagaacataaagccagtgttacttcttgcacaccagggtctggcccccgccaacctgagtagctccgtctggtaccatcctctgactcacccgccttgtttcttaccaatcctctggaccgcctgagatggttgcggggctcagcttacccatcacctctgcagagcaccgtcctgcctgctctatttcagtggatttccccgcaaccctcgttttctctgtcctgcccttcccttttcctcacagcaccccaacatgtgtcactgtattgttttgggtgtgtttatttactctctgctctgtgggggcaggaaggtctcttcgtttactgctgcatgcttatgaccagcgggtagcaggtgctcagtagaggtgtcgagttaattaaagaggaagaggtgcgtggggcctcggaggcagagctgtttctggctgatgggtgtgcagggttggactgtgccgtgtgtcatttgatggccattaattcaacaaggaaccagccagtgctttctccaagcgagatgctgtgtggagttccagagggtagacacaggggaagactggaccctcctctgaggactaacgagactgagcaggcagaggcttgcagaggccatgtgggtgc

SEQ ID NO: 7907 - DNA, 833 bp, Artificial sequence
  DNA replication origin
tcgttttctctgtcctgcccttcccttttcctcacagcaccccaacatgtgtcactgtattgttttgggtgtgtttatttactctctgctctgtgggggcaggaaggtctcttcgtttactgctgcatgcttatgaccagcgggtagcaggtgctcagtagaggtgtcgagttaattaaagaggaagaggtgcgtggggcctcggaggcagagctgtttctggctgatgggtgtgcagggttggactgtgccgtgtgtcatttgatggccattaattcaacaaggaaccagccagtgctttctccaagcgagatgctgtgtggagttccagagggtagacacaggggaagactggaccctcctctgaggactaacgagactgagcaggcagaggcttgcagaggccatgtgggtgcgggcaagagaggccctgctccagagagggaggggctcagggagcaccttggaggaggtgacagttgcgctggactgtgatggaggccaggcaccggccaagcagaggtggcgggggagacacaggagctggctgagctggaggcaggtcccatgtgtgatgcggggactgggcaaaggaactcacactttccagcacataccacatgtcaggtgggcacacggcctggctcatttagtctgggtgacagcgcaggtgttactatccccattatacagtctgggaagtggaggttggccaaggtcacagaagtcatgggaaggggaagggctgggtctgctgagctgtgccgctgccagacagcacctccctacccggagccgggcttctgaagggaggccctgagagtgcaggtggc

SEQ ID NO: 7908 - DNA, 1554 bp, Artificial sequence
  DNA replication origin
tgtgggagggcagggctgccctagaggactggctgtccaggcgaatgggctcacacagaactgctggagccaccctccatggtgggccggggctgggcagggcgggggagccgggcctcacggtcccctgcccgcagtgctcggtggcatggaggtgcggtggtgcgccacctcggacccagagcagcacaagtgcggcaacatgagcgaggccttccgggaagcgggcatccagccctccctcctctgcgtccggggcacctccgccgaccactgcgtccagctcatcgcggtgagtcctctcccttccaccctgccagacaagagggctgtgactcaggagggagcacacaacagccccattcaccaggaaaggagccgacctcgccctgccaggcccggccgataggatctcccgagtctccctggccacgaggccagcttgcctcccgccgggcccaggccaggaggtgggagcctcaggaggacccgctgctcagagggcgccagcaaagaaaggcacctgagaggcttcccttccacaaggcccctgccaagggggcccagatggtggcggcccctcagtggccgcaggcggttacttgctcatcttgccatggggctctccagaatggggcttgtgtggtttctggggaaggaggagcaggggctggactcccaggtgggtgagcatggggtaggagagcaggtctgctgagaactgctaaatgacactgacaatcctccgaggcaccaccagagagtggcgtccctcctgggtgggtgcaaagaaagctggcttttcattccagctctgccccccatatgcccccaagacctaatccaatcacaggcccacactggggccaaggctgtgggtcaggctccatgtgagggcagaaaccccaagcacagaccaccttagagaaaaaaagctagaaaacctagggtagcagtagaggcgcagggtggagggacagaaagcgagggagactcacttgtcactgcgcaccgttttctgctatctgatttttttactatgatatctgagtcctgcaaaatcaatgattagtattttttttttaacattattaggaaaacaaggtgaatccctggcctgggaaagggggagagccctgggctctggttgggctcctgggacagatgagaaggacagcacagccctctggggcttggggtggggccccaggccatctggtaggtgtcccgagttctttgctgagcaggccagctgggccaggcttggctgagccacatttccttgcaggcccaggaggctgacgccatcactctggatggaggagccatctatgaggcgggaaaggagcacggcctgaagccggtggtgggcgaagtgtacgatcaaggtaagagggtgcagtgggaggagagaggacagcctgcgctggaagtcagctctccaggctgcccttgctgggcctggcctgagctggccatcagccctgtccacagagcagtcctggagtcccagccagaagaacgccctaaggctctctcaaattccccagggac

SEQ ID NO: 7909 - DNA, 1528 bp, Artificial sequence
  DNA replication origin
ccggggctggaaatgtgcctgagcctgcggctccggggcagtgagacgggggaggcaggggctcggggtcgagtgaggacggcggagggaactagcactgaagcgcagacggggaagtctggaaggcttcttggaggaggcggcctcgaacacccgaggcttccgacgctccaaggagaagcgcgggctgaggcgtggtggggaggcctcggggtgtggagaggagctcccggagggcggcccctcccgacgggcgcaggaactcaggaagactttgggggctcggagcagctctttctcccgagcccccgcgggagaagattcagagggactgaccggcaggcgcgggagtccgcccgggggtttctggcacatgcagggatggaggtggagacggaggccgggtcccctcgcgtcggcgccccggggagtcagggcccgggatggtgggacgggaggcgggacctcggggagcggctcgcggggatcgcgggcggcgaccgccgaggggatggagttcgtggcaccgctgtggccgcaggcgacgcactcatcaatgcaaacgatgaagccaccgccacccccgccccgtctgaactttgcagtttcccgcctgggtggtggggggcttggagcgctgcggaggggagggcagttcgacttcccaggcctccgccaggagtggggaggggagggctgtggcggaagcttcagtctcggcccttgggctggtggggctgccacgggagggtgacctggtttcgggcggagtcatgcgtttccctccctcctgcacaggcctctggcagtgctggctggggcagggtgaatggcagaggagctcaggcctgaaagtcatcggccccaaggggctccagcaccccttcctctgggcccctagcctgggagctctcggggactctgacccggtcagatcctgaggcataagcagaagtccactgaggatgtgggtgtctcaggctctctacaagggggtttactttcaacacagaaggtggggtttttatctgctctctcagaagatgaagcaggctcagagaggcttgaacctaccctgatgggtcctcagcctcccctctgtgcctgccgtcttcccttggcagggcctggcactgtgcccaccgagggtggctttgcagccagcatcatcgcagacactccccgaggggacagggctcctggagggcagcccacccacagccccctcacctcactctcccgtcccagttcatgaggaaggcccagggacactgctgggtgagggaacctacacgagcaccctcttcgggaggcctggagaggggaagaagcttccacttccagggcctgccgagactccctagccagtgctcccaccaggtgggggtagctgagaagcgacctgtagaccctcccattcctccataaagggccgggttctgagccattccatttgccagcagccgtgctcctggtcagagaggccctgagcacaggaataccagcccttcccctgtctctgcgccta

SEQ ID NO: 7910 - DNA, 1366 bp, Artificial sequence
  DNA replication origin
gcctcagcctcctaccccgcgttccagggtatcctcccctcctcgcgccctagaaagactccagataccgtgtctaactggagagagaaaagctcagacgtggaaggaaggagaggtcagaatcccagagtcggggctggagggcagctggaggatgatctcattcacgcagcagctccctcccagcacagctgcacagaggatctgggatacgggggagcccaggccgagcgccctggcgaggggggagccgggcaggggcatctcggccacagctgcacagaggatctgggatacgggggagcccaggccgagcgccctggcgaggggggagccgggcaggggcatctcggccacagctgcacagaggatctgggatacgggggagcccaggccgagcgccctggcgaggggggagccgggcaggggcatctcggccacagctgcacagaggatctgggatacgggggagcccaggccgagcgccctggcgaggggggagccgggcaggggcatctcggcctagccgactgcctctcctcgggcctagagacgggaggtgacttgcccgagtcaggcatccagtcagtggcagagccagctgattggaaggtgagaagaggaccagagaggaattggaggaagcggaaaaggagaaacaggcggagaaggggaggaagagagtgaagaaggtgagggaggaaagggtgggttgaccgtatttctaggacagtggttctcagtgtggtccctaggccagcaacgtgagcatcaccctggaacttgctggaaatgcaagtgctcaggccccacctccgacccactggatcgacagctctgggggcggggcccacaatctgtttttatttcggggcacagcaaatgttgagaaccactgtcgcaggcgggcaaaagcggcactccccatgtggttggggatgcggggaatgaactgaagacattgttagtcacctgcctccatttaggcctcacctttatgtcatcagcccctctgagactcagaaatgatgtctctctctgacatgggtaagtacaacagtgagagagaagacatccctctgagtttgtctgtccttgagcttgctctgcgccctggggaaggaaggcctccctcctatggggccatgaagctactgcttatcacacactggatcaggggaaggaacatgggctgggcttcaggagactcgagctctactttttaaaaaccagcgacttacagaccctgggcgagttcgtcgccctctctgggcttgttccccacatgtaaaaggtaggtcatgatggccgtgacgtgccatactttccgtctcctgtctgctctggaggacttgtgctgtggaag

SEQ ID NO: 7911 - DNA, 1084 bp, Artificial sequence
  DNA replication origin
agcgcggcaggccagctcgggggccgccatcttggcggaaagtttcgggggagagcggttgggggcgcggaaggaggcgaggttccgggggtggggcgtgcggcagcaactgggcgagcgggccggggggccgcggcgagcgaggaggcggcgcggccgagaaggaggacgaggccgcgggggtgcggcggcccaggggagctcctcccccgtcccttcgccccctccgctcggctccgcgggccccgggcggggcgggggtacgtggagcggggccgggctggggagctgctccgagtctggccggggcgcaccccagttccgagcgcacgccgctcaccggaactttgtggcggcgccgcaggtgtgggggcccgcggaggtgtgcatgcggggcgcgagggcgtcgcggagagcggccgctgccctgtccggcccccgctggagcagcccggaggcagcgagcaaggagaaaggcaagcgagaggagggggcccgagcagggcgggcggccagtcccgctggtcccctctcagcgctctgcggccgctgctggctcaggggccaagggtcggagcgcttcacccgcccgtacccagtagcaggtggggagtgtggatacttgtgcgggggaagaggcggcctcaggtctaggctctttggggaggggacgctttcgaggagagtttggaagccgacttctgtctgttcttaatttggaggggtacccactccaaggaaaagctttccacgttgacagacaactgctgcgttttgagactctttctttgacttggtaaaactttggaacgtggggttttcaaataggctgcgagggttttctatttcgataggggaaaatgctagtttaacatgattctatcctttttcctttccgttgtgtgttttaaaggtgtgtgccctcttcctgattctggagaaaaatgccggtccggaagcaaggtgagagtttattccgtaactctgttgtcgatgtcacttgcttttccgtgtgtcagttttttgattgccgttttagaatcgtttgtgtaactttgatgagacagcacggtcctagctttat

SEQ ID NO: 7912 - DNA, 863 bp, Artificial sequence
  DNA replication origin
ccggcgctctcagccaatgggaagtgaggaggcggctcgcgccgagccccgggctccccgcgctgctaccttcgggttggaagggggaggcgggtcgggggagggcaggggaacggaaggggtacccggggagcatcctaagggaacctcttcgcttaaaagggcggccgctgaagtggctctgagaacaaaggagttaacactcggactccacaggtggcccggggtggccctggaggagcccgcctttaccttgccctagcccaccggcgcgtcccgcagttccgaactaaacgcgccaggccgggaaggctcgggctgtctgaagagaggcgtgacctcgcctacaccagatccaaggcgcacataccgagacacccctcaacctcactcagcagtgccgtttccaactccgcggcagagacagcgcctggcgaccccgggggtagatccccaccggggaaaagccgccttaaggaggagccaactgcacctcccagggggcggggagggcggggcctgggagagggagagggaggagttcggggaggggtgccaactctgcattgccttccactccaggctgattgttaagttactcttcgtcccttagtaataggcttggggggaggggtttcattacagaaggacatatgaaatagagacactggttaacttggcaagagtttgagggttatagtacaagatttttaagcctaactgattaattccgagtatggtatacttaagggtgggcagagaaggtttgttcattcattcgctcattcattcattcattcatttccctcaagcctgcgtccccgcccggtcagcatcgcaggtgttacccaaactctgacggt

SEQ ID NO: 7913 - DNA, 1156 bp, Artificial sequence
  DNA replication origin
gtttgagtgttttgcagtaagaatgcaatcatgaattatatatgtggaaataaaatatatgtttaacccacagcaagaagaaaggccttcctgctttgaagggcaaatgcattcattcacaatcgggtgttaaatacccactgtaggccagttgctgttggagagaaaaaatgaatgctgccagctgcgtcctggaggctctctctgtctagtagaggagataagacttgtaaaccagtaagtgaaatatgtcagcaaaatatgatctgcgccataggaggcatacgaacaaatgctgtggaacttgtgagagattagttcctggggagaaaaaaggggaggagaaagaagcaagaaagccttcacaggcaaagcagtgtgtgagtttgtggtgtgtgtgtgtgtgtgtgtgtgtggtgtgcgtgtgtatgggggtgtttgtgtggggggtgtgtgcatatgtgtgggggtgtgtgtgcggggatgtgtgtgtgggggggtgtgtgggtgtgtgtgtgtggtgtgtgtgtgtgtgtgtgtgtggtgtatatgtgcagtgtcatgtgcagtatgtaatgtgtgtagtgtggtgtgtgtatacagtgtctatgtggtatgtgcacatatgtatgtggtctgtgtgttgtatgctgtgtgtgtgcgtgtgtggtgtgtgtgcagtgtatatgtggcatgtgcatatgtgtatgtggtctctgtgttgtgtgcatatatgtgtggtgtgtgtgcagtgtatatgtgacatgtgcacatgtgtatgtggttgtgtgttgtgtgtggtgtgtgtgcagtgtatatgtgacatgtgcatgtgtgcatgcctgtgttcccacatacgcatgtgggcagaggctgaaaggaagtggcggagggactagggaagaaagctgtcagtggggcacatgtgaacagcacagatgagaggtgaatttgggcacgcgggtgagcagtgagcacataggtttgactagcctgatcggggagggtgggttggagacacaagtgagtgacaaaagtagaaagagaggccgaggtaaaagtgctcattcattgagcgagcatttcctgggtgccaattgtgcctcgggccctgtctcctcctcgagaacttcactgtctaatggggagcagggag

SEQ ID NO: 7914 - DNA, 1671 bp, Artificial sequence
  DNA replication origin
caaggcatttggcgggaagctccagagctggggtcggggcagggaggggccacgctgggactctgctggcccagtacgggggcagatgctgtcttaagggctggcagaatggggagaaggggtccagaggggagaggagatgagggatgccccagctgacagaggcccagctgggctactgactcactgtggctcttaatctcctgtggagggcaggcccagctcctgggagcctggagggcttagcagtgtttgcacagctacagaagtagggcctgtgggctggcacgaagccctgctgggccacagacaggagggtaggagagcggagcagggcaagagagaggagtgagacgcaggatgagttccctggagagggagaagtgagcctcaccaacctgcaaagggagtgtttgcagagagactgacagagagatgaagcctgggtgggggtgggtgggggcgggtgggggggagagtcaggtaaatcaatatgcatgaggccagtccagactgtgcaccccggtctagaaagagacgggttgtgcatttttcagcttttcataactgggccaaagacttcaattttcccaataaaatgtatgggacctgctcaagagcctaataagttgaatacataaacagaaactccaggtccacttctgaaccctcattctctccctttctgtctccttcactccaccgcctgccctctgacggcccctggtcgtcacttagttctctcctctgtctcattgtacaaaaaagagatgggaataaaaatgcctcccttttaccttgctctccaaatgctgagagagtgatgagtagagacccagaatggagcacgtgtgttccaaggctctgtgtacaatgctgagctttggcacaaaatgtgtggcatggagatgatgttcgaaagagtttcaggagggtttctcttcttcaggagggtttctctctcctatacatcttgttgctctggggcttcccattcagggggtttcaatgcttcagggaaggagctcaaatctgccattgctgaggtttcactgtcgaattaaattttcgtgaatcccaaacatgacaataggctcaaaagccaagtgctaaggagaggggattttctagaagcctggaggattagatcacagagttttgtgtatgggagatccctgcaaggcaggaagggggagggggaggcagctcttttatttccaaggatggtgggaaagggggaggtgggcattcagatgagcacgggtcttcctgggttccagtctgggaggagatgtgttcaataagttgaggggagcactctgttctcgggtatttggggtattatttgcaaaggatatttggtctatttgccaaggtatttgggggtatctgtggccacatcaaagaaaatgcagcatataccatgggaagtctctgcatactctagaggctgatatggaacttagctgacagcccggctggtatcttgggagttgggggagaggtttgtgcctggtattgtagccaagagcagacggcctgagtaagtctgtatggaagttcagccagacctcgggacctgtggggcacagagaaaatcctgaaggagacaagtcagagacaactgagccctggccagacggcagcagaacatccatctattacctgtgg

SEQ ID NO: 7915 - DNA, 1320 bp, Artificial sequence
  DNA replication origin
aggggtttctgtgcagggctgccctgagggttacccttttccatcttcatttctatctcacatagtaggcaagacaacagacaggattcagacaagattacagctccaagggttgatctgtgtatttcccttgcacgctgctctcttgctggcaccgaagggcaccccagtccagactggtcagaaacaaacactcacagaacccacagagccagggctagacacaaaggccaggcagtgtgcttgcaaaacgagactttcctctcccaaagactagaaaaaactaggcttgcagaagcaggaagaggccgctggacctggacgggaggacgacacctggattactgggtgtggcgccttccaccaacagtgctggccacatgtgaacagcacctggtagccttggaggctgtgagtagggattggggtcaggaggggtgcggtcaggagggatgtggtcaggaggggatgtagttagtggggatgcagtcgggaggggatgcagttagtagggatgcagtgaggacgggtgtggtcaggagggatgtggtcaggaggggatgcagttagtagggatgtggtcgggagggatgcagttagtagggatgcggtcaggagggatgcagttagtagggatgtggtcgggagggatgcagttagtagggatgtggtcgggagggatgcagttagtagggatgtggtcgggagggatgcagttagtagggatgtggtcgggagggatgcagttagtagggatgtggtcgggaggggatgcagttagtagggatgtggtcgggagggatgcagttagtagggatgcggtcgggaggggatgcggttagtagggatgtggtcaggaggggatgcggttagtagggatgcggtcgggaggggatgcggttagtagggatgtggtcgggaggggatgcagttagtagggatgtggtcaggaggggatgcagttagtagggatgcggtcgggaggggatgcagttagtagggatgcggtcgggaggggatgcagttagtagggatgcggtcgggaggggatgcagttagtagggatgcggtcgggagggatgcagttagtaggggtgcggtcgggagggatgcagtcaggaggggatgcagttagtagggatgtggtcaggagggattcagttagtaggggtgcggtcaggagggatgcggttagtagggatgcggtcgggaggggatgcggttagtagggatgcagtgaggacgggtgtggtcaggaggtgtgtggtcaggaggggtgcggtcaggaggaaaaacctcacccggagcagaaccaggtgt

SEQ ID NO: 7916 - DNA, 1936 bp, Artificial sequence
  DNA replication origin
cgggagactgacccagccgcacagagggccccaggtgtctctcagcggtggccataggacacctgaatgagcctcgagccagagagagtgactttttggcggggctctgcaagtggctttctgcccacagctcaggggtgggagtgaggagtcagacctccagatccctccaccacgttcactcgggacaggtgcatgaacggcggcgcgatccgcacaggcgaggagacgaccgatgggggcggacagccggacgcacggctgcgtcactcaccctcagcgaccagggccccacgtccctaagcgcggagctgggggaggggtcggccagctgcaaggccgcggggccgggaagggccgggaggaggcgccggggcggccggggctcccagggagccgctgagtgggggagccgcgcgcagcatctgggcctggggcgggcgcccggggagcgcggggtgtcgccaagggggccgcacgacccgcccgcggtgagcgcaaggcccgcgtgccccagctctcctcggtggggattttcctcacctggaaaacacacgggttatggagggggtggtggttaatcgtcgcacggggaaaccggcagacaggttctgatcgagcccttcatcccagtcacaggtggcaggtgccgggcgccacgacctcactgtgcagggcgcacgctctctccccgccctcccacaccccagcggccccaggccctgggggattctcagaatgttccacgtggagcagcgcttggagagcccctcccctaagggcgggtggggggaggaagggcgagggtttagacccccacccccattccacccaagcacccccactttgtctttactgcattgagactttgcctgagaggtcatttaacccagggccgtgactaaacacagctgccaggtcctctttcaagtctcattttgacttcgtggtgcacgcatgaccttgggccacttagaaacctcggtgtctcaggttccccacccataatagtaatagtacctccctcatagggtcctgggaaggatgagtgaataaacgcttgtgaagtgtttagaacatagtgagtctggatgactcaacagattgtttgctggtgagctgggtgtggtggcctacgcctgtagtcccagctaccttgggaagctgaggtgggaggatcgctggagcccaggcgttcaaggccagtctaggcaacatagccagaccttgtctgtgaggaaaaaaaaaaagatgtgttagatgttgctgttattattattactattgttttccaatgaggagagtgaggcccagaaaggataaggcgtttgctgcctggacgatgtggccagttggtagtagaagagggaatagtaacaaggcttcctggctgcccagatggaatccattatttcttggacatttagtggttgctgcttcatggatatctttgaagctaaacagattaacaaaagcccacttggtggtaggccatgctgcgtaaggagcctctggtaccacctccatgatcctcaggaacaggaggagtgaggagaggaggaagagggagagagaaaggaaggtggggatagagggaggaggtggaagaagaggagtcttgagtcttcttagctcagccactaaacgggaggtggtctcactggggatgcttctgagaggacactttcattaagaagaactaagccaggcatggtggctcacacttgtaatcccagcactttgggaggccgaggcaggtgggtcacctgaggtcaggagttcaagaccagcctggtcaacatggtgaaaccccgtctctactaaaaatgtaaaaattatcctggtgtggtggcaggcacctgtaatttcagctactcgggaggctaaggcaggagaatctcttgaaccgagatcacaccactgcactccagcctgg

SEQ ID NO: 7917 - DNA, 1469 bp, Artificial sequence
  DNA replication origin
ggaagtgactgatgggggggtcggcctgaagggggatggagaccatagagcaggaaatgactgatgagggggttggcctgaggggggatggagaccatagagcaggaagtgactgatgggggggtcggcctgaagggggatggagaccatagagcaggaagtgactgattgggggggtcggcctgaggggggatggagaccatagagcaggaagtgactgatgggggggtcggcctgaagggggatggagaccatagagcaggaagtgactgatgggggggtcggcctgaagggggattgagaccatagagcaggaaatgactgatgagggggtcggcctgaggggggatggagaccatagagcaggaaatgactgatggggtgggggggtcagcctgaggaggggatggagacatacagcaggaagtgactgatggggtcggcctgagggggggatggagaccatagagcaggaaatgactgatgcgggggtcggcctgagggggggatggagaccatagagcaggaaatgactgatgcgggggtcggcctgaggggggatggagaccatagagcaggaagtgactgatgggtctgcctgaggggtggggtgaagacggaggtggaggagtgagtgagacaaacagacccaggaggcttctccagcagcccaggagacaggcagcgaggacccaagggaatgctagtggaaacaggaaggaagaactgacccagcagaggaaaccagcaacagcctggggcgtggggactttgtcctcagagagatctgggtccaaatcccaccctccctgcctgttagctgggtgacattgaccaaggtgcttaacctctctgagcttcagttgcctcaaccggatatgagacaatttaggatctattttccagggtggttgtgaggatcagggaagttaatgaatgtaaagggcttgattaggggtctgccagctgtcatgttgatcttgagctgtaatattagcagtactgggtgactcagtaggtgggggaggggtggaggagctggaggagtcacagacaaaagtaaaatcattaacaaagaggaggagcaggcttgggcagcttggaaacttgacgtgttggttgtggttagggtgagtcagggacccgtgggacattcaggtggaagcgagacaggagatgggatgaggagagagagccgtgactcccaaggagaactgaggggccactggtgcggaggcgatcttggggatgttacaggaaagttgctgtcacccaaccagcgggcatgcctccgtgagtttattcagaacattggctgaggattccagatggcaactaggtccaccactctcaacactcattaaagctgtaatccaggggctgtgcactttcacaggtcatgtttcattaaacttttttggatagtagcgtcaaatgtcattgttttatttttaggtagagaaagggct

SEQ ID NO: 7918 - DNA, 966 bp, Artificial sequence
  DNA replication origin
ttgatgccccctctggcccaggagctgggttgggtgccagggacacaaagatggtcaaggcacattctgtccccaggacctcatagttcagccggaggactgagttcaaaatcagggagccgtgcattgagagaggcagagcagcacaggaaggaggggtcagtccagccatgggggcgcagtggaaataggccagttaaggcagattgtggcagagagcagatatggttgttccaagaggaggggagagcaggaaccacagcttcgaggagcacggggagggtagcgggggctgttggtcaagtggtgggattagccggcacctcaatatgagtcatgggtcaggtcacgcagagggggtggcagcaaaggaggttggggagggaggtcttggatcccaggcgagggaacatggctggtctcccaatggcactggggagccactgaaggggtcatcctgagggaatggcctggtcattgtgagacttgtgaatctccctctgaggatggcagtggcaatgtgaaggtggattcaaagcgggagttaaacatgggttctggactccggaactagggtggtaggtgttgggaaacaggaagggtcaggtgcgaggagtgttgagaaggcgaagctgcctggacttggtgacttggatgtggggatgaggtgaggcgcgaagtctctgtcctggacacctggtgccccgcactgcaggagcaggtggggagatagggagacactgaagcgcccaccctgagggaatgtccaggctagaagagcaggtgcccacggcaggtgacactgggagtcggggagatgcacagagggacccctgggaatgtgagtgttcggggatcagaggagggggagaggcagctgtcagagaggttggatacagttccccagaggctaaacaacagaaagtttggaggagagggcagtaccagtagccaacagggtcaaaa

SEQ ID NO: 7919 - DNA, 1354 bp, Artificial sequence
  DNA replication origin
ccaggcggcgcacccgcgcgaggacaagggggctttggctgggcggtgctgtctcaaccaatgggaagcgtggctctggccgagcccccctctctccccgccctccggccggccgttggggagcgctgctctgggattggctgcgccgccgtctcgggcgttctcgcgctctgcttacgtgctgacgcgcgcctgatagataccctgtgggtttgagcgctccggtcggtccctagcggcccaggcgccttgggcgtgcgtcctgcgcgcggccgcctccaggctgcgcccttctggggaagtgtttggtgctgcgcgcggcgtcgaactccgcgttttttttttttcttttccagccagtcagcctggaaatctgcctgtagtcagctgatgcagagtcaccctgcagttcctactttgaggggttgcagaagcacatatttcactatggagggccgcctgcaggcctcgcgctgacaggatcttttgtgacgctgcaaatgtcctggtcagtgtccttctttctacaagaggcgttggagccgggctctgcatagggcgtatatatccctggccgccaaggaagctgacccttgaaatttgtgaagctttcatattcactcaatacacatttacagagcctctacttcctgtcaggcgtcacacaataaatattcggaggagcaagaagagagtgattcaacatttgggtcttgtctgtagggtgctcacagtccgggtggggattggtggtaggatgggggcttgtgaatgtttataaacagaaatccctcgaatacgaccctggctaggtaggtgcagttacagaggcacagaagggaggagattgggcgaaagatttttgaattaggggattagaaaaggctgctcgggagagttatctgaaccagctaggacttggtcagatgcagtcagtttggtataggatgagcaaggctcgaaaattggaaagtacagggcttgttgagggatggtgtagcaaacggttgaatgagtagaggagaaaagtatagttggagatacggtttggaggagccaggtgaggactcgggggctcagcttgtgtcctcgggtttgaaatgcagtaagcacttgtgaatagaaaggctgcttaatcatttgcactactgtcatttgttacacctagaccaaacatcttggaaatggctttgattcttccttctttcatatcctacactcaatctgttggtaaatggtagcggactctaccttcaatataaagccagacttaccaattctaatcagttccatggttttcaccaaggctggtgtacatttctaaggaacacgttttcacatctcactgcagtgg

SEQ ID NO: 7920 - DNA, 824 bp, Artificial sequence
  DNA replication origin
gcgcgcagcaccaaacacttccccagaagggcgcagcctggaggcggccgcgcgcaggacgcacgcccaaggcgcctgggccgctagggaccgaccggagcgctcaaacccacagggtatctatcaggcgcgcgtcagcacgtaagcagagcgcgagaacgcccgagacggcggcgcagccaatcccagagcagcgctccccaacggccggccggagggcggggagagaggggggctcggccagagccacgcttcccattggttgagacagcaccgcccagccaaagcccccttgtcctcgcgcgggtgcgccgcctggactcccaccctggccagtcccgggcccaccaccactctggcatccccagcctgtccccgcggctcctcctccttccccggccctgtggcctgcctgctgtccagcattcttccccagggcgctgtggcgcggagggaggactccccaaaccccgggaacagagccttgcggaggaccccggaggaggaggaggaggagggacgcggacgggactgggagattcggtcgggaaggggacagggcctagagcccggggctagaaggcaggacacctggcttcggtctgggctcggcctttgactacgacgtgaccttgaggacggttccttcccttcgtggggcctgggtccccttcagtaagatgcgccggcaggaaacgatgagtcgtttcacctgggagctgcagggccgcgtgtttaacccagggcctcctcctgcctggcacattattccgaataataaatgccagatcatgctgctggagacgccggcagaaaagccgaga

SEQ ID NO: 7921 - DNA, 939 bp, Artificial sequence
  DNA replication origin
ctgggatgtgaggagcccctctgcccggctgcccagtctggaaagtgaggagcgtctctgcctggccaccatctcatctaggaagtgaggagcgtctctgcccggccgcccatcgtctgagatgtgcggagcgcctctgccccgccgccccgtctgggatgtgaggagcgcctcttcccagccgcgaccccgtctgggaggtgaggagcgtctctgcccagccaccccatctgagaagtgaggagaccctccgcccggcagccaccccgtctggcaagtgaggagcgtctccgcccggcagccaccccgtccgggagggaggtgggggtcagccccctgcccggccagccgccccgtccgggagggaggtggggggtcagccccccgcccggccagccgccccgtccggaaggtgaggggcgcctctgcctggctgcccctactgggaagtgaggagcccctctgcccggccaccaccccgtctgggaggtgtactcaacagctcattgagaacgggccatgatgacaatggcggttttgtggaatagaaatgggggaaaggtggggaaaagattgaaaaatcggatggttgccgtgtctgtgtagaaagaggtagacatgggagacttttcattttgttctgtactaagaaaaattcttctgccttgggatcctgttgatctgtgaccttacccccaaccctgtgctctctgaaacatgtgctgtgtccactcagggttaaatggattaagggcggggcaagatgtgctttgttaaacagatgcttgaaggcagcatgctcgttaagagtcatcaccaatccctaatctcaagtacccagggacacaaacactgcggaaggccgcagggtcctctgcctaggaaaatcagagacctttgttcacttgtttgtctgctgaccttccctccactattgtc

SEQ ID NO: 7922 - DNA, 1461 bp, Artificial sequence
  DNA replication origin
ttaaccctgagtggacacagcacatgtttcagagagcacagggttgggggtaaggtcacagatcaacaggatcccaaggcagaagaatttttcttagtacagaacaaaatgaaaagtctcccatgtctacctctttctacacagacacggcaaccatccgatttttcaatcttttccccacctttcccccatttctattccacaaaaccgccattgtcatcatggcccgttctcaatgagctgttgagtacacctcccagacggggtggtggccgggcagaggggctcctcacttcccagtaggggcagccaggcagaggcgcccctcaccttccggacggggcggctggccgggcggggggctgaccccccacctccctcccggacggggcggctggccgggcagggggctgacccccacctccctcccggacggggtggctgccgggcggagacgctcctcacttgccagacggggtggctgccgggcggagggtctcctcacttctcagatggggtggctgggcagagacgctcctcacctcccagacggggtcgcggctgggaagaggcgctcctcacatcccagacggggcggcggggcagaggcgctccgcacatctcagacgatgggcggccgggcagagacgctcctcacttcctagatgagatggtggccaggcagagacgctcctcactttccagactgggcagccgggcagaggggctcctcacatcccagacgatgggcggccaggcagagacgctcctcacttcccagacggggtggcggccgggcagaggctgcaatctcggcactttgggcggccaaggtaggcggctgggaggtggaggttgtagcgagccgagatcacgccaccgcactccagcctgggcaccattgagcactgagtgaacgagactccgtctgcaatcccggcacctcgggaggccgaggctggcagatcactcgcggttaggagctggaaaccagcccggccaacacagcgaaaccccgtctccaccaaaaaaaatacgaaaaccagtcaggcgtggcggcgcacgcctgcaatcgcaggcactcggcaggctgaggcaggagaatcaggcagggaggttgcagtgagcagagatggcagcagtacagtccagcttcggctcggcatcagagggagaccatggaaagagagggagagggagaccgtggggagagggagcgggagagggagagggactctcagataactttctaaaacctccgaagatcttttttcatgtgtgagataataatagaagatattcctgagagttttgtgtatttttgtgtattttccttgcttgtggatggaagcgcgatgtcttctattaccaaatgtgcctaagccccagcctgtggctctaaagaaggttacatcaacataaaagtcacattttaattttctgtctccctgcacctgcctg

SEQ ID NO: 7923 - DNA, 974 bp, Artificial sequence
  DNA replication origin
cggtccccagcgggtccgagcggagcgggcgccgggtccccgcgccccctgcccggggatcgggaaggggctgggagagccctgggccggtgcgagggggagccgcggagtgtactcgggggcctggggagctcggtccttagcaggtaggccgcgtcccggtgaaggtcgcgaccccgcgggcttgctgggcgtcccctccgccgctttggtccgggcctggggtccggcgacctcgcgggctgaggtagcccctcgcctctgcctggcgggtggactcggggaggagtcgtgtctgcccaaggtcaccggggtggagtcctggctgggccgggcctctgccgccctctgtgagggttgtcctgcggggccgcccgcagcccgtgggtggggctggcggggcgggtgaaaccgcccgggtgggtgcgaggagtggccgggctcggccgggtgggtgtccggtgggaagcgcggcgcgcccgagcttgggcttgcagttcccctttccagagagcgcaaatctgtgcatgtccacttcgggatcttggaagttaaggacctgtactttgggtcctgtttggtggcccttgtgccaccaaaaatgtgccggtgtttaaaagcagctgtgccagtttttaaaaatcagacggagagctcagggcactgaccgagcgaggactccaggacctgtgcttgcctgtgcgctgagtacctcgagggccgggctcggcttagtccaggatgatggtcagggttatacttccctgagcccttgctctctgagtgtctgagtgtgccctctacgattgcatcttcagaatcggccttctaggattttatttaatcaagcgaaattggataggtttagttgtttggttcttttaaatgaacttagccacccacctcttaattacaaagtaattttaaattgcagagtaaaaatctcaataggaaccaaggcattcagcaatatt

SEQ ID NO: 7924 - DNA, 1712 bp, Artificial sequence
  DNA replication origin
caccgggtctccagctgcacggccctcagactggaacatcagctccccgccgggtctccagctgcacgaccctcaaactggaatagtttgaactcagcggggagctgatgttccagtttgagggccgtgcagctggagacccggcagggagctgatgttccggttgtagggctgtgcagccggagacccagggggaagctgatgttccagttgtagggccgtgctactggagacccaggggtggagctgatgttccagtttgagggccatgcagttgatgacccggcggggagctgatgttcaagtttgaggtctgtgcagctggagacccgcgggggagctgatgttccagtttgatggccatgcagctggaggctctgatgggagctgatgttgcaatttgagggccatgcagctggagacctggcagggagctgatgttccagtttgagggccgtgcagctggagacccggcagggaactgatgttccagtttgagggccatgcatctggagacctgggcggggagctgatgttccagtttaaggccatgcagctgtatgcccggggggaactgatgttgcagtttgagggccatgcatctggagacccggtggggagccagtgttgcaggttgagggccgtgcagctggagaccctgtggggagctgatgttcctgtttgagagccgtgcagctggagatcctgtggggagctgatgttcctgtttgagagccgtgcagctggagatctggtggggagctgatgttcctgtttgagagccgtgcagctggagatcctgtggggagctgatgttcctgtttgagagccgtgcagctggagatctggtggggagctgatgttccagtatgagggccgtgcagctggagacctggtggggagctgatgttccagtttgagggccgtgcagctggatacccggcagggagctgatgttccagtttgagggccgtgcacctggagacccggcagggagctgatgttccagtttgagggctgtgcagctggataccgggggtggagctgatgttccagtttgagggccatgcatctggagacccagtgggtagccagtgttgcaggttgagggctgtggagctggagacccgggttggggggagctgatgttccaggttgagggccatgctgctggagatccagcggggagctgatgttgcagtttgaggcggtgcagctggacatgcaggggggaagtgatgttgcaatttgagggctgtgcagctggagaccctgtggggagctgatgttcctgtttgagggtttcggagctgatgttccagtttaaggccatgcagctggagacccggtggggagccgatgttccagtttgagggccatgcatctggagacccggtggggagctgatgttgcaggttgagggccgttcatctggagacccagtggggagctgatgttgcaggttgagggctgtgcacctggagccccggggtggagctgatattccagtttgagggccgtgcagctggcaatctggtggggagctgatgttccagtttgagggccatgcagctggagacccggcagggagctcatgttccagtttgcaggcagtgcagctggagacccggcggggagctgatgttccagtttgaggtccgtgcagctggagatctggtggggagctgatgttccagtttgagggccctgca

SEQ ID NO: 7925 - DNA, 1232 bp, Artificial sequence
  DNA replication origin
ccctcaaactggaacatcagttccctgccgggtctccagctgcacggccctcaaactggaacatcagctccctgccaggtctccagctgcatggccctcaaattgcaacatcagctcccatcagagcctccagctgcatggccatcaaactggaacatcagctcccccgcgggtctccagctgcacagacctcaaacttgaacatcagctccccgccgggtcatcaactgcatggccctcaaactggaacatcagctccacccctgggtctccagtagcacggccctacaactggaacatcagcttccccctgggtctccggctgcacagccctacaaccggaacatcagctccctgccgggtctccagctgcacggccctcaaactggaacatcagctccccgctgagttcaaactattccagtttgagggtcgtgcagctggagacccggcggggagctgatgttccagtctgagggccgtgcagctggagacccggtggggagctgaacttccagtttgagggccatgcagctggatacccggtggggagctgaagttccagtttgagggccgtgaagctggagacccggtggggagctgaagttccagtttgagggccgtgaagctggagacccggtggggagctgatgttccagtttgagggccatgcagctggagacccggtggggagctgatgttccagtctgagggccgtgcagctggagacccgatggggagctgaacttccagtttgagggccatgcagctggatacccggtggggagctgaagttccagtttgagggccgtgaagctggagacccggtggggagctgatgttccagtttgaggcccgtgcagctggagactcgggggtagccgatgttgcagtttgagggccgtgcagctggagacccgggtgggaaccgatgttccagtttgggagccatgcagctggaggcactgcggggagcagatgttccagtttgatgttcctccctgggtctccagctgcacggccatcaaactggaacatcagctccccggccctcaaaccggaacatcagctccccgccggatctccagctgcacagctgtcaacatcagctcctccccgagtcctcagctgcacgaccctcaagttagaacatcagcttctccccaagtcttcagctgcgtgaccctcaatctagaacatcagttcctctacaggtctgcagctgcaagacc

SEQ ID NO: 7926 - DNA, 1040 bp, Artificial sequence
  DNA replication origin
cagagcttcctgtggaacgtcttccagagctgccacctggcaccgccccggcacctcccgcctcccccgcagctgccccggacccgtgtcccgacccccgcggccaaccccgttccctgccggttgccccgcggcctcccccgtcacctgccgggtccccagcggcctcccccgtcccctgccccgacctccgccgtctcccccgcccctgcccggacccccgcgggcgcccccgaaccctaccccgaccgacgcggccgcccccatcccctgccccgacccccgcggccgcccccatccccttccgggtcccccgcggtctcccccgtccgctgcccggtctcctggggccgcccctgcctcctgcccggtccctgtcctgtgcgtcgggcccttcccaaggtgcagagggcgccactgcagacccgaggtcgcggccaccggctcctgggccaggccctgtttctcgcctcgagccgtcgggggagggtctccagggtgcttgtttggggaaagcggaaacagactgtctgggccgctgttaaaatgtcagcagccaaggaagaagcagcgacctggcgtctgctcgggccaggtgacctttatggcggcgccttctgtccctggtcgcttttccactgaatgaatgaccgaaactgtagtaactcatggccagggaatggcttagttatctgagggaatcttgtcttgtctgtgaaaaagggaaactggtgcaaatgggaattcagacaggtcaggaggggaaggaagggaaggattgaggtgggaaaagagagagaaagatgattggcctcttaggggaagaacacacttggacgtggctcctggggcacttccttgattccgctgtactcgtcagcgggaccggagaggcggaggttccaggagggagccttccagagtcggtgcagggttgacaggagacgtttgttttgcttttcctgaactttcgatcgccagcttgtttggtcttcttgatgttatagggttgatagagaggagtggagtgatatcggaca

SEQ ID NO: 7927 - DNA, 1042 bp, Artificial sequence
  DNA replication origin
ggggatgggggcggccgcgggggtcggggcaggggatgggggcggccgcgtcggtcggggtagggttcgggggcgcccgcgggggtccgggcaggggcgggggagacggcggaggtcggggcaggggacgggggaggccgctggggacccggcaggtgacgggggaggccgcggggcaaccggcagggaacggggttggccgcgggggtcgggacacgggtccggggcagctgcgggggaggcgggaggtgccggggcggtgccaggtggcagctctggaagacgttccacaggaagctctggtcgggcagcgccgcgcccgcagcaggcccagggccgcccaaggccggggcggtaggagtaggcggccaagggccaaggcgcgcggctgggctgaggcacctgcggccacgggcgacctcagagcgactgtgcttccgcctctgccgggggcagggccaggcgttaccgccgcttccgggggcgcaggaaatgcgcgttgtccgggatcctccggcgcaggccacctgcgcgcggggccgggaaggcgcttggaggaaatgtcccgcgccgcgacccgggacaggcagtgatggagcagggatttcgtttgccttttagttcttgtataaaaagaagttttgacgtgaatgtgattcacgctaacagtcggaaactctgggcggggcgcggtagctcacacctgggatccctgcgctttgtgaggcggaggcgggcggagctcttgagcccagcagtgcggaccagcctgggcagcggggctagaccccatccctacaaaaattacagcaagtagtcgggcgtggtggcctcctgtggtcccatgtactccgtgggctgaggcgggaggatcgcctgagcccgggaggtcgaggccgcagggagccgagatcactgcagctccagcccggtggacagcgagactctgcaaaaaaaaaaaaaaaagcaagcaggccgggtgcggtggctgacgcgtgtaatcccagcactttgggaggccgaggccggtggatcacctgaa

SEQ ID NO: 7928 - DNA, 1232 bp, Artificial sequence
  DNA replication origin
aacctccacggctgacatgtaatgggatgacatggtccaataaatgaaggaaaaataacaggtggcaacctcaagcagcttcatcccaaccagtaagaaagtaaatccttttgtaaactaagaggaagtattaatatgggtgtttgagcaaacatttaagtgttagaacaaagaattaaaaactagcacaggcacccctgaagcatgataggatggcaacagaagggctgatttagtttccaagaaataactgacaggcagtgttgtgcgtgtgtctactacttaggaacccaaaacaaaccttcagaccgttttcatgagtactgagaccaagaaaaccactgggcagtgggtggtctggaaatgtaaatgttgatggtactccagtaatgagtcatggaacaatgtttcatattgaaaatgtttttgtaaatgtgggtttcaaggtttcaaagtgaacctgtatgtgttaggagaaaggacacaccaaagaagtaaaataattgggtcaatagaaaaagaaagtagaatactgcccagagagaagatgtggataattcctaacacggatcaaaggcaccaaaaaggtgagctgtgggtaagatattcagacctgcaccgtcccctgcattagacacagacaacatcttggtaggcaactgggtgaaaattcagagacaaccctaggaactatgaggatgaaaaaagttagcattcatggaatgaggcactgacgaaactgaaaagctggaataaccccatgaaataacgagaataattgtagtattctgaaccggggcacaggacacaggactggagtggaaggccgcatgagaccaccccgggaaagacccagggatcacactggcccaaaggtgggcacttcccaactccgggatttgtgctacaggcactccaggctccaccatagaactgtgtccagcacgaaggcagtgctgtcttgcgggaggcagggctgcaccaccacaggggcgggaaggggcccggcagggaggcgcccagtgtttccaactgcacggggtcggggaccgcgctgatgcagagcgcgggggcgcaggttaaacctaaaggagggaagcttttgggggcggaacagacaacggagaacgctgcacactgcccttcccacccgaattgtgctttgcctttttttttttttttttttttttttttttgagacggagttttgctcttgttgcccaggcctggag

SEQ ID NO: 7929 - DNA, 1113 bp, Artificial sequence
  DNA replication origin
gggcacctggaacagggtggtcctggggcggccacatccactccttccaggtgagttcccggtgactctcggcctgcagtcggccttgctgaattctcttaggccacctggctgccccctgctacgcgtccagctgttgatcgcccactgacctgtagaagacctggtcagcccctctgtcttccgtcacccatggaggcgcctgcaggtgctccgcgcagcccgcccggccctgcacagacccgaggcggcaccagggggcgctgccggcccgaggacgcgggcgcggggcggaggctgcggggcaggagccgctgtgcgcgttcaggcagctgcccgggacccctggcaccgaccgcagcccccagaggcccccggggggtttccgcctgagcctaaaccgaagacagggcctgttttcagtcatcccgaccccacagactctgcccgttagttcccgcgctgcccggcgccctagtacccagagccggtggggactccaggccaccaaaggcaggggcggggcgggcggttgaaggaagattgggacacggagaagagggacaaggcctggggcccgaggggtcaggacgctctgccagcctcaccacccgccacacccaggcacggacgcacgcacacactccacacgtgtgaacacgcacgcatggctgcacacacgtgcacagagaggcacagcccgcaggaacacagatgcacgcacacaggcacaggcacgctccctcactcactctcacacaccccaggtgcagacacccccacccagaggttgcagctcggatggagaaacaggctgggtcacaaaagccccgggaggcagcccctgctgtctggcgtcttctctggggaaagctttccggagcctgatggaggaagacagaggaaagagacctgtgttccctgatgcactggccagctgcttcccggggaggaggaggcagaaatatacagtaactgattgttgcctttggtctgtgaactgtactatggaacactggaacttactccttcacctgactgcatgtttgtgccccataaccagcctcactttctgtctgcctctcacccacacaccctgcctagcctctggga

SEQ ID NO: 7930 - DNA, 1601 bp, Artificial sequence
  DNA replication origin
cccccatagtgtccccggaatggacggactcacgggctgtcacatcgcgcacatcttccccggagaagggatgtgaatcttggtggggtggggggcactacctggcccagcacagggtgcaggtgggtgacccgggagactctccccgctccagacctgtcatcatgttgccatctgaggcggcactcacaggtttgcggggctgcacatctttgggggcctccactcagcctggcacagtgtgtgcccagcaagtagacgaccgcatcctcgccagcacacatgtgctagaaacttctgtcaggaaacgccgctcttcacagccaagggtggaaactactggatgcattgcagagctgacgccctccctccggcctggctccgagccatgcctggtgtggtggaggggtggaggccaccctcaccgggccctgtgtgctgctctgatgccgctgagggggccggggcctgggtgtgccctcagcgcgtccactgcagaggggagcctgcgcccacgttttggctctgtgggtaaaggtggccaccccctgagcttgtaggggtgtgggacacttcccgatgctgcctgccatgattttacatgaaaagccgggaaaaggcactgaggagccacctgaccccacggaatgccatttcctggtgtcgcttggccagaagtcattgacacagccctgccagccggaagctggggcagggacggggtcctgccttctgggacaggttctgtgtgtgcgcgaccatgtcccagaggtctctgctcagccctgggggccggtgggggtggggttggagggtggatggtgggggtggggccaagttagcccgagcggtctgtgaggtgagaagggccggggtctctcctcctctcctccgcaccccaccccgccttgctctgaatctctccctctctctgtctctgttggtctctttccctctctactccccattctggtgtctttggagccctgggtaaggtgtgtgctgagtccggtctggtttggggtagatgttctttgatctgttaccacacctggagggaaagcccctggcccgccccccctccgttcctgcagagccaggccccccaaccagtcggtgggcaggatgcccaccagttgcccccatctggcccagggggacctttcctctgctctccagggaccactgcaggtggtgtggcccctgaggggagcataagggtgcagtgcctgactcaggggacacagaagccccgtccatacggccttttacacagcacagcacccagccctcggcagcccagagcaggaaccaacagggtaggtgcccaggggccccaaaggtcagagttcctcgcacagctgccagggagcacagggaccgcagcacagggtcttctgctcagcaccgggaccccgctcgctgcagctaaagaaacagatacgtccaagggctccacggccggggccgggcacctggaacagggtggtcctggggcggccacatccactccttccaggtgagttcccggtgactctcggcctgcagtcggccttgctgaattctcttaggccacctggctgccccctgctacgcgtcca

SEQ ID NO: 7931 - DNA, 1044 bp, Artificial sequence
  DNA replication origin
agagacagagagagggagagattcagagcaaggcggggtggggtgcggaggagaggaggagagaccccggcccttctcacctcacagaccgctcgggctaacttggccccacccccaccatccaccctccaaccccacccccaccggcccccagggctgagcagagacctctgggacatggtcgcgcacacacagaacctgtcccagaaggcaggaccccgtccctgccccagcttccggctggcagggctgtgtcaatgacttctggccaagcgacaccaggaaatggcattccgtggggtcaggtggctcctcagtgccttttcccggcttttcatgtaaaatcatggcaggcagcatcgggaagtgtcccacacccctacaagctcagggggtggccacctttacccacagagccaaaacgtgggcgcaggctcccctctgcagtggacgcgctgagggcacacccaggccccggccccctcagcggcatcagagcagcacacagggcccggtgagggtggcctccacccctccaccacaccaggcatggctcggagccaggccggagggagggcgtcagctctgcaatgcatccagtagtttccacccttggctgtgaagagcggcgtttcctgacagaagtttctagcacatgtgtgctggcgaggatgcggtcgtctacttgctgggcacacactgtgccaggctgagtggaggcccccaaagatgtgcagccccgcaaacctgtgagtgccgcctcagatggcaacatgatgacaggtctggagcggggagagtctcccgggtcacccacctgcaccctgtgctgggccaggtagtgccccccaccccaccaagattcacatcccttctccggggaagatgtgcgcgatgtgacagcccgtgagtccgtccattccggggacactatgggggtcactgcggggggcgggcaaacagaggtgcttcagcccacacaaacaagctaattgagtttttctgtttgtttggttttgagcgaaaacgtgaacattttgtcca

SEQ ID NO: 7932 - DNA, 1174 bp, Artificial sequence
  DNA replication origin
ctgcgggagcggcctgggattggagggcgcggcttgcgggagcggcctgccgttggaggggcgcggtctgcgagcgcggcctgggattggaggacgcgtcctgcgggagcggcctagcctcggagtgctcgccgggggctgtagtccccggagccggaagtgggggtggccgggatagaagccgcagcccaggcggcggtccctcccgctgtcgccgcccgggtgtagcgcatcacccggagcccaccggccgcaggtgcctcctccggccccagggggccccgggagccctgaagggcgaagcggcagggacgcctctcttgggcgaagaggcggcctcaccgccccggatgcggccggagggcgcgggaatggagctcggaggcggcgaggagcgcctgcctgaggagagcaggtgggctgggagccgccgcggagtcggggcagcgacaggcgccggagccccgggaggcttgggagggcgcggggtcacggagagaagggccgggcgcgacgagtcttgaggacgacggctgcggaggacttgtttgggaagcatttcgcagaggaaggacgggcggggcggggatgggacgaaggaaccggcttagggtgaggagggtgggtgggatttgcggagggcaagggcagcagaggagggtgaagctcagatccaagactgctggagaggaggtggcagctgagagactgggcgaagaggccagaggggtgcagtgaggttttacaggccagagtctatagacaggggcagggcaccacccggactgaaacttgccgtgacagcaagtggggccaacgcgaagaggatgtgagaattcctgggagcagaggtgaagcgttatgagtggcctcggaagaagcttaggcagagatgagcatggggatgaaggcgaggagagcctggggagaaagtgagcgagtgtcatggcagtgcggtggggcggggactgctaatgagaccagaaactctgcactttgtcattgccgaatccctgtcagagagtggcaggacctctgtgccatttccttttcgtcttcaaacctgtccctttttcctcacaatgcaaactaagcaagttcacatttatttatatggaaccatgtcagaaagctcatatcttctagaaattgggggatttaaaatataaaaact

SEQ ID NO: 7933 - DNA, 1186 bp, Artificial sequence
  DNA replication origin
agttttctcgctggtgggcggacccgagcggaggcccggaggacagccgggagcgcaggctcgacgccaggtgcccggctggaccgcgagggacccgggcgtcccctcggccgcggcagtcggaggaggggctgtggaggcgggggcaggggcgctgcgggcccgaaggttcgcagggtcgcggggggcgtctcttctccccggaggggctacggctcgccgctcgccggctctttgtgaggaaagatctgccggtttccccggagcgcgttcgcggtgggcgttatcggggagcgaggggaatggtccgaccgagccgttctctctgaagaaaggtcttggagagcccggccggggctgcggtcggttaaaccagcgcttccggagctttccctggtcgccgggcgttccaggccggcgccggccatggctgccgggcgcgactctcggggccacctccggccgcggccccggagcgtctgtcagaaaggaagcagcgctcggccgcctgtgggatgtggttgtgtattgagcgctgcctagaaaagcacagtctccctctccaggcctcagagctagctaatgggggagaaagcaaacatctttgaaggagagatgattgctgtggctcgctgagaagccaggtaaagcgtggggttcttgagcgcatctgagagggtggcgtggtttcttgccgattatataaaaaccgggaggttggtgattccattaaaatccagccctgacactaccgaggcaccagccgctgtggttagcttaggtgggctaaaagtacgaatatttttgtcgggattcaagtgatggcgttgggtgtaagtcagctctgccaggtgtttggctggcagtttttcggatatttgaaaagtacctgactagtggattccgaggcgtaccctttcccaggacggtctttagagtgataactgtcttggaaaccttctttcggttttcatttcttcccatttgtcttgtgtgtcttttgttgtggtttatctggaacgtttttggttccaggtgagatgggaactattgatttctacgattgccacagtcagaatccagtatgtgaactaagcaaatgatcagaaataataggtttggcctcaagtcttgccttgctgctggttagtagtgagcttgtaagaaatgagaaagctggggctgg

SEQ ID NO: 7934 - DNA, 1068 bp, Artificial sequence
  DNA replication origin
cagcggtccggccgcgcatgcgctgagctggcgggcccgagtgttgtcggctgggaaatggcggccgcgggcttggtcgctgtggcagcggctgccgagtactctggcacggtagcgtcgggaggtaacctccctggtgttcactgcggcccaagctccggggcaggccctggttttggcccgggctcgtggagccgctctctcgatcgagccctggaggaggcggcggtcactggggtgctgagcctgagcggccggaaactgagggagtttccccggggagcggccaaccacgacctgacggacaccacccgggcgggtgagcggggcggggggcgtctctgcccgtcggagacccggcgccgggagccgccccggccgggggaggcggatgcgggggagttacagcagctcgtcccgtaggcgccgggtccggacccgggtaacggggagaagccgacggcgccagccctccgggcctgcgccagacccagagcctggggagaggcggcgggcggcggcatctctcggggaagggggccggagtgattgatggatgattttttaggctttctgaggaaaatcagtttctgccacggcggaggtagacccttgccccgccccggtttctgcaggccctttcggatttggggtgccgaatggacctgctaagacgggaacgttagcgcgagctcttcacagatcagagtagcaggggtgtctggacgagctgcattgtcaggaagggtcggtctcagccctggagttttttcgaaagaagtgttggggagcgtgtgtttaaagtggacccgaaagaagtgttggggtgtgtgtgtgtttaaagtgaacccgagagaagtgttggggtgtgtgtgtgtttaaagtgaaccccaaagaagtgctggggtgtgtgtgaagtgaacccgaacgctggaacgtctttcttcgcctccatctagttgacttacaaaataaatacgcttgtaaaaataactagagcccactttccgactcccattagtttcctcttccactcctcatgtcctccaaaaaaaagttgaagcaaac

SEQ ID NO: 7935 - DNA, 3953 bp, Artificial sequence
  DNA replication origin
aagatgagaatagtattttcttttcctttttttttttttttttttgtttttgcaacagggtcttgctgtcacccacactggagtgcagtggcatgctcacagctcaccacagctgtgacctcctgggctcaagggatcctctcaccacagcctccaagtagctgggactacagggccacgccaccatgccagcctaatttttttactttgtagagatggggtcatgttgcccagtctggtctcaaactcctgggctcaagccatcttccctcttcccaaactgctgggattacaggtatgagccaccacaccacacccggcccaccaggggaatttttttttaaatataacaatagaaatatcagtaccacttctaattcctggaagatggactagatgtgcttttctctattcccccttctaagtacaactaaaaacccagacactgtaaattaaagaaacaaaagaagactctgaagggtggagagaagtcagactagttaggggactctgaagggtacagagaagtcagactagttaggggactctgaagggtggagggaagtcagactagttagggggctctgaagggtggagagaagtcagactagttagggggctctgaagggtggagagaagtcagactagttagggggctctgaagggtggagagaagtcagactagttagggggctctgaagagtggagagaagtcaaactacttagggggctctgaggggtggagagaagtcagactagttaggggactctgaagggtggagagaagtcagactagttaggggactctgaagggtggagagaagtcagactagttagggggctctgaagggtggagagaagtcagactagttagggggctctgaagggtggagagaagtcagactagttagggggctctgaagggtggagagaagtcagactagttagggggctctgaagggtggagagaagtcagactagttagggggctctgaagggtggagagaagtcagactagttaggaggctctgaaaggtacagagaagtcagactagttagggggctctgaagggtggagagaagtcagactagttaggaggctctgaaaggtacagagaagtcagactagttaggggactctgaagggtacagagaagtcagactagttaggaggctctgaagggtggagagaagtcagactagttagggggctctgaagggtggagagaagtcagactagttagcgggctctgaacggtggagagaagtcagactagttagggggctctgaagggtggagagaagtcagactacttagggggctctgatgggtggagagaagtcagactaggtagggggctctgatgggtggagagaagtcagactagttagggggctctgaagggtggagagaagtcagactagttagcgggctctgaacggtggagagaagtcagactagttagggggctctgaagggtggagagaagtcagactagttagggggctctgaagagtggagagaagtcagactagttagggggctctgaaggatacagagaagtcagactagttaaggggactctgaagggtggagagaagtcagactagttagggggctctgaagggtggagagaagtcagactagttagggggctctgaaggatacagagaagttagactagttagggggctctgatgggtggagagaagtcagactagttagggggctctgaagggtggagagaagtcagactagttagggggctctgaagggtggagagaagtcagactagttagggggctctgaagggtggagagaagtcagactagttagggggctctgaaggatacagagaagttagactagttagggggctctgatgggtggagagaagtcagactagttagggggctctgaagggtggagagaagtcagactagttaggggactctgaagggtggagagaagtcagactagttagggggctctgaaggatacagagaagtcagactagttaaggggctctgaagggtacagagaagtcagactagttaggaggctctgaagggtacagagaagtcagactagttaggggactctgaagggtacagagaagtcagactagttaggggactctgaagggtacagagaagtcagactagttaggaggctctgaagggtacagagaagtcagactagttagagggctctaaagggtggagagaagtcagactagttagggggctctaaagggtggagagaagtcagactagttagggggctctgaggggtggagagaagtcagactagttagggggctctgaagggtacagagaagtcagactagttagggggctctgaagggtacagagaagtcagactagttaaggggctctgaagggtacagagaagtccgactagttaggaggctctgaagggtggagagaagtcagactagttagggggctctgaagggtggagagaagtcagactagttaggggactctgaagggtggagagaagtcagactagttagggggctctgaagggtggagagaagtcagactagttagggggctctgaagggtggagagaagtcagactagttaggaggctctgaagggtacagagaagtcagactagttaaggggctctgaagggtacagagaagtcagactagttaggaggctttgaagggtacagagaagtcagactagttaggaggctctgaagggtggagagaagtcagactagttagggggctctgatgggtggagagaagtcagactagttagggggctctgaagggtggagagaagtcagactagttagggggctctaaagggtggagagaagtcagactagttagggggctctgaggggtggagagaagtcagactagttggggggctctgaagggtggagagaagtcagactagttagggggctctgaagggtacagagaagtcagactagttaggggactctgaagggtacagagaagtcagactagttaaggggctctgaagggtacagagaagtcagactagttagggggctctaaagggtggagagaagtcagactagttagggggctctgaggggtggagagaagtcagactagttagggggctctgaagggtggagagaagtcagactagttagggggctctgaagggtacagagaagtcagactagttaggggactctgaagggtacagagaagtcagactagttaggggactctgaagggtacagagaagtcagactagttagggggctctgaagggtacagagaagtcagactagttaggggactctgaagggtacagagaagtcagactagttaggggactctgaagggtacagagaagtcagactagttaggggactctgaagggtggagagaagtcagactagttagggggctctgaagggtacagagaagtcagactagttaggaggctctgaaaggtacagagaagtcagactagttagggggctctgaagggtacagagaaggcagactagttaggggactctgaagggtacagagaagtcagactagttaggggactctgaagggtggagagaagtcagactagttaggggactctgaagggtggagagaagtcagactcgttaggaggctctgaacggtacagagaagtcagactagttagggggctctgaagggtggagagaagtcagactagttagggacttcaggactcaaagactgatatggtggtgaattctctcaacaactgatagaccaactaggcaggaaattagcaaggatatagaagaacccaacatcatcaaccaacaggacttaactgacatttgtgcaacgcttcacccagcgtccgaatgtacacggtggctcccgcctgtaatcccaacacattgggaagccagggcgggcagatcagctgaggtcagcagt

SEQ ID NO: 7936 - DNA, 1205 bp, Artificial sequence
  DNA replication origin
acgcacgccgcctggggcgcagcgcagagacaggcggaacctcagtaatctgaaaagccaggttgccccctccttgcggccgggcactaaagggcccacttgctgaaggcgctgtgccagcgtgccccctgctggtgactggggcaactgcagggttctcttgcttccattagtggccagcggcccctgctggcggcggggcaccgcagggtcctcttgcacacagtatagtggcggcatgccgcctgctggcagctggagacattgcagggctctcttgctcatagtatagtgacaggacgcccgcctgctggcagctggggacactgccggccactcttgctccaagtgtagtggctgttggctcccctgctggcagctggggacactgccgggccctcttgcttgcagtttactgggggcacgcccccttctggccgcttggggcactacaggatgctcttgctcacagtgtagtggcagctcgccgcctgctggcaaccagggtactgcagggttctcttgctcatggtgtggtgcccgtccaccacctgctggcagctaaggacactgcagggccctcttgctcagagtgtagtcgtcgtacaccccctgctggcagctggggacgctgccgggacttttcctggcactgtcgtggcagcacactacctgcaggcagatggggactatgcagggacctcttgttcagggtgtgagggctggcacgccctactggccgcctcctgcaccacttaaagtcggagcgccagttaagcaccatcagttctggaaattgaaactgaaatggagctattactgaggagagttgatgtcccagttcttgtctaacttggaagaaagatttttcaccaagaggcagtaaaaacatggcagataacttcattgaaaacaaatacagtgtaaagagcttattgtagaataatagggaggagtgggctgattgtgcaggaaaacagcctgagagtcctgtgcagggaattttattttggacttcttcacatttctgcctctgtctcaagtctccacctgttttctttgtctggttttcctgctactgccttaggtccctgagttgccccacttaggcttatgggacctcctcactgttggttgaggcacatgtgtgctgatcaatccgaatccactctggtaccaggctccttccccccatcccaggcagg

SEQ ID NO: 7937 - DNA, 746 bp, Artificial sequence
  DNA replication origin
agttggagcgggcgggtgatttgcttcgcttgctcacacacctcacaaaagcctttccttcaagacccgctggcagtccccaaaccaggagccgcggccgacgctgtcccattaatgagaccccgtttgctcacatgaactttgtttcgatggggcctcgatctcattccgaacagggtaaagtagggaccggacccccggaccacagctcctcccaggcgggcacctcgcacgcgggcgccggcgtcttccagatgagctcctcctcaccccgcggcccagggaaggtgcggggctgcgggcgcagaactgcacaaggagggccgcaggctgggccagagccgccgtgcggggaccgacaggagcccggtccgtcaccggaggggactgagggctgagaggcggcagcggggactccgttcgcagactcggtcccgccgccgccatttcccgccggttccgatgaggcctccccagcctccggacgccctgccccgcacactcaccatttcccgacttcagggtatccgggagtcttagctacaaattgtccaataccctcaggtcacagagcaacgggaggcagaggctgtggctgaatcaccgaggcctcccggagccgagaacgcagagagctgaagccctaaaccaagccctcgcaggagccagaggaaaacgccgcgccagatcccggaagccaacccctcctctctggctgcgggcctgattgggcagttctcattccg

SEQ ID NO: 7938 - DNA, 1166 bp, Artificial sequence
  DNA replication origin
agcctgcggccctccttgtgcagttctgcgcccgcagccccgcaccttccctgggccgcggggtgaggaggagctcatctggaagacgccggcgcccgcgtgcgaggtgcccgcctgggaggagctgtggtccgggggtccggtccctactttaccctgttcggaatgagatcgaggccccatcgaaacaaagttcatgtgagcaaacggggtctcattaatgggacagcgtcggccgcggctcctggtttggggactgccagcgggtcttgaaggaaaggcttttgtgaggtgtgtgagcaagcgaagcaaatcacccgcccgctccaactattccaccagtccctttgccctgtgcacctcctccgcgtggctgttcctgagtaacatcttttagaatacgctggtgtcggtgcgcacggcgcttctcagttctgtgagtagttctgccacattgctgaacttgagggtgtgggcgcccctggtttgtagacaggcgttcagaaatgaagacgggtgtccagaggcagggactggcgtctgcagcgggagcagttgtgggaagagcgctgagcttgtggggtctgcgctgactctgggtggtgtcgttagtgagttgctggacaccgcgttggggttggagcattgactggtgttgaggaaactccgcacgttttctgtcagaagaaagacatggctgagcctgggctggagaaagatgcctggtgtctgcgggaggcgcggccgggttctgcatatgtgctgtcccgctgggcactgtccttttcctccaggtctccttccggggagagaggggacccagaacaaagaggaaaggagttctgagaaacatcccttccctgcaccctgctgccagcccccacccaatgctagtccactcctgagcacgcccaccgggcattcgcattgccccactcttcccagtacaggattccacctcaggaattgtgcccatggcagctttgcgcctagcgttttctgccaaaaacacacgcagtgcccagaagtctcctggctcatctcaaccgcagaccggatctacagcaggaacctgcttccttcacccacccaggcttccggaccacctgatcctaatcccttctgtctttgtagacatggaatcagagcgtagccctgcctcggcc

SEQ ID NO: 7939 - DNA, 869 bp, Artificial sequence
  DNA replication origin
gggagcttgagttctagttgggggagacagataacagacaaaatgaataaataatgtacatagtgtgacagatggtgatgaggactatggagaaaaagagattgggaaaggaagacagggaacccctgggggaggaggttctgcaattttagagcagctatctggaagaagggcagtccaggcagaaaacacagcaggtgcagggggactggggagcccgtatgttccaggaagagcacagggccagggtggccggagggaagcaagtgagaggaggtgcggtggcaggcaaactcagaggggtgatgtgcaggcagcatgggccaattctccgggaccttgtgggtcatcttaaagcctctggcttttactctgatgagacaggaagccagtccatggttctgtgcagagcactgatatggtctcacctagtggtgggttgcaaagggacttcaggggtcaacaatgaaagtggagaccagttagggggagagggatgaaggcaatgagtagtcatgggggatgagaagcaattggattcttatgtcttgaaggtggggcccacaggaggtgggtgtgagagaggaggtgaggacagtggcctggatcactaactggaaggatggggtttggggaggagcaggtctccggaggaggatgcaatgtgggcagcctgcacacatcacttagagctttctctccagctgtgtgtcagtgggtacttgcccctgtgcctttgcacatgttggcctctgtgcctggaaatctttcccttccctggaagaagagctttaactgccttctcaagggtaccttctgtgaatctgtcctgtcggccctcaccccctctagccctctctttgcctcat

SEQ ID NO: 7940 - DNA, 987 bp, Artificial sequence
  DNA replication origin
tgggggccccgccgcccccaccccaggccgcgctgcgcagccccagtccccgccggccccaccgcgcggtcgctttgaggtcggccggggtctgcccggcgatggcgacgctgcagccgctggagccggggccaccggggatctcggcgggacctggcggcagcgaggacgcggaccctggagagatgggaggggcgcgccccgagcccgagccccacccggacccggctgccgtcggcctagccagggccggggcggacaccgtcgaggacgaagccgggcccgcgcccctgggcgacccgttgagccgcggagccccgcggggtggagccgggccaggcccatccgctccgggcgcgggcagctggcgtcgcgggtgggtcagaacccaggacacgcccaggagtccgacctcatggcgctgcagggcctggggagtgggggctggggacagcgccagggccaacccgacgccagcacccccggcagaccccaggagccgcctgtgaagagactggataggtgcattaagcgatcagaaaagtcactggctggccctgttgatgagcagaacgctttcagagaagtgtatgctcacgcagtgcttggacagcattcgcgtagtttgacacttgtctgcttgggcggatagatgctcacacacataagtttgttttgtagttatgcaggattgcactgtggctaagtacacagactctgggtgcacatcccagctgctctgctatttccagctgtgtgaccatggggaagttacttgcctgtgctcagtgtcctctgtaaagtgaagatagcagtacctgcctcatggagtcccttaagtgagttaatagtgtaacatgttatggcgtcatgcacacagtcaccatcggtaaatatagtctattatgcctgaaccccagaggagcacatgtccttgaaaagtctaaaattcaggactctaaaatccagactgtgagaccctggaat

SEQ ID NO: 7941 - DNA, 1231 bp, Artificial sequence
  DNA replication origin
catcgccgggcagaccccggccgacctcaaagcgaccgcgcggtggggccggcggggactggggctgcgcagcgcggcctggggtgggggcggcggggcccccaggagctcctgggaaccgagggtcctggggcggtcccgccccgcacagctccgggtgagcttggggagggagacacactctcagcccacctcgccccgcccgacagcgctccgagtcctgagtcccctcacccccattctacagacacgaaggtgaagccaaagacgggacgctcacttcctgagaatttgctgcctgctgcgtggacaccaccgacctattgtttacagcggtcagggacccgccccccagacccccaggaccgcgcttccgggggaggagggtgtcctcagcaacggtgacccgcaccaaagccctcctcaccggggtcaccgccacagccggtgcgaggcccgcagggcgctggggatgcgcgaccgactcccgtgaacctgctcctcgcgcgtcagggagagctgtgcacccaactaggctctgtgaggacggactgaggtcggcctgcaggctgcggccccgaaggcaggatttgtggagagatgattcgcgagccttggaggaaggatgggctgtgcgtgcgtgggtgcgtgcgtgtgtgtgtgtgtgtgtctgtgacttttgtatgtttatgtgagactgcgtacgtgcgcgcgtctgtgtgtgcgcgcgcgcgtatatgtctgtgtgtgtgcgtgcgtgtataatttctaaatggacgtcaccttacacatcacaaggttaaaaaatgacccctgggctgtgccaggccaagcacgaagagaaagccccgcctgaaactgcctggaggccccccggctgtcactctcgccacattccgtggagtatgtggttgcaacttctgtcactcaaggtctgatggcggggagattggagccgtatccaatcagcgcactggagtgaaaactgcccaatcaggcacgcagccagagaggaggcggtggcttccgggatgtggcgcgggtctttgcgtctggctactaccagaccgcgggttaggggcttcatctctctgcgttctcagttgtgggaggccttggtgattcggccacagctcagcctccgtcgctctgtgacctgcgggtattggatgattggtagctaagactcccgaatacttcagaagtggggaaatggtgagtgtgcggggca

SEQ ID NO: 7942 - DNA, 949 bp, Artificial sequence
  DNA replication origin
cccgcaccttccccaggctgtggggtgaggagtagcttatctggaagccgcccgcgcggcgtgcgcgatgccggcgtgggaggagctgtgggagaagctgtggtctggggatcccgtccctgctttaccctgttcggaatgagatcgaggccccatcaaaacagagttcatgtgagcaaatggggactcattaatgggacagcgccggccgtggctcgtggtttgggggctgccagcgggtcttgaaggaaaagcttttgtgaggtgtgtgaggaagcgaagcaaatcacccgcccgctccaacttgcccaccagtctccttgccctgtgcgcctcctccgcgtggctgttcctgagtggcatcttttagaatacgctagtgtgggcgcgcacagcgcttcgctgagttctgtgagtagttctgtcatattattgaacttgaggagggtgtgggcccctggtttgtagacaggtgttcagaaatgaagacgggtgtccagaggcagggactggcgtctgcaggggggcagctgcgggaagagcgctgagcttgtggggtctgtgctgactccgggtggtgtcgttagtgagttgttggacagcccgttggggtcggagcattgactggtgttgagcaaactcctcacgtttcctgtcagaagaaagacatggctgagcctgggctggagggagtcgcaggtgtccgcgggagaccagccgggttctgcacatgcactgtcctgctgcgcactgttctgttcctccaggtctcctcccggggagagagggcgctgagaacttggaggaaaggagttctgagaaacatcccttccctgcaccctgctgccagcccccacccaatgctaacccactcctgagcccgcccattgggcattcgcacggccacacttgtcccaggacagggttctaccctcaggaattgtgccca

SEQ ID NO: 7943 - DNA, 1393 bp, Artificial sequence
  DNA replication origin
atggcccgttctcaatgagctgttgggtacacctcccagacggggtggtggccgggcagaggggctcctcacttcccagtaggggcggccgggcagaggcgcccctcacctcccggatggggcggctggccgggaggggtgctgaccccctccacctccctcccggacggggcgactggccgggcggggggctgacccccccacctccctcccggacggggcggctggccaggcggggggctgacccccccacctccctcccggacggggcggctggccaggcggggggctgactcccccacctccctcccggacggagcggctggccgggcgggggctgacccccccacctccctcccggacggggcggctggccaggcagaggggctcctcacttcccagtaggggcggccgggcagaggcgcccctcacctcccggatggggcggctggccaggcggggggctgaccccccccacctccctcccggacgaggtggctgccgggcggaggggctcctcacttctcagacggggcagctgccgggcagaggggctcctcacttctcagacagggcggttgccaggcagagggtctcctcacttctcagacggggcggccgggcagagacgctcctcacatcctggacggggcggcagggcagaggtgctccccacatctcagacgatgggcggcccggcagagaggctcctcacttcccagatgtgatggtggccggccgggaagaggcgctcctcacttcctagatgggatggtggccgggcagagacgctcctcactttccagactgggcagccaggcagaggggctcctcacatcccagacgatgggcggccaggcggagatgctcctcacttcccagacggggtggcggccgggcagaggctgcaatcttggcactttgggaggccaaggcaggctgctgggaggtggaggttgtagcgagccgagatcacgccactgcactccagcctgggcaccattgagcactgagtgaacgagactccatctgcaatcccggcacctcgggaggccgaggctggcggatcactcgcggttaggagctggagaccagcccagccaacacagcgaaaccccatctccaccaaaaaaatacgaaaaccagtcaggcgtggcggcgcgcacctgcaatggcaggcattcggcaggctaaggcaggagaatcaggcagggaggttgcagtgagccgagatggcagcagtaccgtccagcttcggctcggcatcagagggagaccgtggaaagagggagaggaagaccgtggggagagggagagggagagggagagctctatcaattaaactatggtaattccacctcccgggttcaagcgattctcctgcctcagcctc

SEQ ID NO: 7944 - DNA, 898 bp, Artificial sequence
  DNA replication origin
tggggggggtcagccccccgcctggccagccgccccatccgggaggtgaggggcgcctctgcccggccgcccctactgggaagtgaggagcccctctgcctggccagccgccccgtccgggagggaggtgggggggtcagcccccgcccggccagccgctccgtccgggagggaggtgggggagtcagccccccgcctggccagccgccccgtccgggagggaggtgggggggtcagccccccgcctggccagccgccccgtccgggagggaggtgggggggtcagccccccgcccggccagtcgccccgtccgggagggaggtggagggggtcagcacccctcccggccagccgccccatccgggaggtgaggggcgcctctgcccggccgcccctactgggaagtgaggagcccctctgcccggccaccaccccgtctgggaggtgtacccaacagctcattgagaacgggccatgatgacaatggcggttttgtggaatagaaaggggggaaaggtggggaaaagattgagaagtcggatggttgccgtgtctgtgtagaaggaggtagacatgggagacttttcattttgttctgtactaagaaaaattcttctgccttgggatcctgttgatctgtgaccttacccccaaccctgtgctctctgaaacatgtgctgtatccactcagggttgaatggcttaagggcggtgcaagatgtgctttgtttaacagatgcttgaaggcagcatgctccttaagaatcatcaccactccctaatctcaagtacccagggacacaaacactgcggaaggccgcagggtcctctgcctaggaaaaccagacctttgttcacttgtttatctgctgaccttccctccactattgtcctgtg

SEQ ID NO: 7945 - DNA, 985 bp, Artificial sequence
  DNA replication origin
acagccagagtgggtgccaaggctggggaggcaccgagagcaagcgagggctgcgagggctgccagcacgctgtcacctctcaatgatagaatagaatgggcctttgaggctggaaggagacattttccttggtccaagaaccatttgacttgtgtgggaagagattagattgataggcggaagtttcagtgggagtataggtgggagtgaccgatgaggagaaaaactggccataagggacagaagttggaatgctagctgcttctttagctaccttatcagcataagcattgccctgagtgatgtgatctgatgccttttgatggcccttgcagtgaatgactccagcttcctttggaaggaaagtgtctttgagaagagtttttattaaagaggcattaatgatgtaggacccttgcatagcgaggaaacctctttcaccccatataacagcatgttggtgcaggatatggaaggcatatttagagtcagtataaatattgacatgtaattccttggcaagagtgagggctcaagttaaggcaaagagttcagtttgctgagagatagtggagggggcagagtggtagcctcaatgatagatgtggaagatactatagcatagcctgcctttgctgttgagtggcaattaggcctggtggaactgccatcaataaaccaagtgtgatcagggtgaggaacaggaaagaaggaaatatggggaaatggagtgaatgtgaggtggatcagagagatacagtcatgggggtcaggtgtggtatctggaataatgtgggaggccggattgaagtctcggccaggaacaatggtatttgtgggagactcaacaaagactgagtatagctgaaggagctggggggcagaaagtatatgtgtcaagcgtgaggaggaaaatagattttgaaagttatgggaactgtagagagtaagtggagcatagcttgtgattttgagggcctctaa

SEQ ID NO: 7946 - DNA, 1594 bp, Artificial sequence
  DNA replication origin
tgagaggctgttaacaggcactggagacagagcaggtacgaggctctgccctcatggaaccttccagagggaggagagaaaaggaagtgatcgatggccgatggtgacgagtaccttaggaaaagaataaacagggctgggtgcggtggctcacgcctgtaatcccagcactttgggaggccaaggcaggcggatcatgaagtcaggaattgaagaccagcctgactaacacagtgaaaccccgtctctactaaaaatacaaaaattagccaggcatggtggcgggcacctgtaatcccagctactcaggaggctgaggcaggagaatcgcttgaaccctggaggtggaggttgcagtgaactgagatcgcgctactgcactccagcctggcaacagagcaagactctgcctcaaaaaaaaaaaaaaaaaaaaaaaagaaggaataaacaggcgtggggtgggaagtgaagcgggtgggggagccactggggcaggctggccgctggccatctgggagggcacattacaggctgtgggggcagcagacagggtcctccatggggcgcacattcaggggatggtcagagcaggggccagagtggcaagggcagggcagaggagatggcattaaggggtgagggccactgggcgctggaagggctttcacttgtattctgagttaaatggggagctgctgcagggtttggtgagagccagagtctcccacttgcattttcgaaggctgtctcaggcgccctcgtggaggattctgctttgtgctgtaggaggagaccagtcaggaggcagtggctgtacttctgtgagaggtgagggtggccagggcccaggcaagggtggtgaagaagtggttgcattctggaaagattctgaaggtcatgaagacaggatttgctcacgtgctgcgatattgggtacgagcagaccagaggcgttaggtacgactccggggctttcagctgaaagcaaagagagtaataatttcctcaggagggcacgacttaggaggaacagttctgcaaggcaggtgcttgtgggtgggggtgttggtgtccaggaagccatgtaaagaagtaatttcaggaagcatggagtgggcagctgcgtcaaaggttggtattgaataaaatcaggaattgagaactgagctttggatctggccatggagggtgatgagtggcttcgtcagatggagagtgggggaaggcctggctggtactaggcaggcgagagccctaggcagcagacactgcgactctaatgggagtaggaggtggagttgcctgaggcaggtgtggggccaagggaggtgccaggagacagctacaggaagggtccaggagaggaacgtttgtctccctgggatgtcttcagacaatcgactctgacgcagccgcgttcatcaagaatcatgtttgatactgggactcctttgagagcccggaggaagtcgactcctatttgggggcagcagttaatgtggtgttggcagatttccctacttgaagtagagggatactattactaccaaatagagtgaacgtccacaagcttgcgctgagatgtaaaccggcc

SEQ ID NO: 7947 - DNA, 930 bp, Artificial sequence
  DNA replication origin
cccatctaggaagtgaggagcgtctcttcccggccgccatcccatctaggaagtgaggagcgtctctgccccgccgcccatcgtctgagatgtggggagcccctctgcctggctgcccagtctggaaagtgaggagcatctctgcccggccgccatcccatctaggaagtgaggagcgtctcttccctgccgccatcccatctaggaagtgaggagcgtctcttcccggccgccatcccatctaggaagtgaggagcgtctctgcccggccgcccatcgtctgagatgtggggagcgcctctgccccgccgccctgtctgggatgtgaggagcgtctctgcccggctgacaccccatccgggagggaggtgggggggtcagccccccgcccggccagccgccccgtccgggaggtgaggggcgcctctgcctggcgcccctactgggaagtgaggagcccctctgcccggccgccaccccgtctgggaggtgtgcccagcagctcattgagaacgggccatgatggcaatggcggttttgtggaatagaaaagggggaaaggtggggaaaagattgagaaatcggatggttgccgtgtctgtgtagaaagaggtagacatgggagacttttcattttgttctgtactaagaaaaattcttctgccttgggatcctgttgatctgtgaccttgcccccaaccctgtgctctctgaaacatgtgctgtgtccactcagggttaaatggattaagggcggtgcaagatgtgctttgttaaacagatgcttgaaggcagcatgctccttaagagtcatcaccactccctaatctcaagtacccagggacacaaacactgcggaaggctgcagggtcctctgcctagggaagccagagacctttgttcacttgtttatctgctgaccttccctct

SEQ ID NO: 7948 - DNA, 1332 bp, Artificial sequence
  DNA replication origin
tgatgactcttaaggagcatgctgccttcaagcatctgtttaacaaagcacatcttgcaccgcccttaatccatttaaccctgagtggacacagcacatgtttcagagagcacagggttgggggcaaggtcacagatcaacaggatcccaaggcagaagaatttttcttagtacagaacaaaatgaaaagtctcccatgtctacctctttctacacagacacggcaaccatccgatttctcaatcttttccccacctttcccccttttctattccacaaaaccgccattgccatcatggcccgttctcaatgagctgctgggcacacctcccagacggggtggcggccgggcagaggggctcctcacttcccagtaggggcgccaggcagaggcgcccctcacctcccggacggggcggctggccgggcggggggctgacccccccacctccctcccggatggggtgtcagccgggcagagacgctcctcacatcccagacagggcggcggggcagaggcgctccccacatctcagacgatgggcggccgggcagagacgctcctcacttcctagatgggatggcggccgggaagagacgctcctcacttcctagatgggatggcggcagggaagagacgctcctcacttcctagatgggatggcggccgggcagagatgctcctcactttccagactgggcagccaggcagaggggctccccacatctcagacgatgggcggcggggcagagacgctcctcacttcctagatgggatggcggccgggaagagacgctcctcacttcctagatgggatggcggccgggaagagacgctcctcacttcctagatgggatggcggccgggcagagacgctcctcactttccagactgggcagccaggcagaggggctcctcacatcccagacgatgggcggccaggcagagacgctcctcacttcccagacggggtggcggccgggcagaggctgcaatctctgcactttgggaggccaaggcaggcggctgggaggtggaggctgcagcgagccgagatcacgccactgcactccagcctgggcaccattgagcactgagtgaacgagactccgtctgcaatcccggcacctcgggaggccgaggctggcggatcactcgcggttaggagctggagaccagcccggccaacacagcgaaagcccgtctccaccaaaaaaatacgaaaaccagtcaggcgtggcggcgcgcacctgcaatcacaggcactcggcaggctgaggcaggagaatcaggcagggaggttgcagtgagccgagatggcggcagcacag

SEQ ID NO: 7949 - DNA, 1201 bp, Artificial sequence
  DNA replication origin
accagaaacccagaaaagtttccaggacaatgagggccaggcaaagggcacagaggcctcctcacagagtctaaggggctcttgcttcctttcccagggccggctgtgctgcgggtcaggagcaggatgtggccgtgaggctggagaactgaagacggctgaatctcagccttagcatagctcccaggggcagaccccaagagggaagaaggggcctcagcttgtccgaagcatgggcgggtgggactcatccctcctttctggaaacaccaggcccctactcaaagcccgtgaggagccccactcagggcccatgcctagcaaaactacacttgccctcttaagaacggcccttctgtctgccaagcgcttaactagtgtccagtctcagcctgggcaacctgggaagggagagccctgctcatggaggggataagttactgccggtggggctgagacatggcgaacagaaaccagcaggaatgaggagactatgcctggggatggatcttgagagcgctcgaccctgtgtgtagatgggatggagatggtgtgtggatatgtgtgtggatgtgtgtagataggatggagatggcaggtggatatgtgggtgggtgtgtgtagatgggatggagatggcaggtggatatgtgggtggatgtgtgtagatgggatggagatggtgcatgcacatgtgtgcatgtgtgtagatgggatggagatggcgtgtggatatgtgtgtggatgtgtgtagataggatggagatggcaggtggatatgtgggtgggtgtgtgtagatgggatggagatggcaggtggatatgtgggtggatgtgtgtagatgggatggagatggcaggtggatatgtgggtgtgcatgtgtgtagatgggatggaggtggtgtgtggatatgtgtgtgcatgtgtgtagatgggatggagatggcaggtggatatgtgggtggatgtgtgtagatgggatggaggtggtgtgtggatatgtgggtggatgtgtgtagatgggatggagatggtgcatgcacatgtgtggatgtgtgtagatgggatggaggtggtgtgtggatatgtgggtggatgtgtgtagatgggatggagatggcaggtggatatgtgggtggatgtgtgtagatgggatggagatggtgtgcatgcatgcgtgtgtatgtgtgtgtgcatgca

SEQ ID NO: 7950 - DNA, 1437 bp, Artificial sequence
  DNA replication origin
actccctgagagggagaagtgcctaagctcccagcctaacccctggtcagcccctgagcttctgaaggcaggactagaatcctcttaaccttctatcaacagaaccagccatgcacataagatgcaggtcataggatgcagggggtaggatgtacatggtgggacacaggtgctaagatgtacctggcaagatgcaggtagtgggaggtacaaggcaagatgcaggtggtggatacatgttgtaggatgcaggtggttagatgcaggggtgggatgcagggggtgggatgcagtgggtgagacacagtgggtgggattcgggggctgagatgcaggggatgggatgcaggggtgggatacaggaggtgggaggcaggtggtgggatgcaggggtgggatgcaggggtgggatgcaggggtgggatgaagggggtgggatgcaggggtgggatgaaggggtgggatgcaggggtgggatgtagggggtgggatgcagggggtgggatgcaggggtgggatgcaggggatgagatacaggggtcagatgcagggggtgggtgcaggtgctgagtgtagttggtggggtgcagttgatgttatgcaggttgtgggtgcagctggtggctgctagcttttgttgtaaggatgggtgggatggacagaccagctcttacaaggtaagagctttctaagagctctcgattgcctcgtgaacttggagactttcaacactggtactgccttctcgtattcattcactgagggcactaaggaggcacctactgtgtatagacccagctttgttaggtgacgaatgacaacctggtctggcacaggagactaacttcggctcctgccgttgttgcaaatgtgcttaatgccccagtccagcacccaggtgataggatggcaggaaatgggggatgatccagggagggtggggattctagggaggagtgcgtgcacacctgggtaccagaccgcggcaggtataaaggcagtgaggggacagagccctggcagaggaaggggagaacctctgagggatgagatgcctccaagggtcactgaagctgcacggaggagagggaggtggagggtccaagagatttgtaggagcaaaaatgactgtgatgttgattggacaaggcagtgaggacgtgtcaggtgtctggggtgacgtgatggaactagaagcaagaatcacaacaactcagggttccataccaactcagggctccataccaactcaggactccataccaactcaaggttccataccaactcagggttccataccaacaactcagggttccataccaactcaggactccataccaactcagggttccataccaactcagggctccataccaactcagggttccataccaactcagggctccataccaacaactcagggctccataccaacaa

SEQ ID NO: 7951 - DNA, 1797 bp, Artificial sequence
  DNA replication origin
cctccctatccgcgcccctatccggcgcgggccgctgcggaaacgcagctctccacccccagctggctctcccggaccccctgggccccaccctcagcgctccccaccgctcggcgcccctgcgtctgcgctcccctctctcccctctctatccactgggtctgggccgcacttcccgcccacccgcctgccagcggccgggaagcctgtggaagttatggggatgcagggagagggggagaggggagcttgtgtgctaggggtgagtgggtatgggggagagcctgggtaaggagaaggggaaagggggagcctgggaaaggagggaggaaaggaggagagcccgggtgctggggtgggggggaaaggagcccggggagggagggggaggggccgggagctggggggggtgggaaggagcccggggagggagggggaggggccgggagctgggggggggtgggaaggagcccggggagggagggggaggggccgggagctgggggtaagggaggagtgagcctgggtgctgtggggggagggggttgttcaagggatggggacgatcagggtctctgggaagtgctgacgtgtgcgcgtgtgcggtgtgttgcttgtgggtgcgtgtgtggtgtgtgcatgtgtgtgcgcgcgcgtgtgtgcggggtgtgccgtgagcgtgtgcccgcggttcgggggatgagtaggggcgctgacttttaggaccagccatttgagtcaagctggagacgacgtcttagaacctaggatgagtctcgtttggttttagtctgcaaagctcgtctgcatcagacaggaattttccccagacgcgggtgcacgtgaattaattcatcagaaggcggttcacggcctgagtgagggggacgagggcggcgaattcctccgcctcattcctaccctgacgattcgaggtgggtgagaggaaggcgtggggcggctgggtgcgtggggtgggggaaggtcacctcttcggcctctctgggccctccagcctcttcctgagaggagctcgcctcggccccttggttggggggatgggagcgtctccggaaggccctcggccgagcagctgggcctgcacccctggtcccttccagttcgtttctgctgcggcggcaagaggctggggagccgatgactcaccctgccggctaattgcagcgttaaataactttgcgccggattcggtggctgcagcagggaacgcgctccgggcgccgggggaggtggagggacgccctgagaacgcacctccgtccctgtcaccagccttagcaagttctggcctgtggagccgtcatccagagcgcacagcttcatgcccttgaagggcgcagtgtgtcccgtggtgcccggtgggcccggacagagaccccagaggctctgtctgaaggaagctgcacccacagactccatccaggcagcgcgggcgcggtcctgtcgcctacctttctcggaagccatctgcccatgtgaatctatgtgaaggcccttcatgcgctcctggacatctgcgtgggatttacttcaactgctatcgctgcgaggaggacgagcatgtttcactgtatttttagcagagagtgcagattttagaacctcgcgaacggtcctgtatctcctgcacgatgactctccagaacaggaatagtgacccttcctttgcatttatggtgcataggttttcaaaggacagtgtgtaaatcagcttgtgtaataattgtggcacccacgcgcgcaagcagacttaccatgagctgacttccactgatt

SEQ ID NO: 7952 - DNA, 1093 bp, Artificial sequence
  DNA replication origin
gcagagagggaggagcgagtgggcctgtgaggtggcatggccttccccatcccccgctgtgcaccccgggcagggacgccgcccacacctgatgagggggaagccaccagcccccccatcacccctttgtggctcctcagacctgcaagagttcacagcgagggcagctgggatggacgatcctggtgggctggtggggctcggccacggccaccaagtggcggggcaggactcacaccccagctctgactgtgcagcggtttctgagcccagccccagccgaacagccacggaccccgcagtgctgtgcatgcagcctcagcctccaccaccttccagctcctctccctgggaccgtcatgggaacccatcccaaaggcccgtcccgggaccctggtgggtcccctgccccctgccccaaaacacctcatcacggggtcctgcacgtcgccagcagtcaagacccttcgactcagtcctatggtggtctctacaaggctggacagagcaggggcgttgagaacacgggctgggtgggaatccggagatagagggaggagggtggcaggaccggccgtcagccatgctgagcacagacggcagaggaggtgtggggcttgggcagttggaggtgctttggagaagccacagtgggtgtgaaggccccagagcgaggcccagctgctcggctatgtgagcacacacagcccccaggcctgctagaggcagagcaaatgcagggggttcccaggagcctgagagtccacagctgccacctgctcccagacaaggctcctggcatgtctgaccaggagcctctggggaagtagggaagcccagactggacagtggagaggaagagaccagcaggcaaggaccccccggccaggcatcactacaggggacacagaacccagagggcaccagagaggagagacggggggccagcaggggccacgtgttaatcttcaccgacagacacacgatggtgtggctgcatttcacaatgggtggggcagctggcagtcggacagggaggccgagggatccatccctgtggccgaggggagtttgcagggctgtcatctcagga

SEQ ID NO: 7953 - DNA, 1049 bp, Artificial sequence
  DNA replication origin
tgcagggggttcccaggagcctgagagtccacagctgccacctgctcccagacaaggctcctggcatgtctgaccaggagcctctggggaagtagggaagcccagactggacagtggagaggaagagaccagcaggcaaggaccccccggccaggcatcactacaggggacacagaacccagagggcaccagagaggagagacggggggccagcaggggccacgtgttaatcttcaccgacagacacacgatggtgtggctgcatttcacaatgggtggggcagctggcagtcggacagggaggccgagggatccatccctgtggccgaggggagtttgcagggctgtcatctcaggaagtgaaggctgggctggggtcgggctgctgggccacgaggggcagcgggagggagccgctgaggctggaagctgcaccagccaggctgggaccagggtggctgtggcccggctggtaccgagtgcccatccatgcaagggcagcagagtgaccagacgctggggaaaggagagcaggtgtcagtgagagagtggccggatgtttccgcgtgggactctttgcagtctcgatggcagacttacaaaaaagtaaacattccctgtggtgttagggaagctgaggagggcagagggcagagtgcaagccagggtttggagcagatgttcctggggagcccctgggctgggccagctgctcgcagaagcctgacaaggtacagggaaggaggaacgaggggcaacctcactcaaaaccagctgctcagaggagcatagcttctggcagaacctccgcggtggccaagccccaattccggctgcctgctctggacctctaaggagctgttcctctcggtcctaagggtgtgggggctggtgagacacaaagaggctgcagtcacaaagcctcagcgtgaaggtctcagtgctgggaccaagggtgtatctggcacaggcctggaaggaccagggagtgaatggggccagtggtgaaggagagaagctgtcggcataaggatggtaacggcagccca

SEQ ID NO: 7954 - DNA, 1323 bp, Artificial sequence
  DNA replication origin
aagccagggtttggagcagatgttcctggggagcccctgggctgggccagctgctcgcagaagcctgacaaggtacagggaaggaggaacgaggggcaacctcactcaaaaccagctgctcagaggagcatagcttctggcagaacctccgcggtggccaagccccaattccggctgcctgctctggacctctaaggagctgttcctctcggtcctaagggtgtgggggctggtgagacacaaagaggctgcagtcacaaagcctcagcgtgaaggtctcagtgctgggaccaagggtgtatctggcacaggcctggaaggaccagggagtgaatggggccagtggtgaaggagagaagctgtcggcataaggatggtaacggcagcccacctcagctgggacagctgaaatggagccaggtgcctgctgagaccagtgacgcagccaggaaggcaggggacccaggagcagctgtgaaggagaaaagacggcagacgaacgggctgagagagcattttacagagtcctgagtgcgcttaaatcccaggatggggagagactatgaagaagagaaggtgacaaatagggtgaggttcttgggtggagggtaggccacaagagagaggcaggaaggctctgtggctgttcccatactttctttgtgaaacaagagctgtgaaaacgtgtggggcagagagaagtgacagagtcaggtctgagatccaggaagaaactggtagagacaaagctggcaagagaagtgaggctgaacattgatcaaccatagcctgtgtgactatggggcaccatctgagggtcactttgtgtggatctgtgtggctccatctaagagtcacattgtgtggatcctgtggcactgtctgagggttacattgtgtggatccctgtggcgctgtctgaaggtcatgttatgtggatctgtgtgacaccgtctgagggttacattgtgtggatccttgtggcactgtctgagggttatgttgcgtggatctgtgtggcaccatctgagggtcacattgtatggatttgtgtttgggaccatctaagggtcatgaggatcacgttgcgtggatccatgtggctccatctgagggtcacgttgtgtggatttatgtgtgggaccatcaaagggtcatgagggtcacattgtgtgggtccatgtggcaccatctgagggtcacattgtggggatttgtgtgtgggaccatcaaagggtcatgagggtcacgttgtgtgggtccatgtggcaccatctgagggtcacgttgtgtggatctgtgtgacaccatctgctatctcag

SEQ ID NO: 7955 - DNA, 1422 bp, Artificial sequence
  DNA replication origin
tgctccctgctcactcgtcactcatactggcttctcccaaggaggttgggggcagcctctaggaaaggtgcccctttccccctctgcaggtgcctcacacccactctggccagatggcaggcaggtggcagatgggtctggccattgcagctcagcacagccacagaagccatggagccctcctctcccctgagcaatgcccaccccaggacctacccaggtgagcacaagaccacctgccaccacccgcctctgtgcaggcagcgagatgggcggagggaccctggccctcgtgggcagagctgtgctcagcgtgtgggtacctggccgcggcgcgtctcgcagttgtggaggtagctcaggtgatagatcttcaggtacaacgtggcaaaattcaggtacttcaagaacacctgaaacaggaattgcaacaagaggaattaaaattccagttttcagacatgtgcccccgtgggtattttgcaggagaaacatgctcgcctgagggtgcccagacacgccaggaagctgtgccccacaggcagacatggattggcacacacaagctcaggtgcacagggtgggcacgcaagctatctctctctcttacacacagacaggtgtgcacagacacacaggagcacagcgatgtgcagatgagcacgtggagcccagcagcccagcagacgcgcagcacagaacacgcgggcaggcaggcagggaggcagacgcgtggcacagaacacgcgggcaggcaggcaggcaggtaaggaggtggacgcacagcacagaacacacgggcaggcaggcagggaggcagacgcgtggcacagaacacgcaggcaggcaggcaggcaggtaaggaggtggacgcacagcacagaacacacgggcaggcaggcagggaggcagacgcgtggcacagaacacgcgggcaggcaggcaggcaggtaaggaggtggacgcacagcacagaacacgcgggcaggcgggcagggaggcaggcagggaggcagacgcgcagcacagaacacgcaggcaggcgggcaggcaggtaaggaggtggacacgcagcacagaacacgcgggcaggcgggcaggcaggtaaggaggtggacgcgcagcacagaacacgcgggcaggcaggtaaggaggcagacacgcagcacagaacacgcgggcaggcaggtaaggaggcagacacgcagcagagaacacacgggcaggcgggcaggcaggtaaggaggtggacgcgcagcacagaacacgcgggcaggcaggtaaggaggcagacacgcagcacagaacacgcgggcaggcaggtaaggaggcagacacgcagcagagaacacacgggcaggcgggcaggcaggtaaagaggtggatgcgcagcacagaacaggcgggcgggcaggcaggcag

SEQ ID NO: 7956 - DNA, 1358 bp, Artificial sequence
  DNA replication origin
aacagcagtggggccgtcacaggcggggcaggggctgaggcggcgatgtcaacggcagtggggccgtcacaggcggggcaggggctgaggcggcgatgtcaacagcagtggggccgtcacaggcggggcaggggctgacccgtggggtcagactgaatggggagtgggggccccaggggttggtgggtcctcagggggggcctcctggaaaggacttgaggccaggccttgggaggaggagggcctgggatgagggcctggaggcagaggccagagcccgtgcgaaggcgctgagttcggcaggagacagactgagtgtgggagggacgcagagggcgcagagggtggggccgggcctccacctgcggctctgggtgaaccagtcacgcgaggagaatgcacctggcgattccacacatctacagcgagtctcctgagccgcaggcgccggggctgtggagagccgtctccattcagcaggcgccagggctatggggagccgtctccattcagcaggctctggagctatgaagagccgtctccattcagcaggcgccggggctatggggagccgtctccattcagcaggtgccggggctgtggagagtgctagggcggtcgccatctgcacctgctgttttcccaagtcctgttctggacccactaactccagtgactgagctgacttcttcacacgggcatggggccaaagctcctgaccagtgcagggacacggggggtgggacatactcagataggggctgggaaggctgggagcttctgctgagggtggcaccagcagcagctccatgactgtgactgcggccagggcggctccacgacggtgactggggtcagggcaggagagtgtggaggccagtgaggagggtccacacccatcggtgaggcaggagtcagggtaggctgcagacccgggcggagattgcgaggcaggggtcagggtcactggagaaacatggctcaggaaaggcttcagggagaaaaaggtgttggacgagagaggctggtgctcaggggctgcaggggggccgggcctcagcagggagggagggagggactctgggaacagcagagccggcactgaggatgctgccagggaagggcactgacgtgcatggacctggaggatgccactggccaaaagctaggatctcactcacatgtgggatccgaaaaccctgaattcatggaaacagagagtggaaagggggttgcaggaggccggggcaggaagagagatagagaaagcagagacgttggtgaaagggtgcaaagcgttcgttagctggagctgtgggcttcaaggtcagccgcgctgtgtggcggccaccactgcc

SEQ ID NO: 7957 - DNA, 993 bp, Artificial sequence
  DNA replication origin
gggggccgcggtcacggccttgcgggcgtgtgtgggggctgtggtcacagccccaggtgatccacccgcctcagcctcccaaagtgctgggattacaggcgtgagccaccatgcctggctgaagttgttttttaagtggcaaaaacgaattcacttcatcatcgctgaatcaaaatctcctcttttgtaagtaagtataatttctaccaaggcacagacagatacctgaaatttgaacatttcgtcagcggaagcattcatgatgttacaaatctgaaaaagcatcagaaaaacgatttcatccaaaacagcggaaggtctgttatgatctaaaatggcctctgtggccctgaggtgagcttttaagtaggtaaagcagggcagctgggggcttcactgaggcacgtggagctggccgggagggcgggacgtggcagagacaaggagaagcacacatcgccgcacccagtgagggcaaggctgtggggactccagacagcacgggactcacaaagccgctttctgccacgtagcttggaaggccgctggccagggcccagtgatcggctgagggtgtgctgtgggcagagagcaggggtcagataggccacgccgggctggatgtgcgcgtgcaggagtcagagggactggatgtctgtgtgcaggggtgagaggggctggtctaggctgcacgtgtgtgtgcaggggtcagaggggctggtctgggctgcacgtgtgtgtgcaggggtcagaggggccaggctgcgctggatgtaggtgtactggggtcagatggactgggcgtgtgtgcaggggtctgggggtctctggctcatgtgccatcctcagcatttactctcttctctgagtgccagggggttcaggaggcgaggaggccagggcgtgggttggaggacggctgtgctgccttcttcctcctccccaggctgccgtgctggggcccctccctcttgggaacccctccctctccgg

SEQ ID NO: 7958 - DNA, 1472 bp, Artificial sequence
  DNA replication origin
ccccccgggagcaggagcctctgcagagcacccgggagaccccacacagaagcactgcgacaccatggtggcagccccaggacctgcccgccgagccacggggcctggcacacaggcacatgggagggggcgcgccgggagcgctgagcgccagtgacactgccatcccctccagtccctgacacagttcctgggctggtcagtgatgaacaccgacacctacgacaagatgaacaagctggagaaccgcaaggacatcgcacaggacatggtcctttaccacgtgaagtgcgacagggacgagatccagctcatcctggtgcggcggggcaggacgtccaggggtcacccaggggtcacggctgtgtggcaggggcaggtcgtccaggggtcacccaggggtctcggctgtgtggtgggggcaggtcatccaggggtcacccaggggtcacggctgtgcggtgggggcaggtcgtccaggggtcacccaggggtcacggctgtgcggtgggggcaggtcgtccaggggtcacccaggggtcacagctgtgcggcgggggcagggcatccaggggtcacccaggggtcatggctgtgcagcagaggcaggtcatccagggctcacccaggggtcatggctgtgcggcgggggcaggtcgtccaggggtcacccaggggtcacggctgtgcggcaggggcaggtcgtccaggggtcacccaggggtcatggctgtgtggcacaggcaggtcgtccaggggtccattgaggggtcacaggggtcatggctgtgcagcagaggcaggtcatccagggctcacccaggggtcatggctgtgcggtgggggcaggtcatccaggggtcacggctgtgtggtgggggcaggtcgtccaggggtccatccaggggtcacccagaggtcatggctctgcggcgggggcaggtcaccaggggtcacagctgtgcggtggggacaggtcaccaggggtcatggctgtatggtgggggcaagtcgccaggggtcacggctgtgtggcgggggcaggtcacccaggggtcatggatctgtggcagggacaggtcaccaggggtcacggctgtgcggcgggggcaggtcgtccaggggtcacaggtgtgcggggcaggtcacccaagggtcatggctgtgtggtgggggcaggtcacccaggggtcacaggtgtgcggggcaggtcgtccaggggtcacggctgtgtggcaggggcaggtcacccaggggtcatggctgtgcggtgggggcaggtcacccaggggtcacagctgtgtggggcaggtcacccaggggtcacggctccctctgtgcagtgggcggccaggttacccaggggtcacagctctctctgtgtggtggggacacggccctggggccagagctgagtacagccctggcatgcccccgaggtccctctgtctgcacggccctggcatcccttc

SEQ ID NO: 7959 - DNA, 784 bp, Artificial sequence
  DNA replication origin
gtgggggcaagtcgccaggggtcacggctgtgtggcgggggcaggtcacccaggggtcatggatctgtggcagggacaggtcaccaggggtcacggctgtgcggcgggggcaggtcgtccaggggtcacaggtgtgcggggcaggtcacccaagggtcatggctgtgtggtgggggcaggtcacccaggggtcacaggtgtgcggggcaggtcgtccaggggtcacggctgtgtggcaggggcaggtcacccaggggtcatggctgtgcggtgggggcaggtcacccaggggtcacagctgtgtggggcaggtcacccaggggtcacggctccctctgtgcagtgggcggccaggttacccaggggtcacagctctctctgtgtggtggggacacggccctggggccagagctgagtacagccctggcatgcccccgaggtccctctgtctgcacggccctggcatcccttccctgtgctcaatctccccagccaggggccttgcatggccagagccctcctggtcatcatgagagagtcccatcattatacctgaggactgcgtaaggcagtgcccgagagaggacaggtgggaaagtcagcaggccatgcacacggtcatttgtctccagatcagaggccgccagggccttcccagggtgaaagcacaagctcttgacagcaccttcctctagctcacacggggtggacgcaccgccgtcaccttgtcccacatgcgaagctctttctcgtgacacatctgtgtctctgtgtagccaaccag

SEQ ID NO: 7960 - DNA, 950 bp, Artificial sequence
  DNA replication origin
cagaaggaggagctgccagggcccaccacatttgacatctacgaattccacttctctgacctggagtgcaccgaactggacctggtcaaatgtggcatccagatgtactacgagctgggcgtggtccgaaagttccagatcccccaggaggtgggagacaccgcagggcgcatagtcaggtccctgaggccgcccaggacatgggggtggggatgtgatcagggcctcaggtgccccagaaggtgagggggatgggattgggggttccagatcccacaggaagtttagagggccgacatgttcatcacagaacaggtaaaatgcacacgggaagtaagcataaaacaaataattggatggctgggtggatggctggattgatggatggctggatgggtgaaaagcagggaggaaggagggaggttaggaaggaaggaaggccaacaggcaagcagaaagaaacaaaggaagaataaatgaatggatgggtggatgccaatggtagttggatagttggataaatggatgggtgggtgggccaatggtagttggatggttggataaatggatggatgggtgagtgggccaatggtagttagatggttggataagtgaatggataggtggatggatggagaagtgggtggatgagtgatagatgagtaggtgggtcaattaatgaattaatagatgggtcaatgaatgggtgaatggatgggtggacagcagatggatggtgaatggatagatttaaagttttattattaggagttccaagcaatttgatcattaggcacatcatctggcaataacaggggatttggtgtggggtgctgaggagatagaagcatcccatcacctaaacagaaagcacaaagtggcccccctggtttggccacagcagcactcctcggagaccccctggggaggcgggatggctttcccagccc

SEQ ID NO: 7961 - DNA, 1394 bp, Artificial sequence
  DNA replication origin
gcgtcccaagccgacgatggagccgctggtggagagctgggcaccctgaggagggccctgagcagcaggcggattaggggtcccgcccaccgagggcccgagggcgggggcgtgagaggcacaggcagccgaggcggaaggggcggggtccccgggcaccctgagaggtggccgcagggcgcctgacgcgctgggcataacctccgcagaccctgaacatctaccagaacctgaaccggcggcagcacgagcacgtgatccacctgatggacatcgccatcatcgccacggacctggccctgtacttcaagtgcgcgccttccgggagggggcgcctcgcggggcgggcgggtagcctgggacccccggcagacacgggggcgcagcggcggcacagcccgggggacgcagccccggattccgtccctgcccgccggccccgcgcaccccggatggggcctcgctcgggctccgcgcctccctgcagacgggcgcttggggcggggtctccacacttgctcccacctgcacctcccttgttccctgggttcaggaagagagcgatgtttcagaagatcgtggatgagtccaagaactaccaggacaagaagagctgggtggagtacctgtccctggagacgacccggaaggagatcgtcatgtgagcgcgggcggagggggcacgaggggtccttccctcgcagggaccgggcccactcaccagctggttaaccctgcagccctccccagacgctctggagcaggaagagcccgtcgcggcagcttgtcgagggctgtgaaacaaatgcgccgtccttatttccccccagctctcagggagatggtgcagagctggggagcacacaggccctgcattggtctgtagcccttggcagtaacttacttcattttgaccttccactttttcacctgtaaaatggtgattcacaaccagcccctccccaggctggtcccagggacccagtgagaaaatacacataaacccagcacttgggaggccgaggggagtggatcacctgaggtcaggagttcgagatcagcctggccaacatggtgaaaccccgtctctaccgaaaatacaaaaattagccgggcgtggtggcgggcgcctgtaatcccagctactcgggaggctgaggcacaagaatcgggaggcggaggttgcagtgagctgagattgcgccattgcactccagcctgggcaacagagcaagactccatctcaaaaaagaaaacacatataaaccacctgccctcaggagacgcccatcagcactcgtgcccggtttgtgtctgcagggccatgatgatgacagcctgcgacctgtctgccatcaccaagccctgggaagtccagagcaaggttagaacag

SEQ ID NO: 7962 - DNA, 865 bp, Artificial sequence
  DNA replication origin
tgtgcccctggaagctctgagccctttcccagcccagaatgtcctctgctagcctccaggcctaccccagaagttctccctcagtgccctccgccgtggccagcacactgttttgggggccttggctgcagctctgtgggttcatttgttccatgtttgtgaaccctcgaggcggggctgggtcggcctgtctgctggtgcacccgcccacaggggcgtttggaacagcagaaggagccacatccctgccaatctgccacagtccgatgccagctgagtctctgaggacgcaaggcggacatggagggggagactcgatggggcaggggtctgaccgtggggccctgtgtgatgcccataagagccagctgcctccggccacactccctggtgatggaatccacgccccaaggaggatgccacgggttccacatgaagttgtcccggagtgggctgtgcccactccccgccccatcctacccaccccgggtcgtcagtgctggggagaaggtgggacaagggtggatatttgggcctgaagtggccacaggtcacggccccactgcaggtgccccccactgccttccccaccccgccacactccatgtgtgatgtgcgcgagtgcacgcgtgtgctgtgcttgcatgatgtgtgccgtgtgtgtgtgggagggacgggagaaggcactgcaggggctgcctgctgtccgcctgtgcccaccacccctctgcctggcaccctgcccccaccccctgagctgttctgctcattcttgggttcctctccctgcaacactgcaccctaagcatgcataccctaaagctcccggcttcaatgtcaccaacacagcccccgaggtttctcc

SEQ ID NO: 7963 - DNA, 2506 bp, Artificial sequence
  DNA replication origin
tgagatcgtgccacggcactccagcctgggtgacagagcaagactccatctcaaaaaaaaaaaaaaaaaaaaattaaaatatccagaatgatcttcagtcattttcttgggcttcctaacctcttgtagcaaatagccacaggcagaacccaaatcctagtgggtgaagattgagggagccatagggtccccatgggaccagtgctcacaggatacagcaggttgaagacttgggtgctgggccgccattgcaaatttctgtgcctactgcaagagaagacagaagatggtgagtggaaccacctgtgcacaccagccctattccttccctcctgcctggtgtgacctctaccaacccctgcaggaggaaggacagcacctgggtctgtgaccagcccaagccgattagctgggctgagcctttcttagtgctttagcctctgttgacactgtgccctgattatgctcatcctggccttccatagtcctgaagtcgccttgtttatgtagcataggatagcgggaatagcatggggtagggggatagcatggggtaggggaatagcatggggtagcgggaatagcatggggtagcgggaatagcatggggtagcgggaatagcatggggtagcgggaatagcatggcgtagcgggaatagcatggggtaggggaatagcatggggtagcgggaatagcatggggtagcgggaatagcatggggtagcgggaatagcatggggtagtgggaatagcatggcgtagcgggaatagcatggggtagcgggaatagcatggggtagtgggaatagcatggggtagcgggaatagcatggcgtagtgggaatagcatggggtagtgggaatagcatggggtaggggaatagcatggggtagcgggaatagcatggggtagggggatagcatggggtaggggaatagcatggggtagtgggaatagcatggggtaggggaatagcatggggtagcgggaatagcatggggtagtgggactagcatggggtagtggcagcagcatggagtagtgggaatagcatggggtagtgggagcagcatagggtaggggaatagcatggggtagcgggaatagcatggcatagcgggaatagcatggggtaggggaatagcgtggggtagtgggagcagcatggggtaggggaatagcgtggggtagtgggagcagcatggggtaggggaatagcgtggggtagtgggagcagcatggggtaggggaatagcatggggtagcgggaatagcatggcatagcgggaatagcatggggtaggggaatagcgtggggtagtgggagcagcatggggtaggggaatagcgtggggtagtgggagcagcatggggtaggggaatagcgtggggtagtgggagcagcatggggtaggggaatagcatggggtagcgggaatagcatggcatagcgggaatagcatggggtaggggaatagcgtggggtagtgggagcagcatggggtaggggaatagcgtggggtagtgggagcagcatggggtaggggaatagcatggggtaggggaatagcatggcatagcaggaatagcatggggtaggggaatagcatggcatagcgggaatagcatggggtaggggaatagcgtggggtagtgggagcagcatggggtagcgggaatagcatggggtaggggaatagcatggggtagcgggaatagcatggggtagtggtactagcatggggtaggggaatagcatggggtagcgggaatagcatggggtagtggtactagcatggggtaggggaatagcatggggtagtgggagcagcatggggtagtgggagcagcatggggtagtgggagcagcatggggtagcgggaatagcatgggatactgggagcagcgggaatagcaagccaaacctcagagctaaggtagccaagtgcgggccaatggcaagaccacgatgcctttgggatttgaacttgggggtgtgctgacttgttgcaactaagtcctttataaaggacataagatatggttacttctttcttgaaaaatggggttcactggctaggaacagaggaaatttttcagtccgggtttgctaccgaggtggagtcagctgccactctcccccgccgtggcctctctccctgcactgtggccctgtccacctcgaggcttcttgaaagtggctctgcttttctccattttaactctgctctgtgccctgtcttttcattttgccttgggagagtcaccgagtccctgccccacaggccacacagagccagacctttcttggctgccaccctctcctcctcctccttctcctccagagccttcactttggcctcatactcatcagccagcgccttccactctttcctattgttctgcagtcggtcgaacatgggcaggatctcttcgtggaaacgagagaactcctgaggggagtcgagaagtcaccaccagtcctgtcctgcctgctctctc

SEQ ID NO: 7964 - DNA, 1280 bp, Artificial sequence
  DNA replication origin
cggtgcggaggtcagggacaagatggtgccaccggtgcaggtctctccgctcatcaaggtgatccaggctttgcagccgccgcccagtgctctgggcccccccgtgtcccgccccgcagctccgaccccgcgggctgcgacccccggcccccgcccccatgatcctcgccccgtgaccctcgcccggcgaccggacccccacccctcctgcgacctctgcccagcgaccccgccccccctcctcccgcgacccccgtcccgcgagccccgtttcgcgccgcctctgaccaacctctttcgcagctcggccgctactccgccctgttcctcggtgtggcctacggagccacgcgctacagtgagtgaccgcgggcggggccggggcggggtctgctcggctttcctgtggagctcctgtgctatttggagaactccagctctggaagggggcttgggacgcatgcgaggctgcaggaccgtgtcctccaccgagcgtgaccccgatagtggaatcagctcacccaaagctcaggcttctgaggcccgggcgggggactcgaaaacggctgcttcttggtgaaaacgggtgctaaatggctgttcgagtgctgaggtcttgatgggaggcagtccctgttcgcagaggacgagtgagccagtgcgtgagcgggtgggcagcaggggccctgtagcctctgggttggactcgtcagggtgaaggtcaggcgttgactcgcattaacataaagagcgggaacagcaggtgcgtctggtttacagcgtcgctgaagataccttgacctgtggactcagttccttttgtacagcatttccagtgaattttattctcctgcattccgccaaacagattacctaaaacctcgggcagaagaggagaggaggatagcagcagaagagaagaagaagcaggatgaactgaaacggattgccagagaattggcagaaggtacgagtgacactggctcttatagattgtccctcccaggtttgtgcagggataaggaaaatggaggaggacatttaagcagagctaagtagatgcggattgtttaaaaatggggaagctggccaggcgtggtggctcatgcctgtatcccagcactttgggaggccaaggcgggcagatcacctgaggttaggagttcaagaccagcctgaccaacatggtgcaaccctgtctctacaaaaattagccgggcatggcccggtgcggtggctcatgcctgtaatcctagcactttgggaggctgagacaggca

SEQ ID NO: 7965 - DNA, 1706 bp, Artificial sequence
  DNA replication origin
acagcaggtgggatccctgggggcgccaccgtgtctgcaaggctaaaaagacaggtgccacttgcatgtctcttgagcagaggtcctaccccctgagggacacatggtcacagttggcgtcccctgagatgctgcctggtgccatccccaggtccagcggcctctatgaagcactgactcctgaggttgaggaccctggaggcatgacctgcccaggagggacctggggccgactgcaaggtgtcaggtgaccagatgtggaaccctggggctgggagcaagggccagggcatcccctgctgccagtccagtggggtctgggtgtgatcctgaaggggcactgctgggctgcaggagtggggagaaccacaccgaggggggaagcatggttgggaggccccccgaggccaccgggaatgtgagaagggctgcagagccccctgcagagggttcccaggccactggagtctgagcacagtgctaaagatagcagcaagcctgagccgggggagtatcggcttctgcacccacagctgacctgacagctgcagaggcccctgcgggcggtgtgctgagccaggtgggacccgtcccaccactaagctctcaggaaaggccttgagcaaaggcaagtctccattggcttcagggggttttccccaggccgtgtgtgtttgcccgcatgttttctctgctggtgccctgccccgccccacctctggtggaagctgctggtatgtccccctcaccccctaccttgggccccagagacacttatttttgattctggaagcaggagttgctgaggagtctggattattttaaactccagtgaagggaaaacccattgtcacctgaggccgtctgccctggcggaagcgggggcttgccgagggccaagatggttctgtgccttgtggatccagtgtgcacctgcggcttcctcagcgagcagtagacacggggagggctggagtttgcttctggccccctgaggacagggttcaggcagaggcctcaggcaggagtcttcagggactgccagccaacctcacagaagctggagaaaagatcaggtggccctacagcaagtacctaacctttttggcgcctgggacaggtttcacggaggacagtttttccgtgttggggaggaaggtttcgggatgaaactattccacctcagttcatcaggcattagattctcaccagagcgcaatccagatccaagtgcgcagctcacagtagggttcacgctcctatgggaatctgatgcccaggctgatctgaaagtgggtggagctcgggcaatcatgctccctcacctcgtcctgtgctgcccggttcctaacgggccacaagctggtactggtctgcacctgggggttggggacccctgccctataggactggccttggtatacccagctcaggaaacagagcccagtgacttcctagtttctcagccagagaggcccaggccctggaccccagagcaagccaggagagggggcagaggcgacttaggcccggacaggtagcccaggccgccaggatcacgggtcctccccatgcttgcttcaagagtcctggagtttgtgatgctgcaccttagcgagacccgagccatagttctccagttgcttctgcctgtagcagtgcagggccaggaggggacacaggaggccttgcgtcactactgcatg

SEQ ID NO: 7966 - DNA, 722 bp, Artificial sequence
  DNA replication origin
agctgcagtcacccacagcagcgttgtgcaaatctagaaaaagtgccccttcctctggctcctgcagttccagggtgcccaggcccccagccaagagcgtgtacaggtggccctgctgacacacagaatccttgggagaacaaagcctccccggggttcggggacaggtggatgggaggtagtcctggccagaggtatctggggaggctgggggccttgcggggtgaggcagggcaagggtgtgagtcactgccaggctgccaaagctcactctgcagctgtccagtcccctggggtagccccaagcctgtccttgtagggagtggcagccggagtctgaactgtcctgggggaccaagcaggagcttaagatgggcaagacctggggccctgggcagacgcatcaaagcaggcagaagcaggcatggtgagcaggccgccgtgcatgcctggggcaggcgtgtgggtgtgagctgtgctgtgcatgtgtacatgcgcacagacgagcgtgggcgtgtccgtgcttgcgtgtgaatgcaggtgtgggcgtgtgctctgcctgcatatgtgtgtgcatgagcgtgtgtatgtgcgtgtgtgtgaccttgcgggtgtgggctgtgctgtgttgtgggaagtacgtgcctcacgttgctctcctggtgagagtccggagcaggatgagggggttcctggctttcacaaaatcccggtacccagaa

SEQ ID NO: 7967 - DNA, 1378 bp, Artificial sequence
  DNA replication origin
tggtcagaggtggggaggtgggcgtggcatctggtggctgactgtcccttttgggacaggatgagatcactggggttccccggaagccgggccgccctggccgcccgggcactcactactccttgttgattttccctttcccgtccgggtccagcatcttgaaggcgttaagaatggtctcctcggcgtcggtacctgccacaaaggcaccttcagcccagggccgtcagggtggcagtcccgtggctgccaagggcagatggcaggaggggagacccctgccccaagcagggggagactccaagcctctgcccacaaggtggcctctgcctgaaggccttctcctttcctgagccccaaggaggccttgtcgggcactcctgccctggggtgtagtgagttttggggtgcccagggtcagcccaggcctggagctgggggtgagtgctgcatgagtgagggacagaggtgtcgacggcgggtcacacagcacgtggggcaggagggcgggcctgagcacatggctctggggtggctgacggggccccacagttgttggctcccagagtgccaggccctagggcttctccagagattggaaaagagagatttttacgtgaaatgtccggatctctaactgttaggaattagctaggagggccaggcctgccccaccggtgctcaccgctcagcttctccccaaacaggttcagaaacatggtgaagttgatgggccccgaggcctctttgagcatggcgtccagctcgtcgtccttgacgttggtcttgcctgttacagacatgggggcatcacagggcagggcttgttgcctgccctgtgccaccagcaggtgaccccagcacagggccaggcaggcagatgggaagggtggggagggagcgggaaggagacgcttggcccaggcacgtggggcagtgggtgcatctggctggctgtgtccacctcaccccaaaccgtgagccccaggactaagtgctgagggagagggaggtgacacagagcctgggaaggtgctgggatctgctgttcttaattctgggcataagcagggccgagaggaaggtgggtcacttgcgaccctcccaccccaaggagaaatcactccccagctcccagggcaggaccgaagccccctgccctcctgcctcaggtcagaggcagctgctgggaacagaatgtgccgcagggaggactgaagctggggagggcagtgtgccccaccacactcgggctgtgctgcagaggctgggcagcgtctccacgccctctgtcagctctgtggtctggccgggcagggtctccatgccctctgtcagctctgtggtcctgcctgggggcaagccgcctgcctgcctg

SEQ ID NO: 7968 - DNA, 1114 bp, Artificial sequence
  DNA replication origin
gcggcgctggagggggcggggcggcggcggctgcagccacagtctgggcgcacgtgtcgggctcggcccttcagcagcgtcggggaggaccgtgtggggtctgggggaggtgcgggggtcctgaggggtggcccggcattagtctcgcccgctggggctgggagcggcgcgtcgggggtggggggcggctccggaccgcacagctgtgagccccgcccctccggctgggacagacgctcaggccgcggaggggtctccagccgctgatctaacggaggggaggggtctccaaccgctgacctgatccctctgagccagttccgtccctcagacgggcacttcgggagccccccgggggcctgttctgtcctgggtcctaaccgcggcgctgctcctcgggctccgcgtccccctccacccagctgaccccgggagccccgccctcccctcgtgggcttggcagggaagccgcgggccagacctcttccgccgtcatcttgtcagcctgggacatcagcagacgcttgatgctgaggacgaggaaaggggtcagcgcgggctgatgcgggggtgcaggagccttctcggtggggctcaggtgctccaggggccccaggttgtactcgctcactgcactcccgcccttcccgctggagtgtggccctggggcaggtcccttcccaacacacactcaggggccatcacttctgggggagccgctgatggggacagagccggaaggaggttacaggccagcgcctggtactttccccggcgcctagcaggagctgaagatggaggagtgggctgaggggaagccgccccacccccaccgggcacaggcgctggtccctgtgtgagcagggctggcctcccactcagctgggatcctgggttcgctcctcatggccctgaagctggtcagaggtggggaggtgggcgtggcatctggtggctgactgtcccttttgggacaggatgagatcactggggttccccggaagccgggccgccctggccgcccgggcactcactactccttgttgattttccctttcccgtccgggtccagcatcttgaaggcgttaagaatggtctcctcggcgtcggtacc

SEQ ID NO: 7969 - DNA, 729 bp, Artificial sequence
  DNA replication origin
cgccacatcgatggaggcgaactggaacatctggtccacctgcgggcgggggcgaaagggctccttgcgggctccgggagcgaattacaagcgcgcacctgcagcggccccgggtgtggtttctgcgccgcgggagggggagcggggaggggcccgggtgcggggtgagggcggcgctggagggggcggggcggcgctggagggggcggggcggcgctggagggggcggggcggcgctggagggggcggggcggcgctggagggggcggggcggcgctggagggggcggggcggcgctggagggggcggggcggcgctggagggggcggggcggcggcggctgcagccacagtctgggcgcacgtgtcgggctcggcccttcagcagcgtcggggaggaccgtgtggggtctgggggaggtgcgggggtcctgaggggtggcccggcattagtctcgcccgctggggctgggagcggcgcgtcgggggtggggggcggctccggaccgcacagctgtgagccccgcccctccggctgggacagacgctcaggccgcggaggggtctccagccgctgatctaacggaggggaggggtctccaaccgctgacctgatccctctgagccagttccgtccctcagacgggcacttcgggagccccccgggggcctgttctgtcctgggtcctaaccgcggcgctgctcctcgggctccgcgtccccctccacc

SEQ ID NO: 7970 - DNA, 871 bp, Artificial sequence
  DNA replication origin
cctgggagcgggacaggtgaaccctacgtggggagccctaaacagcaggacaggtgagcaccacgcagggagtccccgggcaataggacaggtgagccaggacaggtgtggccgagatcagagatggggctggcacacccatatcccagaccccatgctagtgacctctctcaggacctgggtctgcaaacaccccctcagggctgtcaagagctgcgagtgggctctccgtctggggtcactctgtggtcaagggtagtggggtcaccataggccagcattgggctctgcccatctgtggcccctgggcttggctgtggggacagctgtgctatgtgtccccagtgtctctgctgctgatggccggcctgtgcaccttcttcagctgcatcctggcggtcttcttccacaccccataccggcgcctgcaggccgagtctggggagcccccctccacccgtaacgccgtgggcggcgcagactcagggccgggtgtggaccgagggggagcaggaagggctggggtcctggggcccagcacggcgactccggagtgcacggcgaggggggcctcgctagaggaccccagagggcccgggagcccccacccagcctgccaccgagcgactccccgtgcgcaaggcccagcagccaccgacgcgccctcccgccccggcagactcgcaggcagggtccaagcgtccaggtttattgacccggctgggtctcactcctccttctcctccccgtgggtgatcacgtagctgagcgccttgtagtccaggttgcccgccacatcgatggaggcgaactggaacatctggtccacctgcgggcgggggcgaaagggctccttgcgggctccgggagc

SEQ ID NO: 7971 - DNA, 1184 bp, Artificial sequence
  DNA replication origin
ctccccctcccgcggcgcagaaaccacacccggggccgctgcaggtgcgcgcttgtaattcgctcccggagcccgcaaggagccctttcgcccccgcccgcaggtggaccagatgttccagttcgcctccatcgatgtggcgggcaacctggactacaaggcgctcagctacgtgatcacccacggggaggagaaggaggagtgagacccagccgggtcaataaacctggacgcttggaccctgcctgcgagtctgccggggcgggagggcgcgtcggtggctgctgggccttgcgcacggggagtcgctcggtggcaggctgggtgggggctcccgggccctctggggtcctctagcgaggcccccctcgccgtgcactccggagtcgccgtgctgggccccaggaccccagcccttcctgctccccctcggtccacacccggccctgagtctgcgccgcccacggcgttacgggtggaggggggctccccagactcggcctgcaggcgccggtatggggtgtggaagaagaccgccaggatgcagctgaagaaggtgcacaggccggccatcagcagcagagacactggggacacatagcacagctgtccccacagccaagcccaggggccacagatgggcagagcccaatgctggcctatggtgaccccactacccttgaccacagagtgaccccagacggagagcccactcgcagctcttgacagccctgagggggtgtttgcagacccaggtcctgagagaggtcactagcatggggtctgggatatgggtgtgccagccccatctctgatctcggccacacctgtcctggctcacctgtcctattgcccggggactccctgcgtggtgctcacctgtcctgctgtttagggctccccacgtagggttcacctgtcccgctcccagggaatcttcacatggggctcacctgtcctgttccctggggactccccatgtgaggctcacctgtccagtcaagtggatcctccccctgctggcaggtggacaaggacggctccgagcgtcgcacagtcagtgccgtcattgccagcatgatgagtattccctcggcctgcctggacacacgtggccctcagcccccgctgcactgcccaccccctcggagccaggtgccaccttgggaaatgttgacatcggt

SEQ ID NO: 7972 - DNA, 1621 bp, Artificial sequence
  DNA replication origin
tgggggtgggggcaagaggctgaggaggcgatgggtttgggaagggcccccgggctccggggctgagacgctctttcccagcagctcatgtggaacaaggcctatgtcatcctggctgtgtgcttggggggaatgatcgggatctctgccagcttctcagccctcctggagcagatcctctgtgcaagcggccactccagtgtgagcctggccccacccctggggaccctgcctctgtcatccgccccatatggccatggagtcaccgccgcctccagggtgcccagtgtccgaccctggcgggggccacattgacacccttctgtgctgtgggccctcccgagatgccctgtgtgacattatgtccacaggcagtggaggtggtgggcacagctgcagtggggtggggcagctgtgggacggagcggagggactgacggtgccctgtggatgggaaggtggggcccccagggctcccagtgccccttcccagcaaggccccgcccctgtgggtctgcaggacagcgccaccttctggtatccagacgtgcagcggggagggccttgctctgctcgcatatctccgagctggccctctgccctctgccttctgggatcagtgctcagtgtaggattgggggcatgtttccacctttgccagggccacaggcaccacggccctgtggggcctctgtggagacaggctcttccctttagcgattgctttgctctggggtggggtgggaaacacaaggcaggaaaccctaccccgcaggcagccagcggtgcgtctggaagctgtgttgctatgcctgggccttgggcacagcacacggccctacactgagccccctgccctgacggcatgcacctaggataatggtggcctcttggggccctggcctcttctcgcctcctccaggggttttccggcctctgtggcgctctcttcatcacgtttgggatcctgggggcactggctctcggcccctatgtggaccggaccaagcacttcactgaggccaccaagattggcctgtgcctgttctctctggcctgcgtgccctttgccctggtgagggtctcctcaagccaagactgccctgtgggggtgggtgggtggtgaggcccggagagggcggttggcggcttggctggaacagaggtctggactgtctcatgcccagcctctgccagccagggtggccccggggtgggatgggttctcctgccccgtgtcccatgtcccgtgaagccaggtccagttctgactgccaccccctccacctgtctgcctgccgttccgctgctcccaggtgtcccagctgcagggacagacccttgccctggctgccacctgctcgctgctcgggctgtttggcttctcggtgggccccgtggccatggagttggcggtcgagtgttccttccccgtgggggagggggctgccacaggcatgatctttgtgctggggtgagtgtccatctgcccctgctgcaaccccagagatactccccttgctccacccctacacccctggggttgcaccatgtggtccaggccccttttcggggaggtggggaacctgcctgctctggcaagggccgagcaggttctgag

SEQ ID NO: 7973 - DNA, 1076 bp, Artificial sequence
  DNA replication origin
gacctcatgatccgtctgcctcggcttcccaaagtgctaggatgacaggcgtgagccaccgcgcccggccagtgtgtgatgtttctatgcctgcctgtgtgtattgagtgtgtgtggtgtgtgcggtgcgtgtctctgttcctgtgcccatgtgtattgtgtgatgtgtgcatatgtgtctgtgtgtctgtgcacatgtgtggtgtgtacctgtgtgtgctcgtgcatgtgtatcaggtgcgggtggtgtgtttgtgcttgggggtatgtactgagcgtgagtctgtatgcacgtgtgcctctgcacccacctgtgtctgtgtgttgagccctatcatgggctgtgcagctggcagtgagatgtaagtctggagcctgggggtgctgggctaacatcagccaggagggtgtcactggtgagggatgcgttgacagccaggggtccccatgagcccctggagcaggcccctcccagcctgggcctcgcaaagggcagctgcagaccagaggttgggaggcagccggtggtggggcaggaggagctgggaggtggcgcctgggacaggcagggctgcggcgtgtgtgggtgccagtctgcgtggtctccttgtgcacacacacccctccccagctcggtgtctataccatccctgctggcgtcgtctgcctgctgtccaccatctgcctgtgggagagtgtgccccccaccccgccctctgccggggctgccagctccacctcagagaagttcctggatgggctcaagctggtcagtgccgtgggatccccggggtagggtggatttgggggtgggggcaagaggctgaggaggcgatgggtttgggaagggcccccgggctccggggctgagacgctctttcccagcagctcatgtggaacaaggcctatgtcatcctggctgtgtgcttggggggaatgatcgggatctctgccagcttctcagccctcctggagcagatcctctgtgcaagcggccactccagtgtgagcctggccccacccctggggaccctgcctctgtcatccgccccatatggccatggagtcaccgccgc

SEQ ID NO: 7974 - DNA, 847 bp, Artificial sequence
  DNA replication origin
gccgagctgacactttgtgcatccgcccacccagcgaaccctctgggcgtccttgtggccaatgtgctgtcccctgtgctggtcaagaagggtgaggacattccgttaatggtgaggggtcatgagacgcccgtgcctggtctgtgtggtgtgtgcgcatgcacgtctgtgtgttcctgatcccaagtgtgtccgtgttcctgtgcccgtgtgtgattcccgtcccccgccccgccacccgagaaggagtctcagcctgtcgctcaggctgaattgcagtggcgcgatctcggctcactgcaacctccgcctactgggtttaagcaattcccctgcctcatcttcccgagtagctgggactacaggcgtgcgccaccatgcttggctaatttttttttttttgtatttttggtagagttggggtttcaccatgttggccaggctggtctcgaactcctgacctcatgatccgtctgcctcggcttcccaaagtgctaggatgacaggcgtgagccaccgcgcccggccagtgtgtgatgtttctatgcctgcctgtgtgtattgagtgtgtgtggtgtgtgcggtgcgtgtctctgttcctgtgcccatgtgtattgtgtgatgtgtgcatatgtgtctgtgtgtctgtgcacatgtgtggtgtgtacctgtgtgtgctcgtgcatgtgtatcaggtgcgggtggtgtgtttgtgcttgggggtatgtactgagcgtgagtctgtatgcacgtgtgcctctgcacccacctgtgtctgtgtgttgagccctatcatgggctgtgcagctggcagtgagatgtaagtctggagcctgggggtgctggg

SEQ ID NO: 7975 - DNA, 783 bp, Artificial sequence
  DNA replication origin
ggaggtccaggtgctcgggggacggggcaggcacttgggctggtggcagcgttcctgacccggtccccgaccccctcctcgcagaccatcctgggtgcgtggctgaactttgccgggagtgtgctacgcatggtgccctgcatggttgttgggacccaaaacccatttgccttcctcatgggtggccagagcctctgtgcccttgcccagagcctggtcatcttctctccagccaagctggctgccttgtggttcccagagcaccagcgagccacggccaacatgctcgccaccatgtgtgagttccggggagggaggccgcctgcctgggctcacctcagggtccacacagacgctcggctccccaggctctctggccagggtggaggagctggggcccggaaggttctgcctgtgggctggcgatgaagccaggccacagccgagctgacactttgtgcatccgcccacccagcgaaccctctgggcgtccttgtggccaatgtgctgtcccctgtgctggtcaagaagggtgaggacattccgttaatggtgaggggtcatgagacgcccgtgcctggtctgtgtggtgtgtgcgcatgcacgtctgtgtgttcctgatcccaagtgtgtccgtgttcctgtgcccgtgtgtgattcccgtcccccgccccgccacccgagaaggagtctcagcctgtcgctcaggctgaattgcagtggcgcgatctcggctcactgcaacctccgcctactgggtttaagcaattcccctgcctcatc

SEQ ID NO: 7976 - DNA, 1935 bp, Artificial sequence
  DNA replication origin
ggtccacagcccccttcaggaagtgcagagcttctgctgggcagagtgacttccaggccgcctttcctgctgagaagcacacaggctgtgaccggggcccttcccggaagggacattcggtttttgtggcagggacttccagcctgaggccgaaggaggagggtccaacttcacctttgcccgcccttcccccgcttttttgggtctcctttaactgggacggggcgggaccctcctccgtagtccttggggcggaactggccccccgtggcccggcccggcccggccccacctccgcccgcaggcggtcccggcccacgcgggaaggtccttaagcccgggcggccggcgggaccggcggagacccgtggaggccgccgacgatggcggggccgacggaggccgagacggggttggccgagccccgggccctgtgcgcgcagcggggccaccgcacctacgcgcgccgctgggtgttcctgctcgcgatcagcctgctcaactgctccaacgccacggtaggggcaggggcggggacaggtggctccgggaccctcagtccctcggaccagccgggttttgttttcctgtggccacagcccgaggtgccaggtgctggctgggggcggggggtgccttctggaggtggctagggattgcgggcactgggggcactgtctgtcctggaggtggctgggcccagggcacagagcagggctgggtgccccgggggatctgccagtcacggagtcccagcccttcccagccttcagtggctccagcctgggtccctcttccccagccagtcacatacaggtggccctgcgttggccctctctccttccacgcctcccagccccaggacagcaggcacacagcagaggcgcgcttggagccgccctcccctccacctgactctgagtgaggggcggctcctgggctgggctgggttccgtcctgcccccacccccttcaggtgttgcacgctgcagcctttcccgccctgtgtgccctcatcagccatcccccggagcctcaggaactggtcaggcagtatctggccaacgtgcaatgaacagctagagttggcagcaggacccacagctcagggaggcgccaggtcacggggatggtcaggaagctcgggggcaggggcaggagtcactctcaggcctgggtcagggctcttccaggtggaccccggggcctctcccctcctcctttgctggctgggtatggagggccagcctctggccgagacaggcccgggatctgctggatgggcccaggggctgcctgctgcccacaatgctggcacgagccgtaactcactgctgtggcttggcgtcctggcccaccatgtccaggcactggggaagccataactggctttgggtggagtgtctgagggtgcagggctggtttcatggtccaagagtcagtgggtgtcgtaggtgtggggcgttccttggacagtcaagggcctcctgctgcagttcttcactgttttattaatatccacgagtcatcatggagcacacagaaatctcaccctgacaccaagagtcgtcatggtctctgcctgggtcaccacagtgagccgtaagcaccatgttcactccagccaagtgcccttgaggctggaggttactcatctgcagccagtgaccagggatcccgggttccaaccagcagcatgagggccaggcggagcagagcttgggtcaacacccaccccggaaggcagcccagtgctctggatgagactcaaaggacccaagggggcgagcgcaggcagggtcgaggctgggagatgaggaagggagtcagacagatcgtcctcccacgttgccccgcacgcttcagacgcatctcttctcagtgagtcagctgtgggccccactcaggcccccgaggaaccaggacagggctgag

SEQ ID NO: 7977 - DNA, 992 bp, Artificial sequence
  DNA replication origin
gtcggccccgccatcgtcggcggcctccacgggtctccgccggtcccgccggccgcccgggcttaaggaccttcccgcgtgggccgggaccgcctgcgggcggaggtggggccgggccgggccgggccacggggggccagttccgccccaaggactacggaggagggtcccgccccgtcccagttaaaggagacccaaaaaagcgggggaagggcgggcaaaggtgaagttggaccctcctccttcggcctcaggctggaagtccctgccacaaaaaccgaatgtcccttccgggaagggccccggtcacagcctgtgtgcttctcagcaggaaaggcggcctggaagtcactctgcccagcagaagctctgcacttcctgaagggggctgtggaccccaagttcctgaggttcaagccagccacagggaggggccagaggccagcctggaagaagaggctgggctggctttgcgcagagcctcaaatcagaccagtccctctacagcccctgcgggaagcaggcatggggtaggagggcgaggggctgcaggccaaggctggagggaaggccagaaaggcctgtgggccccaccctggggtaggcagtccgccacacacgcaccggattgttacctgcattttacaatggaggacacggctctcagaggagtaggcacaggtttctgtttgtttaggatggagaggcctgtgtgttggaaggcagaggagggagtttcggcttagtcttttctgcaagaacctgctgatcccacaactgtgcctggcccaccctgggggaacccaagaggctccaggccctgttgctgaggccagtataggggtggggtggaggctggcctggtcagacgtgcaaacaggatttcccccaaacagggaggctctcttgacccttgaaaccatccccgtttcctgaacagtattattcgtggtttttgtcttaaacattcatctcctttgccagggcctgtc

SEQ ID NO: 7978 - DNA, 1032 bp, Artificial sequence
  DNA replication origin
cgcgcagtgtggaggcttggtggcgagaggggaggccccgtaggcccaggggcactcgctgcgaggctgtgcggtgcaggcatggagcaggagtcgggagtcattagctcgtcccgtctggagaggtggtggctgagggagtgaccctgcgactgtccccgtgaagtctagagttggaccccgggagcagccaccaggcagggggccccgggcccaggtatggtgcagcacgtggggaagcggcttgagtccgctgctgagaggggcctgagaagggctgggggcctgctgagatctccagcactgggtggacacgttatccgggtgggaggaggacagacagcagacatgtgaatgtgtacagcattcccaggcatgctgctgtgaaggggagggactaaatgtggccactgctgcccccgggggaggggaggcagggagggctccgtggagccatggggtggcccagtgcaggggaggggcccactggagagggctgcctgggattggggtactggggtgctggccctccacaagagccctgactgcagttttcagttggtggaggcaggccccagatgtggaggggaggactggaggatcatcccagaaggagggcaggggcaaggtattggtgctggggtgcaaggggcagggggtggccagcaggccaggaacagtcctgggctgagtgtggtggcctcaggaagaggcagagtggtaagctgcagttcagaactcactccaggccccaggcccctcctcaaggaggtgcagaccctacccctaggcttcccactactctcctgggtgggtgccagcggtgcccggaccttgactctgagccctgggctcttgtgtccagctctgtttctgctgaatgtcattaggaagcttaaatgccacatggccggatggcttccccaggccatcctgagtctgctgtgtaccccaggaccccccaccccccaccgccagtcctgaggcaagaccccagagtcctctgcaccctcttcctctcatgcccaaact

SEQ ID NO: 7979 - DNA, 1035 bp, Artificial sequence
  DNA replication origin
gggtcaggattaggggtggggtcagggtcaggggttagggtctggtctagggttagggttgggtttagggttagggtcagggttagggttagggttgggttttagggttagggtcagggttagggttagagtcagggttaggactggatttagggttagggtcagcattaggggttagggttagggttggttttacggttagggtcaggattaggggtagggtcagagttaggggttaggtttagggttagggttgggtttagggttagggtcaggattaggggtggggtcagggtcaggggttcgggtctggtcatgtttaggcttgtatttaggttatgttcagcatcaggacggacagggcacccacgtgcggactctccgacctgggtgccctccgccagggtggagcagtacgggcggcatttgcgccttcgtgggactggcactgtcctgagagggcgggatccgaggaccgagggcgcgtgcgggggtgaggcggacgtgcaggcacgcggggtcctagggtctcccggtttgcgggttctgggctggcggcccaggacgggagggcaggttgggtcttgggtgggaagcgagaccactgtggttccgggcggcggggcaccgcgcagtgtggaggcttggtggcgagaggggaggccccgtaggcccaggggcactcgctgcgaggctgtgcggtgcaggcatggagcaggagtcgggagtcattagctcgtcccgtctggagaggtggtggctgagggagtgaccctgcgactgtccccgtgaagtctagagttggaccccgggagcagccaccaggcagggggccccgggcccaggtatggtgcagcacgtggggaagcggcttgagtccgctgctgagaggggcctgagaagggctgggggcctgctgagatctccagcactgggtggacacgttatccgggtgggaggaggacagacagcagacatgtgaatgtgtacagcattcccaggcatgctgctgtgaaggggagggactaaatgtgg

SEQ ID NO: 7980 - DNA, 1239 bp, Artificial sequence
  DNA replication origin
cggccctcccgggcctgccaagggcttcccgggccaggccgacggggacgacggagcgcgggcccggggttcggagccttccgggccggacacgggccgaggccgcagcctgaggagcgggcgccgagggcccaggccaggcggggcggactcactgacctgcggtctcggggctgcgggcgagcaaggcgcacgcggggtccgcgccggaggggggagggggcgccgctccctctgggtcccccccaagaggaggagaaaaaagcccgtccggagtttaaaacaaagaggcggaaatgcccgagccgagccgagcgccgcgtcgggggcgccgcgctcggagcatgcgcggtgtgcgtctgggctcccaccccgcggcaaggggcgtgggcggggccaggcggtaaggggtggggataggggcggggaggggcgtgttcagagggcgcaggcgcgtcgggcctggactcggcggagggagccgcggggcgcgagggccaggggcgaggcatagggcggggccatgaggggcgtggtcaggagagcgacagggccgcgctgtgctgagggacccgacgggtcctggacgatcgtgagctggggcgctggagcagcagagtcctcaggcccgggtccctccgggggtgccgtccagtacgggtgctgctgtcctttgtgggagccgggactgagcgccctcccggcagggttaagggtcggtgttagggtcaggggtcgggttaggggtcagagtcagggttagggttgggtttaggtttagggtcagggttaggggttagagtcagggttaggactgggtttagggctagggtcagcattaggggttagggttagggttgggtttatggttagggtcaggattaggggtggggtcagggtcaggggttagggtctggtctagggttagggttgggtttagggttagggtcagggttagggttagggttgggttttagggttagggtcagggttagggttagagtcagggttaggactggatttagggttagggtcagcattaggggttagggttagggttggttttacggttagggtcaggattaggggtagggtcagagttaggggttaggtttagggttagggttgggtttagggttagggtcaggattaggggtggggtcagggtcaggggttcgggtctggtcatgtttaggcttgtatttaggttatgttcagcatcaggacggacagggcacc

SEQ ID NO: 7981 - DNA, 1337 bp, Artificial sequence
  DNA replication origin
tctgttttcacctgggggccgggaccctgagacagctctgttttcacctgggggccgggaccctgggacagctctgttttcccctgggggccgggaccctgggacagccctgttttcccctgggggtcgggaccctgggacagccctgttttcacctgggggtcgggaccctgagacagccctgttttcccctgggggtcgggaccctgggacagccctgttttcccctgggggccgggaccctgggacagccctgttttcccctgggggtcgggaccctgggacagccctgttttcccctgggggccgggaccctgggacagccctgttttcacctgggggccgggaccctgggacagccctgttttcacctgggggccgggaccctgagacagccctgttttctcccagggcccggcaccctgagactggacagtgagaagggctcatgacatggacaggcttctagatgaccaggacctcaaacggggtcacttagggtcgggacactggtgtggactgggaagaaggctaggctctcaaagaggacctgatgagagctggaacttccagacaggtcctcagagggctgggactcctgaacaagtcactgaggagcatgtaggccccaagactggactgtaaggagtactgggaccctcgggggggaatccagcagtgtcctgaatctgcccagtccactcagctggatgcacctgctgtgaaggccaggcatctggcatcctggtacccgaggccctttccatgagaccctgggccagccccacagcccctgcacatgaaccgcctaggtgatacctggggtaggtatgaggcaggggcctcagggttccaggagctcccagcccacaggctccacacctcaggctggcactgcaccctcccactcagcccctcgtccggggctgctgtcctgtccttgccttggctgtggtccgtgtccagcaccttcaacccctcctgcccctctccccatcttcaaggtcatgtgagtgccccacttcctcagtgtagaggcgtttccagtgtccgggagacttggaggaggggtggggtctgagctgggatgtggactcctgggcatattttggggacagttggtccaagtcaggaaagttggagcaggcaaggctatttcccactccctctctagtaagggaaggaattaaaggatcctggtggtgatcgggctggggacgggggttggtttatttctctgaaacctttgaatcagccttttatcaaaaacttgtgggtgttttcctttaatttggaagtggtaatgaaaaagtggggtgcatgaggtattcagaagc

SEQ ID NO: 7982 - DNA, 1176 bp, Artificial sequence
  DNA replication origin
gctcttgtagcccaggctggagtgcagtggcgcgatctcggctcactgcaacctccgcctcctggttcaagtgattctcctgcctcagctccctaagtagctgggattacaggcgcctgccaccatgcccggctaagtttttgtatttttagtagagatggggttttgccatgttggccaggctggtctcaaactcctgacctcatgacccgcccgccttggcctcccaaagtgctgggattacaggcgtgagccaccgcgcccggccaataaactctaatatttaggtgcatttagagagtggatttgttggcttggtttcttttttctttttttcaaattcattgatatttgctgggctttgctacattaacagcaaattccagatgtttaatgagaaatagatgcaaagaggggaaatctgtctgcagacttccttgaaactccctctaatcagtgggtcccgttggccttgtgggtcttatgggggctgtgagcctcgtgggagctgtgggcctcatgggggctgtatggccttgttgggggcctgtggggcctgtgggccctgtggggggctgtgtacctcctgggggctgtggccaagtgggtcctatgttcttcgtgggtcctgtgtggtctggtgggggctgtggcctcgtgggagctgtggctttgtgagtcctgtgtggcgtcatgggggctgtggccttgtgggtcctgtgtggcctggtgggggctgtggccttgtgggtcctgtgtggcctggtgggggctgtggcttcatgggtcctgtgtggtctggtgggggctgtggcctcatgggggctgtagccttgtgggtcctgtgtggcctggtgggggctgtggctttgtgggtcctgtgtgtctcatgggagccgtggccttgtgggtcctgtgtggccttgtgggggctgtggcctcgtgggggctgtggcctcatgggtcttgtgtgccttgtgggggctatggcctcatgggtcctgtgtggcctggtgggggctgtggccttgtgggtcctgtgtggcctcatgggtcctgtgtggcctcgtcagggctgtggcctcatggatcctgtgtggcctcgtggggggctatgactttgtgcctgtgtctcctgtctgggtcttgtgagctgtcacatttccaggttcttga

SEQ ID NO: 7983 - DNA, 976 bp, Artificial sequence
  DNA replication origin
ggtgactgcgggaggagtgcccgcccatgcatcgctggggagggtgactgcgggaggagcgcctgtgcatcgctgtggagggtgactgtgcaggaggacagagtgccacaagggagagcagcagagtggtttcagctccgggaggtggggctgcccgtccagagaggtgcagggtctcttgtcaggtggacaggggctggcccacccgtgagtgggtagggcctcctgccagggagccttgtgcatggctgggaggacggcaaggctgatgtggacgcagccccgacgtgaacaggaccccacgtggacgggcagtgacgtgcgtgtggacccggggtggacgggcggtgacgtgcgtgtggacccggggtggacgggcggtgacgtgcgtgtggacccggggtggacgggcggtgacgtgcgtgtggacccggcgtggacgggcggtgacgtgcgtgtggacccggcgtggacgcagccccgacgtgaatggatgtggttccgacgtgactgcgctggcatgggaagcagagggtgaggctcggctctgctgtcaggaggacatgtcagacttctgtctctaagatactgctcagacttgtgtggagggtgaattagtgcgagggcggcttggagaagcctgtcctgggcgggtttcaccacttggacgggagctctggcatggtccagggagtggccgaggacagcaaggaggagatgaccccatgggcaagcaggagctcagatgggaggcatggagcagacgggactccacgtggcaccacccctcccacctgggctgggcacccatgaggctgaggaccctggggagggaacgctgcttgtcgggcggtggtgacgatttcatggatgtttgtgaaaccaacctcactgccccattacaacagtgcgggccctgattctcatggttccccagtgaggctgttccacggtggcacaggacacgcctgcagct

SEQ ID NO: 7984 - DNA, 998 bp, Artificial sequence
  DNA replication origin
actgccccattacaacagtgcgggccctgattctcatggttccccagtgaggctgttccacggtggcacaggacacgcctgcagctttgtgcctgtgaatctcaggagctgttttctggaaagttccataactcagcaaaactgactcacaaacaacagaaacttcaaggctgtcctaagatatgggtggcagaagaaaatgtgccccaggcatgggcttgtgatgccggctcttcctcctggcagagctccccagaggaaggctgggctgggcagtcagccagacgggaaagggggctgaggcgtccaggctgcagagggtgccggggtggagagcggaagagagagggagtcggtgccttaggaggctgcgggcgaggcgagggcagagtgcactcgctgggggtcaccctgccccccaggactcctttcacaggacagagaagctcctggtgagcggggctgctgaacgcaggccccagggcctgtaggacccttagggagacgggtggctctgcgtgtgggtgtggagagaggcctgtgggagacggatggatgggtgtctctgtgtatgggcatggggaggggcctgtgggaggtggatgggttgggtggctctgtgtatgggcatggggaggggcctgtgggaggtgggtggatgggtgtctctgcatgtgggtgtggaaagaggcctgtgggagactggtggatgggtggctctgcgtgtgggcgtggagagaggcctgtgggaggtgggtggacatgtgtcgctgcatgtgggtgtggggagaggcctgtgggaggtggatgggttgggtggctctgtgtgtgggcgtggagaggcccgtggcagctccttcgttgcagaaaccgcatcggagcacatcgcgtagtgcaggacacacggggcgtgggacggtgtctgtgtgagagcagcatctgtgtgtatgcagtgttatctaaggacacacccacagacacggacacgtccttacgca

SEQ ID NO: 7985 - DNA, 1911 bp, Artificial sequence
  DNA replication origin
tgtgggaggtgggtggacatgtgtcgctgcatgtgggtgtggggagaggcctgtgggaggtggatgggttgggtggctctgtgtgtgggcgtggagaggcccgtggcagctccttcgttgcagaaaccgcatcggagcacatcgcgtagtgcaggacacacggggcgtgggacggtgtctgtgtgagagcagcatctgtgtgtatgcagtgttatctaaggacacacccacagacacggacacgtccttacgcagagaacagccgctgcctcttagtgttcaggatgatacgtttttccttaatatcatccttcgctttgcacatcatactgaatacgtgtgtatgtgacttttactgcaaaacaaaacaaaaagcagaagctactgtgttatccagacggctgtgtgctgcaggcgcgactcagaacagcagctcctcccagcatcccgcagctaaatgacaggagctggaggctgccccaggcagcggcgtggctggcgtgcggagtgttttgggggtgtctgagctgggtggagaggaaggcatatgtcacactgaggcatcagagacacatccattcacgtcggggctgtgtccgcgccgggtccacactcagtcatcgcccgtccgcgccgggtccacactcagtcatcgcccgtccgcgccgggtccacactcgcgtcatcgcccgtccgcgccgggtccacactcagtcatcgccgtccgcgccgggtccacactcgcgtcatcacctgtctgcgctgggtccacactcgcgtcatcacctgtctgcgctgggtccacactcgcgtcatcgcccacccacgccgggtccacactcgcgacatcgccatccacgccgggtccacactcgcgtcatcgccatccacgccgggtccacactcgcgacatcgccatccacgccgggtccacactcgcgacatcgccatccacgccgggtccacactcgcgtcatcgccatccacgccgggtccacactcgcgtcatcgccatccacgccgggtccacactcgcgacatcgcccgcccgcgccgggtccacactcagtcatcgcccgtccgtgccgggtccacattcgcgtcatcgccatccacgccgggtccacactcacgtcatcgccatccacgccgggtccacactcgcgtcatcgcccacccgcgccgggtccacactcgcgtcatcgccgtccgtgccgggtccacactcagtcatcgccgtccgcgccgggtccacactcggtcatcgccatccgcgcggggatgtgtctgaaaagtgtggtgagagctgtgttccctgcgcatttctgaaggctcctagccgctgcagttgccgggagccatggagccacgtgaccttgaggtccaccggggagaggagggtgcatttcggaggctagaagtggcacctggaggggctggccctgggtgtgatcattgagaggagggaggtggaaaaagatctggaagatgcccttgggaagcagaagaaggtgggtgaccagagtggggtgcccagagggtagggcagggcagaccagaggagggggtgggcttggcacccccgggaaggagggatggggctctgtgaaagtgagagctgtgtggacgtggagcttgtgagtctgaccaggaaagacagagggttccagacggtgcgggggccccttcagtctggttgtgtggggcagggtcctcacccccaggtgagggggccttgtagggcagattcctggaagaccctcaagacgcaggagcggaggctgctggctggatggggatggagccgagagctgagcgggcagcccaggcctgaaggacagcacaggggcctctgtgaggccaggaggggctggagtgcaacaccccctgtgacccaggtctggtgtgtga

SEQ ID NO: 7986 - DNA, 1224 bp, Artificial sequence
  DNA replication origin
tgggtgaccagagtggggtgcccagagggtagggcagggcagaccagaggagggggtgggcttggcacccccgggaaggagggatggggctctgtgaaagtgagagctgtgtggacgtggagcttgtgagtctgaccaggaaagacagagggttccagacggtgcgggggccccttcagtctggttgtgtggggcagggtcctcacccccaggtgagggggccttgtagggcagattcctggaagaccctcaagacgcaggagcggaggctgctggctggatggggatggagccgagagctgagcgggcagcccaggcctgaaggacagcacaggggcctctgtgaggccaggaggggctggagtgcaacaccccctgtgacccaggtctggtgtgtgacgcgtcaggccccacggcaccgcaggctggctggctccccagaaggcctgtggtctccatggccgcagcgcattccggggacagggcagagtggagtcagcagagggaggaggcgtgtggggcgtccagggatcaaggggtctctgggccttgctcccttccccagcagctgtgaggatggtgggggctgctgtctgcccaggactgcaagcgtcaggcacagcagctgctgttaacagtcaaggaatgttcgggtcagtttgagaacttcagggcccaatggcagagccccggcagaaagactcagggcagatggtggttgtcagccgggagggggcacggagccctgggggtggtcaggcccacgtggccttgggacgagagcgaagaggtgggatcggctgcgggagacagggaagtgggtgacaaggaggctcaggggctacagcaaaggccccggaggcttttccacacccgagtccgtcctcggccatgccagccaggtcaggggctcagtcctgtgggccaccacagccggccgcacaggcagggaaggtgaagctccacggagcaccctggtggacagcggtgctgtgggggccatggaccagaaggcggagcccatgctgtgggctgggtggggtggcagctgccagttcaaagtctgtcttttgtttatttacttcataaaatactccaggtgttttgttagaaattattcttggccgggcacggtggctcacatctgtaatcccagcactttgggaggcctaggtgggcagatcctgaggtcaggagtcgagaccagcctggccaacgtggtga

SEQ ID NO: 7987 - DNA, 936 bp, Artificial sequence
  DNA replication origin
accaatagttgtgcacactgagagaagtaggcagttttggatctgaaactggcctggtgacaccgcgggtgcagcaggcgggcagatgcgggcacaggagggagcttcccacactgttcaggtcaccagagcctgcgcttctgtggttggttttgatgaggactcgtatttcagctcctgtctctccttgtcagaggccgtgtgaggtgcgtattgcggaccgccggccgcgctgtgaggggtgtacatgtggagccgtgacaatcgtgggaagttctgtttccagctttaagctttcgtttatatttctgcatattaagaaatgataaattaagacctaatgagaagttgtggactagacgtggggtgtgtaggctgctgggaggaggggcagcggccctgaggggttgtggggcccatgggaccatctgacccagtgcatggcggagccgtgtccacgtgaggagggagtaggaacgggctctgcgctgtggctccgtgggctgccgagggctgctgtgggctctgcgctgtggctccgtgggctgccgaaggctgctgtgggctctgcgctgtggctgtgtgggctgccgagggctgctgtgggctctgcgctgtggctgtgtgggctgccgagggctgctgtgggctctgcgctgtggctgtgtgggctgccgagggctgctgtgggctctgtgctgtggctgtgtgggctgcagagggctgctgtgggttctgctcttatttgcccaggggaaacccgagtcgctgcccctcctgtccagcctcagcgctcgtccccgggtcccccagcaggtgaccacagatgatgacggagcctcctggaaccgcctcagtttccccagctggcccctcactggcctccccatttcaggagccccagggccactctccgccaggctctctgtgtctccg

SEQ ID NO: 7988 - DNA, 1366 bp, Artificial sequence
  DNA replication origin
agccctaccgagcaaagggcggaatggggtcaatcagaagtactgaccgggagaaaagctaaggacccacgcatggctccagcctgtcctcagagcctgcgtttcagaggcactgcaaggaacgccgaccacatgcacaaagcgtggtcccggcggagtccggcagttcacaggtgcggaaagaagagggcagtcggcctacgcgcacttacctgagcacgacgcctggggtccctgctacattgtgacgcctgcggagaaaaagcacaacagggttacccgtgggccggaggcggacgacccccaccccacccgcggtgccaagcctggctcggttacactgctctgttccttgcttaaaataaccaaaagttcttcacagggaccgtgaagaacaggctctacccgggagacacgggctggtctcggtgcctgtcgggcgtctctgagcccaggcccaaggcatcggagacagcaggagtgggcacgtggcccacgggggtgggggggcagctgggggccccatcatgctgttttgggcccaagaaggcaggatgtgagtctgtggagccccccagaggaggggtgaatttcaggggtgatctgggcaaatgcaagacctcagaggcaaggcagtgacggctggctccacgacgcagccaagagatgcccgcaattctgctgctgtgcacagggcaccatgttctctcccagtcacagacctgcctgcgcctaccagacgtgcaccaagggccccggcgtgggcactgagcctggtgttgggctcagtggggatgaggacagggagggcacctggggcctcagacagggagggaggggcaggggagggacacagtccccacccgggaccaggggaccacgtagggaccctgcgtctgggatggggcatcagggtggctgccatgctgggagtgcttccccgggaacctcggtggcctcccacacgttcctgtgtgagttggggaaacaggtggctggagtcagactggggaaagtgggggcctgggatgacgtacagtgtctgtggcttagtgacagagattaaatactttcatgctcttcattttctaccccgtttgtatcatttctactcttccggtttcccataactgcactttttattaactaatctttgaagctcagttaacttttacataaaaagggaggaagaagggaaagagtagagttagtcttcccaggcaaatataaggggagatcagcaggcatgtctgaggcacttgagttagggagaagagaaacaagatgaagagaatgaagccaggctcaaagccaggcttccggaatattctgcaacactgggggcttccacatctccactacccaa

SEQ ID NO: 7989 - DNA, 1496 bp, Artificial sequence
  DNA replication origin
ctcatccccactgagcccaacaccaggctcagtgcccacgccggggcccttggtgcacgtctggtaggcgcaggcaggtctgtgactgggagagaacatggtgccctgtgcacagcagcagaattgcgggcatctcttggctgcgtcgtggagccagccgtcactgccttgcctctgaggtcttgcatttgcccagatcacccctgaaattcacccctcctctggggggctccacagactcacatcctgccttcttgggcccaaaacagcatgatggggcccccagctgcccccccacccccgtgggccacgtgcccactcctgctgtctccgatgccttgggcctgggctcagagacgcccgacaggcaccgagaccagcccgtgtctcccgggtagagcctgttcttcacggtccctgtgaagaacttttggttattttaagcaaggaacagagcagtgtaaccgagccaggcttggcaccgcgggtggggtgggggtcgtccgcctccggcccacgggtaaccctgttgtgctttttctccgcaggcgtcacaatgtagcagggaccccaggcgtcgtgctcaggtaagtgcgcgtaggccgactgccctcttctttccgcacctgtgaactgccggactccgccgggaccacgctttgtgcatgtggtcggcgttccttgcagtgcctctgaaacgcaggctctgaggacaggctggagccatgcgtgggtccttagcttttctcccggtcagtacttctgattgaccccattccgccctttgctcggtagggcttggttgcaagttccagtaggaatggcggagttgtggcagtcacacatccatgacgcgaagtgaactaacaggtgccgtttctgtgctagaaaatggaaaaagagccagggccggaaggagggtgcagaagcgagtccgcgtgcggagccaggaggcagcgtcgcgtgggagtgctggcctgaagcctccatgccccggcagagggacggacacgcggacgtctagcggaggtgaggcccacgccccccgaccccgggggtcctgctgactccttgccctgccctgttgctggttgtggcgagggccggcgatcattaggagccagctggtcaggacacgatgcagtgttcacggttcactgccgagttttcctggcccctcctgtgagagtccaaggtccagccagctgtgggggtcccaggcctcgatggcagtgcggggtgcagagggctggtctccttccgtcactggttcacttgggttcccggcgtgtcgctgaggagcagtgctgcttgggggccgagcctggggcctcagcccagtgagttgtgaggcggtcggctagcatcctgcagggaggtcctcaggggcgcagggcagggctatctctcccctcccgggtgctctgtcccctcgtgggtgggcgtggccctcaggggtgtagggcggggctccccctcccgtcgtgggtgggcgt

SEQ ID NO: 7990 - DNA, 1414 bp, Artificial sequence
  DNA replication origin
tcttggtggcggtgatgacggaagtggtgtcacgcatgcagcagtttgggtcgcggctttccgtccccactgagggaaactcgtgcctgctgctcccctggtgaaaggtgtggggagcgaagtcccagtagtggggtgcacctggccaccctgagtccccaccagcctccgcacgcggagcggccctgctctcttgcctcaagcacagaagcaaatcaccaggctctgcctgccgtcgtgcggtgacatcgggggtcacctccccgaaggcgcaggtctggtgggcgagcagagcggctgcggcagctgtcaaggcagggcctctgccagccactgtggcctggcattgtgcccaccctgtgagggtagggtggggcccctgccgcgtgctgcctccgcccctgccccgtgctgcctccgcccctgccccgtgctgcctcaggctctgggagacacagcctcaggagacaccgtggaagccgcgccggccccacaagtgaatggggaggaaggggtgtgagcatacagcccagactctaaactgggcccaagggtcgcgctgtgagccgcagagggtccaggtgcccagagcctgcccatcctcatcccacccggcagctctgccttcgcgggctcctcctgctccttccgctttcacagaagacagacagctcggggatcctgcctctctgcagctttatggaccctcctcagtcctcactgcaggaggagaggagggggtgttgggcacagagagaagccagtgcgggggagccgggggcttttgaaaaggtgggcttgtcccagtgcacgcagacactggattgctgaccgtgccctgcacatgggagcctgggaccccgtgagcccaagaggctcctgccacccaggcctcagggcctgcactgtcctccctgggggcggctgtcagagctcagccaaggatgaaaggcatggaagagtttcaggtgttaattaatcgcgttttctcttgtagaagccaaagatgttgaccaggaagatcaagctgtgggacatcaacgcccacatcacctgccgcctgtgcagcgggtacctcatcgacgccaccacggtgaccgagtgtctgcacacctgtacgtgccctgcccgcgccacccagggagggcgcgcccttcccagctctgtgctcttcagaaccttggcttttgtgttaccacacgcttttagctcaagcccgacaaaagcaggaaccaggaccaggggcagagacgatcttgaagataagtcagaaaagtcatttcacgctaaaggtcctgtgggtggtgtcagagcagatgaggcctcgcttaggagagcgaaacacaggagagaccccacattcctcccacggagcagcaaggccagtagccgctgtgacagtgctcactgctgg

SEQ ID NO: 7991 - DNA, 1442 bp, Artificial sequence
  DNA replication origin
cctgccccatgcacggattgatgctgctgtgaaaggactggccagcatgtgttctcacttctgatcttccccaacatgaggatgcagcagaaggccttcacaggtggcaacgtggtgaccttgaatgtcccagctcccagaactgtgccgaaatcaatttgttcttcataaatcacccagtgtgtggtgttctgtggcagcagcacggaatggactgtgcttctcccctggagcctgcagagggagtgtggctgttatggactctggaactgagtacatttctattgtttgaagacaccacctcgtgataatttccacggcagccgcaggagactaattcagagaaagccacaataagttgctgatgtatttgggtggtgatgcagagaaaaggaaggggtcaggaatgactgcaggcctggggctgctcggtttggggtggggggtggtgtctcgggacaggctggcgtagctgctgtggtggcacagagcagaggctgtcaggtcatggggggccaatgccagccttgagtgtcccacaggttggccggggatacggacagcacaccggggttggggagactcactgagcacgggctgcctggagatcatggagaaaccaagtcaggacacggggggaagggagagaaggaaatggggcaacgctttttgctaagtttctatcgttttgtttgcttttctgtgtagcgaaacagaaaagatggatggtagctggggacagagcaggccgaggaagtccttggattttcatgtggaggtgtagcgggaagctgccggacagtggggctgcagggggtggggaagaggttggccatttcccagcgcagggctggttcctccagggaagagtgtgaggtttgcgctgctgctgcgttaaccgtgcctctgagcccccaacccagccactcaggcaggtggggctgcttcaattcatgccttccccagggaggaatctgaagaactgtctacatgatcagggaaacgcaaggaaaactgcgtggcaccacgcgtaccccatagaagggccagaatcccaagcactgacaacacattcgggaaacgccgggagcgcaggttcattcctgtgggaagtggaacccgcaggccctgtggagaacagcttggcagctgctgacaacacgaaacacactctcggcaaaccacccagcagccacacctcgtcatttacccactggaaatctcctgcccacacaaaaacctgcacccggatgttgatagcatctttcttcataattaccaaaacctggaagcgaccaagatgcccttcagtagataagtggaaaaataaaccgtggtgcatccatactggactattatccagtactgaaaagaaatgagcagtcgggccaagagcaggcacatgggagaaacatcaagtccctgttactaagtagagaagc

SEQ ID NO: 7992 - DNA, 2050 bp, Artificial sequence
  DNA replication origin
cttttttctttttttttttttgagagggagtctcgctctgtcgcccaggctggagtgcagtggtgtcatctcggctcactgcaacctctgactcccaggttcaaggcgattctcctgcctcagcctcccgagtagctaggactacagttgcttgccacctcacccagcttttttttttttttttttgtagttttagtattaatggggtttcaccttgttagccagaatagtctccatctcctgacctcgtgatccgctcacctcgtcctcccaaagtgctgggatgacaggcgtgagccaccgcgcccggcctgaaccaccgcacctggcctgaaccaccgcacctggccagaatcatcttttaacagcttccaaacttggaggtcaaacaaggactttctggggaagcaagtggcaggcagcagctaggcgtgggctgcgcatccagcggattgagtgtgggcgggaccgccagcaaccaggcagaggggctgttctctgggttggggtcaggaacctcttctggcctcagcccaggttggcagacatttccctgcagggatccgggtccaggactcaggaggagggacagtcccacgggggtgctggggggcaggaattcctgggtgggccgaggtaagggcagcacagggtgacctggggccctgggcccggtggagctgaggagagggacaggcctgtggtcgggggtcctaggtgggagggagagcagagggcagatgctttgcgggtggaagaaccaccctggggggcgggagaccctgaaggcgcaggtttgtgtttagatggaggttgcgctggctggacggcctagggaaaatgggtctgactggatggagctgagtgagaatggtgggaggccctgcagccgccgtggagagaacatgcgcgggggaaagccccggtcctccggctggcgaaatggacctctggaaggaatggccacacggtgtgaaatcactggtgtttattggctgtgattccatccggagagaacacacgcaggggccccgacatgcaggaggaggcgcaggcgcaggacagacggacagaggacaccacggtctaagctaagctcgcggcccggggcgccatgcgctgggaacggggtgcgcaggttctacgagaggacgccctgtctgctcagagctggctttgtaaggtgtgaaaacaggagtttttaaaagacacgacccgggagaagtcagtgagagggcacagggcgagcaggacggacagcgacgtccccgcgggccgcgtcgctggggcgcagaggggcgcggtggtctctgcccggaggggcgtcggtcgttagtattgcagtctaacgttatggcttctctaaagctatgtaaggtcatgaaggtcaatgccaagccacgccctggcccgaaacacgtggagacttgatgcatttttgatgtggacgaaagggcccgggggcgaggcggcgcctgtcaagataaaactcattaaatgcaaagacctcatttacctgagattcaacaaattgtgatgcaaattaaacatgaatggaggagaaacaggggctcggatgccgccccgcagggccaccaggtggattaggccacacacgcgccagctgcgcgcagggaaccccgcaggccccacccgaggagctgcccacggaggaggtgctgggcaggggcgcagggtctccagcgtccggtgcctcgggcctctgcggctcctgtggagggtgcagtgttcaatggccgagggcaggggtcctccccagggagaagcagcagccgcgtgggcggagaggctaggaggccgggcggggggcgaggacttgggaagagcggggtgacgggggtgggggctgggcgtcccccaaacctattgctttgtttcctttagtttagaagtgaacacggccgtggcgttcgtaagaagcaaaaccttccagagaggagaggaaaggacgcggacagagacggatggacaggggcgcgagggggccaggccggggggcggagagcggccgcgtgcggacgcaaatact

SEQ ID NO: 7993 - DNA, 1441 bp, Artificial sequence
  DNA replication origin
cacacccctggccccacaggacgaagagcacatgctccctccacttccgtgcctggagctgctgcccttcccgctgtggatggctaggacgagaaccaatctgctcttgctgccccacagggtcagggctttgttctgggcctgcagggccctctgggtgtcgcccctgttgtgcggagaacgttcctaccctgtgctcttcgtttcactgaggagacccctggagtcccggctctgtcaagagtgcgcaggggctgctgaggactagggcgagcccacggcccctctctcctcagtggccaggtggtggtctggccacaggcggctgggaacgtggcgccctcctttccatctcactgaaggtggccctggccccccacacccagagccacctgcagccctaggggaggggagaggtgccgagactgccctcggtggggttggggagcacacaggcagccccccctccatttgggaggaaggaggggcctccttggagatccagggggtgcccagcaccaggagcagaaccaactgcttctatggggaggggctgctgagacaggagcaggagatggcaggggaggggctcctcctgggcagaaaggcccctccctgtggctggtgatcccgcggtgtgctcctccgtcctgtagagtgctggtgcccactcccctcctaagttttctcctggacgcagctgctgacgccttcactactccagagcacctgtaatctcagatccaggaccttggacctggcccgggggtcctgttcaggggatggaagtccagctccgtacaacaccaggcccccaatccttccaggccagcccaaccccactggttcccaccttcctgggcagcaggaggctgttccgtagttccgtggcctgaccatgaccacaggcttcctgggctggtggctcacgggagggctggaggagtgtggcgtggggaggcgtattgatctagaaaccaaaaccccggggcctgacaaaaacttagaggcctggagggcagaagaacaaaatcccacactccctctggaggctctgggggagggcccttccctgccccttcctgcgtctggcggccccgaatccctggtgtttcttgaccactcgcgacctcctccgctttcgtatgcccgcccccatccgggtgtctgtcctttctgtctcttacaaggacactctcactggacttgaggcccctcaaatccaggatggcctcgtccccatccttaccattatgagatcaacaaagacctgtttccgaatgagatcacctttgaagctccaggcaatatgaatttgagggggacaatattcagctactacggagggcagacgcactcacgggagatgagaaacgcgggtgggcagggggtcggtgaggcccaggcatactggctgagggcacgactaggcgggattcca

SEQ ID NO: 7994 - DNA, 1013 bp, Artificial sequence
  DNA replication origin
tggcttcggggtgggaaggttcagactcccgggacccctccctgctgccggcggcacctggagcaggtggagaagccgtttcctggccttgtgtcagccgcacccagggaagggtgggcttcacggggtgttgtggggaagctggagctcctgaagtggacagaggtggagctgggagggcaggggcggggcaggtgcggcacatgcagccgctgtacccaaaaggccagctcctccccacccacggattctccccacaccctccggtccctcgcagccccccgcccaccgccatgcaccctggagggtgcagagaagccgctgatggggagtgggggccgggcgccctggcatcccacccagggtcactggacgtttccagggatctcctgttgatcgactttgctgtgctggctcaagcctccagcccacccctccgccccccgctccccgccccccgccccgcagctgacccagggcttcaggaggaagtcaggagaaaatgcaccatctcagccaggcagccacagtccactgggatgtgctcgggagactgtgggtatcaggagcgggagacggggacaggaggagaaggaagggggagtcagagaacagagaggaacagagacacagagataaagagacagagagaagacagagggagagacagagacacagagagggagagacagagaaaaagacaaaaagagggaaagagagaggggagagagacaaagagaggagagacaggcacagagagagggagagacagcaatcaaggccgagacacagggaacagagaggagagagccccaggcagagctagagagagctgacgctgggtagaagtggaggtggcagtgggtagcagctgagggaaggacacaaagcgatggtgggctggggtctgggagggctatgtgtgggtccgtgtatccagggaggtgtctctggagtgggtctggtcccctgggctccggcctctgctggcatgatcctagagggacgctggc

SEQ ID NO: 7995 - DNA, 851 bp, Artificial sequence
  DNA replication origin
cgggatctgggtccccgctggactcagggccgccttcccgcaggcggggccggcccggcgcgcaccttgtctcggatgccctggcgcacggcctcgcgctccgcctccatcttggcgtacttggccttgcgctcctcctccgcctggcgcagcgcctcctgccgctcctcctccttcttggcggcgtctgggtccttctcctcgtcaccccccagcatcttccccatgtccttggtggcccctggtacagaagttggtgattcagaccgccccattcagatgtccagggccgggctagtgtctcagccacactcccccaccttctggccgaccccccaaaccctccatccactcgaccctctggctgcccccaccaccctccagccgctcctcccacctccatctggccctgaccctcctgcccgggaccctccatccagtgtgctggggtctcctgctttgctttctgttcctcaagagacacaggcaactccgtggggggagggagagtggcgctgtggttgcgcgtctgtatgcacctgtgtgtgactgcgtgcttatgcgtacgtgtggctgttgtggttgtgtttgtgtgtgcaccacgtggtcgtacatctgtatgtggttctgtgtttgtgtcatatgcatgcctggctgtgtggttgtgcatgtgtgtgtggttgactgcatgcggttgtgtgatcaggcttgtcgtcttgtggttgcgcgtgcagttgtgtgtgagcttccaggggttgaagcgtcttctctggtcatgtgtccagcagaggcctggcctcctggaggtggtgcggttcagccatctatgcaggcagtgggttgaggggcag

SEQ ID NO: 7996 - DNA, 1371 bp, Artificial sequence
  DNA replication origin
acaggacagatatgcataattacgggctctgaatacagcaggcactgcggggagccctggccctcggcagctccagagagcagagcaagctggctggacccagcacacaggtgtcactgagggaggtgacttggcagagcggccaggctcctccatggccacttatagccctcagcgttgcaggggtgctcctggaccagcctcgtgtgtgtgaggggactctggccacacgttgcccctgcaaatgccgctctccccccgcggccacccggccccctctcgaggtgctcctcagtggtgaggcactggctctgccccctccttgaaggtcttgcctctgggctctgccccctggatgccagacctcctaaggactgcccccgaccagctgagcccatgcctcgggtagagatgtcaggtgaaattgtgggttagactaacaccacccagccactttccacctgggtccaggtgtgccccccacctcgtttctgtggattcagcagctccatgtccctggcgctctgggttccccctcgccattactatgctgataccgggaagctccgtgctatacggagcctggggcgacgccctcgcctgtagctatctgtgccagtgctgcctctgccagtcactcaggagtgagctccctgtcgagggtgggcaggagctgtcatttggaaggcccgagctgttggtgggaggagaatagctttttggttgagtgctctgggctgaaggtgtcactcagacagggccatgcctgcatcctgcaggcgccgccgactgcacctgtttccctgccccccatatcctggctgtctgaagctatcacaggcagtggggtgtggggagaacgagcccctcttgctgccctcgtcgctgctggggacaggcaggcagcctatgctaggcacttggctgatagcacagatctggactcctcaacagaaagctaagaggcttgtggtcagttttcagccgcatctgccatgttttgcaaagcagattttaggcccatgactcaagggaaactgggtcacagtagagttgctcctggattcttctaacagtccccagtcattggaccaaaatctctctgcctccagcgggctgtctctagcaggtgtgtgggggaggcaaggacagcccccacagtcctgactgcctttgtgcaaatcttaacccccatgagaaaagctaattcaccctaaagtgagtgacccgtggctctttctccctcctggaaaggactggcgtctataaggaggtgggtgagcctggtctctccccacattgctctcctgatggaaggggttcctggcaggggtggggagctgcagggcttctgcagctcagtgggctgcc

SEQ ID NO: 7997 - DNA, 1146 bp, Artificial sequence
  DNA replication origin
accgggctgtgattcagggacaagcctgcatctgcgctgggagggacgcacgttccacccagggagtcccaggctgttacggataattaattagttggctaattcaggccctgaggtgggcttgtaagaaactgaaatatcttatttggctgtctacatgactgaaattagctgggtaattaccagcctgaattccctttttgtttcatggcagcccaaagtttctccagcagcagcaaccgggcaggcgtcgctcagcgtggtggagctgagcgggggcagccagcagaccctgggggggctccacgctgagtgcttcccagagcaccccacattggctttgcagagcacgttgaggctcggagccagagctgctgagggcgggagctggtggggggcttccagtcgagaccttgttttctgcctctgcgcctctgtccctcacccggcgagcctcattgttgctgtctcaggatgcgtgtgagtgagacagagcaagacagagatgggaaatgggggaacctccagacagcacgacagagcttggcagagaccccaagagaactattgagaaacagaccaagccccggacacaaagaagctggcaggagagggagcaggaggcacccaggaagccgttcaaagaaaggcgaacccagaaacagggtcggggagggggagctggagaaagaaaatgacagcccagaaacagacagagaaaaagacaagaatgtgttattcagcacgcacagggacagacaggtgaaaacagagacggcacgtcagagacagaggcagaggggagagagagaaagagggagagacggagacagagatagagggagacacagagacagagggagacagagacagggagaaacagagacagggagagatgggagcagagggagagacagagggatacagagagacagacagacaaaggaagagggcagagagaggcagagggagaggtggaggcagaaggagagagagagacagagagagttagagagatagagatggagacagagacagagggagagacagagatggggagagacggagaatcagaaacagagggagagacagtggtgagagggagagacagagacagagggagagacagagacagagggagagaca

SEQ ID NO: 7998 - DNA, 1136 bp, Artificial sequence
  DNA replication origin
aaggccaggcaggggcctgcttagggtgacctgtgaccacttcactctcccccaggaagaacactcgctcccggccatacttgcgtgtgagttctgacccctggaggagccactgtggaagcagagcaatcgccatggagtttgtgatgaagcaggctctaggaggtaggaagcgggaggtggggtggggaggggctgaggggacatggagagaccaccacagcagctgctcctcatctggcccaccgcagcagcgcccctgcagccacacggccacccacgcagccctgcacaggagcctggggcagaggagcaaggaccgtgcccagcagcgcccccagcccggcccttttcgaggccccgagccagaactggtgttcctggcgggacaggggctgccctgtaagctcactctgccccactgctgtggtcggggcagagcccatggaccatgctgatgcacgtcctgggggagggtgcacactctggcgtaggctttacagggccaattctaactggccaggctgggcagcccccaagggggcttccttccagatgaggagagccaagcggtgggagagcaggatgcaggtggcagcctcagggacaggcgtggggacagagctggcctgtgcatctggcgaggaccctgtgggtttcacttgggtgaggcagcgccatcctcagggaccagggcttgctggttacgggagcgaaggaaaaggcccgaaacagcttgtgtgtctcgactgcctcccaggcgggacgtgcagccttttttgtgtgtactggggtggggccaggcccccttccaacctgctgtctgctatttgaaaggaacctcgtccccacttgacccaaggctgtcattgtggccagagaccatgtcaagagcagtggctgggttcctagaccaggaggtgggcagggcctgggccatgctggtacagacgtgtcccggcagagctgatgggtcaactcaggcctcggggctgtcgtggcgagtctcagttttgcccagagccgtccatcctgtgttcccccagcaccagtgcccagaactcctgtgaggggaacctgtggccggtgcccgattctaccactagagacgtcttgcttgggtggcctccacgggg

SEQ ID NO: 7999 - DNA, 858 bp, Artificial sequence
  DNA replication origin
caccccaccccatgcacgcccccggggcgggggtgctctgtccccgtccccacgtgtttcctgaaggctgagccccctgaagtttctccccaaccccgatctcttctacgcgggccatgtggggggcacactgactgcagtgccgtcagggatagggtcacccaagcctccctggtcagaagccacaggagcccgccctgaagggtacccgctcaaagacccacccccaacccttctccacggccctgggctcgggaccaccgcggaggcgccgctccagacactgagctgcagagcggagcagtcaccttcaaacgccccctgggccccgcccctgcttccgcagcctggcgccaggcgcctctgagcgatgccccctaagccatcagcagccctccctgcagaggcttcagacaccccaggagctggggagaccattttcaggtcctctggggtcctggtttgggtgtggggacagaagcccctcacgaaggacttcccaggcagccgctccaggtgggggagggtccagcccacaaggtattgcgggtaaggaatgatggtctctggggaaggccaggcaggggcctgcttagggtgacctgtgaccacttcactctcccccaggaagaacactcgctcccggccatacttgcgtgtgagttctgacccctggaggagccactgtggaagcagagcaatcgccatggagtttgtgatgaagcaggctctaggaggtaggaagcgggaggtggggtggggaggggctgaggggacatggagagaccaccacagcagctgctcctcatctggcccaccgcagcagcgcccctgcagccacacggccacccacgcagc

SEQ ID NO: 8000 - DNA, 933 bp, Artificial sequence
  DNA replication origin
ctccccaccccacctcccgcttcctacctcctagagcctgcttcatcacaaactccatggcgattgctctgcttccacagtggctcctccaggggtcagaactcacacgcaagtatggccgggagcgagtgttcttcctgggggagagtgaagtggtcacaggtcaccctaagcaggcccctgcctggccttccccagagaccatcattccttacccgcaataccttgtgggctggaccctcccccacctggagcggctgcctgggaagtccttcgtgaggggcttctgtccccacacccaaaccaggaccccagaggacctgaaaatggtctccccagctcctggggtgtctgaagcctctgcagggagggctgctgatggcttagggggcatcgctcagaggcgcctggcgccaggctgcggaagcaggggcggggcccagggggcgtttgaaggtgactgctccgctctgcagctcagtgtctggagcggcgcctccgcggtggtcccgagcccagggccgtggagaagggttgggggtgggtctttgagcgggtacccttcagggcgggctcctgtggcttctgaccagggaggcttgggtgaccctatccctgacggcactgcagtcagtgtgccccccacatggcccgcgtagaagagatcggggttggggagaaacttcagggggctcagccttcaggaaacacgtggggacggggacagagcacccccgccccgggggcgtgcatggggtggggtggggcgctctggtcccctcttgggaagccgctttctgaaatcacagcagccgcagtgagccccccggttttgcggggtctctcctatcggggaaccccaggtccctggagagacactgtttgacggttcacccctcgccctccgcagaggaaggagactcgcgcggggac

SEQ ID NO: 8001 - DNA, 1536 bp, Artificial sequence
  DNA replication origin
tcagctcctgcccctttccagccggctggaggtctgcggggcttcttctccagggctcagggcctcctctgggcactcgaagggccaaccgcacctgccctggtgtggccaagtggcccgtgggggttggcagaggccttttgccgcgtcaccaccttctgccactggaacggagcctgggtggctcctggccagcagcctgtgactcccatcccagctgggcagccctggcctggctcacacaccctgagtgggcaccaccctgaagccctccagcagatgcccactttcccttcccctggcccagctcacacaccctgagtgggcaccaccctcaactcctccagcagatgcccactttcccttccctaggccacttgtcactctgacctggggctgtcaccaaccttgtctatttcccccaagttgtggctgggcccccccacccccaggttagggcctagacaagtgtgagagctgagaagcagtcactgcatgtgtggctggatgtaacaagtaacaacagggacaggcagagacagagagagacggacacagagagacagagacagacacagagacagagagatacagcgacagagaaagaaaagacagaaagacagagacagagatagaaagagacagagagacaaaaagacacagagacagatacagtgacagagaaagacagagacagaaagatagagacagagagacgggcagaaagacacagtgacagagagatacagcgacggagaaagagacagagagagaggcagaggaagacagggcagaacgtgagggctggcagagggtctctgtcctctgtgccccaggccccagctccaggtgtgcttggagctcaggctggcctgggttgtagaacggggaggggtcagcctaggagtccagtgcttctgctcggaagaacgggcacctccctgcactcctgtgcagactgtcccaaaggcaccagcatatcccttgcatgcagcttgtggaggtggcagggtcagtcatgagcctggctctgggctcagggggtcacccctggggtcctctctggggttactgtccgggttagctgttgggttatccacccagttagggatggagagagaaagcaccagggccgagaagtgacctctttcttggacccgaacatctcacccttgctgtcccctcccaggtcctgaggagactagaggagcagatggagcagagcaggctggggctcaggccgggcccccaggcatgtgtcctgcctcctgtccctgggcccaacgttctgagcccacttggctcagatcccgggagagaggaagggacggtgctgggggtgcccatggcttccagccagggaggctgaagagaccccaatcctagggcatgggtccccctctgggaggttgcctgtgaacccccaggcccacgggaccctcatggctgtctcagggagcccccatgggcttggccctggtgccttcacccttccctctcccccagcgctcccttcctctgcgaagggtcccctgc

SEQ ID NO: 8002 - DNA, 1406 bp, Artificial sequence
  DNA replication origin
tggcttggtgggtcttgactgggtgccctagtgggtgcggcagcatcttgctgtggctccaacttgcatttcctccaggaccagtgatgtgagcatcgctgcttggccgctgccatttgtatctccgtgaagtcaccgagaagatgctgtcacacaagggggtgtcacacaggtgcagtctctcttcaagcttcacgtggtctatgcattacaacccggcaaggatgaccttgtgtccacgtgcaggacggagcatagtcacaggctcggtgaccgcagacccggctcccacgtgcagaatggagcctcagtgactgtgggtagcactcaggccagtggccggctgggaagatggtgcatcctgggcctttcacgtgtgggtgtccgggtggcgccgtgcgtgaccctgtgcagccgtgtctgcgtgtgcgcaggtgtccgggtggcgccatgcgtgaccctgtgcagccgtctgcatgtgcgcaggtgtccgggtaacgccgtgcgtgaccctgtgcagccatgtctgcgtgtgcgcaggtgtctgggtggcaccgtgtgtgaccttgtgtagccgtctgcgtgtgcgcacggcttgtacatgcctgtgcacctgcgtgtctccatgctgagctgaatggttggaagaggagaaattctggcggtagcatggccaggtgggggccacagactcccttctgagctgggtcagcctggatgggggttttcctgtcctgcaacccagaccccaccgtcctggcctccattctatgcactccatctcagcctaccccggaccagtgacctgctgcactccacaccttcctccatcctccgcagtctcggcctagcctggaccggccacccgctgctctccacacataaccagaggctcaggcccctgacggaggaagggtgtgcagccagccagagggaggtggactcacttgtccaggcagggtggctgggtttgccacaggccggggagaagcgacccaagctttcagagttaagggtctggggcggggtctgggggattagtttggagcttgggtgtgacgtgggcggcagcaggagaggagggggccgcacagcacagggctgaggctggagagcctagagggagcgtggcccgagctgcccccagagcaggagcatctgagttggggtggccagacccggagccggaatccagacgaccttgatgtgaaaatctcagcacctatttagcttctcattattttttaaaagagctaaaaatagtggcgggtgcatagcaaacgtgcagtcattattctctgaaaacaggaagagcctggcggtgagttcagggctatgattcagggcctcctcgagtctgctgtggggtgggggctcaccatggtcaccttctccttccaggggcc

SEQ ID NO: 8003 - DNA, 1103 bp, Artificial sequence
  DNA replication origin
tcaaaagccaaaagtctctgagaacgactttgaagatctgttgtccaatcaaggcttctcctccaggtctgacaagaaagggccaaagaccattgcagagatgaggaagcaggacctggctaaagacacggacccactcaagctgaaggtgggtgggtgggcagctcttcctgggagcccagaggcctcaacccatggcccctggagcatctgctgtgccttatggagccggcgtctccagacagcaacctttcacccctggagcatctgctgtaccacatggagccggcgtctccagacagggacctgtcactgccgatgggcctggcagccctcaaggacagggtggcctgaggccaggggggcagggcagagtcaggccccaggctgtgctgctccccacgtgcccagatggctcagcgctggtgggggtggggtgggcgggcgttacaggagtgagtgccccggggtgtttgcagagactgttgagggcaggcgtctcttgggggctgctctgggtactgagcctcccaacccaggacgctcactggggggtgaggatgcagcggtcaggctgtcactgtgccggccctgagacacgccctgctctgtggcttggccgatgcccagctctgcaggccacatgcgcctgtgaccttggggtcctttcacaggcaccagggaccatccccttctccctcggagtctggggcctgggatgggccaaggggttgcaccaccagaaccagggtttgtgtcctcggtgaacatctggctgagacgagggtccctctggccccaggccctgaaacatgaagaccacctggccctgtgtcgtccggagtgggctctatatagttgagggcagggcgtgcagtgggacagtgtctgtgagccgggctgagcccaccccacgtgaccaggcacttcctcagcgtcgtgcctcagtttccgcggtgcagaggaggagggcaggcaggtgcccagggctcggcaagctccgtgtctcccgcagctcctggactggattgagggcaaggagcggaacatccgggccctgctgtccacgctgcacacagtgctgtgggacggggagagccgct

SEQ ID NO: 8004 - DNA, 1810 bp, Artificial sequence
  DNA replication origin
ggctgagctctggcagggctgggccccacgcctgctgctgcacccaggccctgagcagcttgggctgcaggaggttttggaaactccgtcgtggatgttggacaccaccaccagctacaccagagaaggactcgcaggctgcaatttctgaggcccatgggcagggacggaggcagagggaggaaaacccaggctcctggagcgaagcggggttttgtcccaggcgtgtgtctgggtcagatttttgtcatgtgtgctggacacacgtccactctcactgtgagcctcaggcctgctggcagcatgtggaacagaaccctcgctcctgtcgctcttcacttccgagcagtttcgaaacggcagcccaggaagtgctggcaggtgggcccagggccgtccactgctcatgccacgcttgttctcggctcttggtttgcagtgtttgctttttctttctgagcatcttcagcgtccctgaaagaggctgtatgtgtgacctgtgcgtgctgtgtatgtgtccgtgggtggtgtgtgccgtgtgtgtgtgtgcacgagtggtgtgtgcattcatgtgtactgtgtatctgtgtgctgtgtgcattcgtgtgtacagtgcatctgtgtgtgctgtgtgtgcgttcgtgtgtaccatgcatcggtatgtgctgtgtgtgcgttcgtgtgtaccgtccatttgtgtgtgtgcatgcatgtgtactgtgcatccgagtgtgtgcatgtgtgtgtaccgtgcatctgtgtgcgtgcattcatgtgtaccctgcatctatgtgtgctgtgtgcattcatgtgtactgtgcctgtgtgtgtgcatttgtgtgtaccatgcatctctgctgtgtgtgcattcgtgtgtactgtgcatctgtgtgtactgtgtgcattcatgtgtactgtgcatctgtgtgtgctgtgtgtgcattcatgtgtaccctgcatgtgtgtatgtgctgtgtgtgcattcgtgtgtactgtgcatctgtgtgtgtgcattcatgtgtaccctgcatgtgtgtatgtgctgtgtgtgcattcgtgtgtactgtgcatctgtgtgtgtgcattcatgtgtaccctgcatgtgtgtatgtgctgtgtgtgcattcgtgtgtactgtgcatctgtgtgtgtgcattcctgtgtaccatgcatctgtgtgtgctgtgtgtgcattcctgtgtactgtgcatttgtgctgtgtgtgcattcatgtgtaccgtgcatctgtgtgtgctttgcattcgtgtgtaccctgcatgtgtgtatgtgctgtgtgtgcattcgtgtgtactgtgcatctgtgtgctgtgtgtgcattcatgtgtactgtgcatctgtgtgtgtgctgtgtgtgcattcatgtgtaccctgcatctgtgtgtgtgctgtctgtgcatccgtgtgtaccatgcatctgtgtgtgcattcatgtgtactgtgcatctgtgtgtgctgtgtgtattcatgtgtaccctgcatctatgtgtgtgctgtctgtgcattcgtgtatactgtgcatctgtgtgtgctgtgtgtgcattcgtgtgtaccctgcatctgtgtgtgtgcatttgtgtgtactgtgcgcctgtgtgtgtgctctatgcattcgtgtgtaccgtgcagctgtgtgtgtgcattcatgtgtaccctgcatatgtgtggcgtttgatgcctcagtggtgggttccttgtgcgtgttcatgtgtgcgtgtgctgtgcccaagtgtgcacgcatggcccagagtggcatccgagtggatagcaggaatctgttcagagagcccct

SEQ ID NO: 8005 - DNA, 1073 bp, Artificial sequence
  DNA replication origin
gcccttccctgtgtgcccagtgagtccctgttgtgtgtcagggcacaggtgcctctgctccagccttctctgtggccacagactcacaggggtgacctggggccccttggcaggcaggcggcctgtgctcagcacctccaggcgcagcagtggacagggtcagcgccagcctggcctcccatggctccctgaggtcatgccaggaacaacacaaggccgtgtccgtggaaaaccagggcctctgtgcaccaggcatcccagtcactcatcccgacacctggagacagggcaggtgtcagaaagctgtctcaggaagtcccagccaccggctgatgggcgtgtggctgggtccatgctcctaggtccacccaggctgggagtccacggagggtgagggggccggctgtgtgggcagtggctggtggagctgccggaggctgcgcttgcccgggggcgtcaggagcagcgaggccgcagcagcagcctggccacgaggtgcgcatctcccaggtgctgacgcaggtctgcttgtttcagtgatgtcattcccagcagaaggtgtggagtcagcgctcaaaaacaacatcgaagatgtgcggttgttcctggactccaagcacccagggcactatgccgtctacaacctgtccccgaggacctaccggccctccaggttccacaaccgggtgtgtggccacaggctttgtcttggtgccactctggagcttccttccgctccagtgcaggggcatagctgagggctttggccagggtggggctgtgatgggggcggccggaggtctcctgaggggctgcagagcgtgggacaggagggggcgaggtggggtctctgttgctctgaggatgccgcttgccgggaactctggaggccccagctcctcactgcttcccaccagccagagggtgctcgaggccgaggcattccttccagacacgacacttgtcagtatgcaaagggacccaaagcccaggaacagctgactgagctctgtctgcaaggccagtggcagccctggtgctcaggtctcgcgcaggtggacgcctgttcatga

SEQ ID NO: 8006 - DNA, 1240 bp, Artificial sequence
  DNA replication origin
gtaatcccagcacttcggggggccgaggagggaggatcacttgaagattgagacgagcctggacaacacaacaacacagcaagaccctgtctctacaaaaataaaaaattagctgggcgaggtggcgtgcacctgtggtcccagctacactggggcctgaggtgggaggatcgcttgagcccaggaggttgaggctgcagtgagttgtgattgtgccactgcactctggcctggagtgagcaagaccctgcctcaatttaaaaaatgaaaaaaaaaaaaggacagtgaattcatttgtgcttctggctctcccccacggacaagcccaggagtcaggacctgggtggccatgagcccctggctgccctggtgcttgctgttctgaagccagggcctcggggcctgagccctgtgtctgggccctggtttctgtcccgtcagcatccggtgcagccctagcacacacacacctgtggtacacgtgcctgaggcctacacagccaggtccatggggcccccgcagggctgctggggtgggtgagatgtgcgtggatcctgtggcactcaatgcccacctttgcttaaggcgtgtcagcttgctgtgcttgccgctgcctgccgtggtacaggagcagtgggggtttcaccatgttggtcaggctggtctcaaactcccaacctcaggtgatctctctgcctcggcctcccaaagtgctgagattacaggcatgagccaccgcacctggcccctatttttgtttttctaccggtgattagattataggtccagtagccatgctttgtgtggcctgtttgtctcttgctgcaaaagtggccaagcgtcaggctcaccgtgcctccccgtcttcccttgttgctttggaagacccgcatcctgtgtcagcacctgctcggtgggtttagacgccttttaaaacgtttgaacgcacggaagacccgcatcctgagtcagcacctgctcggtgggtttagacggcttttaaaacgtttgaacgcacggaagacccgcatcctatgtcagcacctgctctgcgggtttagacggcttttaaaacgtttgaacgcatggtcactttcaggcgatggttcggtcgtgtgtatttgggtcattcatctctctggacctttatccaggctttcctctgatggggacagcacctctgcgatgtgcctagctgaggttgctcctagcccagcctttctggtccccgcagcctcc

SEQ ID NO: 8007 - DNA, 1523 bp, Artificial sequence
  DNA replication origin
gtcagtttagagaactgacctctgcattttcattgtcacagctcctggagcagaatggaggctacgggagcgccacactgtcccgagggccaccccctcccgtgggccccgctggcagtggctacagtggaggtgagtgccctgtcctgtgcccgccacctgtccctcgctcctgctgcaccccgggcacccgcagcacattgggatggagtctggggtccttctctcccggggcctcctctcccaccagagatgactgtgaggtcagggtccctgagcacaccctcaggttcggcagttccctggggctcacagagctcagcaaagctggtgtcttggtgcagttcaggagggggtcaggattcggactaaagccagccaagggaagaggctccagggcagggcccaggagaccgggcccgagtgaccaggcggcctcgctcaggggttatgtgggaggcagcctgcgccgtggccaagaccccagcatagatcacattgtcgtgtctggcacagcccaaggccccagggaaacagacaccccttttggggctggagggggcatcccaggttccttcccaggagctgggaatgaagggccaggcctgctgtgggcaaggtgaaccatttactacagtagcgaccctgaggccagggggcaggagcaggcattggacagtggagggcggtgggggaagacagttctgccgctagtgtgaggtggccccttctgccgcatgaggagtgggcacctgtgatgggcctgggtgtccctggagggccctcagctggtgaggagtggagagggccctggagacagacgctgcatgctcttggaactccgtgccgggagtgttccagaaggttccgggtgagccgtcgaggacatggccctgacaggcagcggctgggtctgcagctctgcatggcgctgacccctcccgacctcgccccgcatccccactgcggtgtgggaggtttcacctgggtccttcacctccgcttcccagggaggagctcagctccatgtctggggcaccccggtccgtgcagtgtgggtcccacacatgcaggtgtagtggctggctgggtctctgctggctggaggaagggtgagtcctcgagctgctgggttctgcagtgcccccatctgctcggtgctgcctgggcctcggtctcctgtctgcatgagggactttggccaggtgttttttttttaacaccacttgtgccaccaaagccgcctgtgaagacctcactcgcaggacccaccaggccaggggccaccactctgccttcacgtccagggtcatggtggcctgaagctgtggccgtgaggccggactatccccacagacagagtcccagccccagctgtgctgaggcggccacatagcccttccgcacccagattgaccatttcctgggtctctggaaaggctgaggacagggtagacctgccagtgctgaggcctggcttcccgctgggtacgtgtgggtcaggggcctggccataccaccca

SEQ ID NO: 8008 - DNA, 922 bp, Artificial sequence
  DNA replication origin
acttacggatgaggctgtggaagaccgtgtactgcgtgtcgtgcggggggatcgagtacttcccattgactattcgaagtttcgctccatcctcaaaagggtgctgccggaagcacagcaggtacaagatgcagcccagggcctgcggggagagcaggggtgatgcctaggcccacggggagcgcaggggtgacgcctgggcctgcggggagagcaggggtgatgcccaggcccacggggaatgcaggggtgacatcggagccgtggggagcgcaggggtgacactggggactgcagggaacacaggggtgatatcgggaacatgggaaatgcaggggtgacaccggggcctgcgggaacaacaggggtgacacccgggccgcggggagcgcaggggtgacgttggggccgtggggagcgcaggggtgacgcctgggcctgtggggagtgcaggggtgacacccaggcctgcggggaatgcaggggtgacgtcggagccgtggggagcgcaggggtgactcctgggcctgcggggagtgcaggggtgactcccaggtctgaggggagagcaggggtgatgcccgagcccaaggggacaagggcgtgagaggagcaccgcagacatggtgactggccgaggggtggctccttccttggggatcctaggggtatagtcggtggttacacaaacatcacttgactgtgcggagctggcggcgtgcttcccacggcacggggaggcctggatgctccacttctattcaccgcaaagaactgtccaggtgacagtgttaaacggactctaggctcttaagattaaaaagttccgttcaggccgggcgcagtggctcacgcctgtaatcccagcactttgggaggccgaggcgggtggatgacaaggtcaggagttcaagaccagcct

SEQ ID NO: 8009 - DNA, 1255 bp, Artificial sequence
  DNA replication origin
ctctgtggatggcacagctgtgccaggggagagccgtggcatctctgagaagcgggagggatgtgggctcccccgtgcagctgcaggttcagggctcactggaggaggcctggaggtcgggctccggggatgtgcccggtccctcccatgaggcaacccctccagtgtcctctgagggaagagccacataccggttccccactcagccacatacagaatttttacttttaaaaaccccatttattctcactgagaatgaggcactgaacagggggcccagttaccactgaaacagactcgcccatccatgatggccagcgtagagggcaagtcacccccactctgactccccgggcctggcctcagcctctcccgggtctgttcctctctttctgagcaccccattccttctatgggtgcccctcatttttcctgagagcccccctgtttctcagagggtcagcacaaagcttttgagggagctgtggtgagggctgagagggctttcacctggggttgagggccagggccggcagagctgggggagtgggagggcccctcagctgggtgcaggtgggggcagtgctgggctgtgctggggacacgcaggtgggtccggtctgtgagtcgattctagcgtggcccagcctgagctgtggcaggtcccgaccggctctcacaccatgccttcattgtcagtggaattgagtcggctacacgctctgctgtgtgcaggcatcgggggctcagtgactcgccagacacagctgatccatgcccatggcaggtggttgggtggctcgaagagccagggagagaatgagtcccaggagaagggtgcacgtttaggtggtgtgggcagagttggttccttgggaggtgagcagaaggggcggtctgggaggcatcctggccgcagaagcagcttgtgaggggtcctgaggcagggaggaagggaggccagtgtggctgggagcgcaagctctggcagcgtgggggagaccctgagtgtgggttccgtgggtggtggtactggccttggctctggggctgcaggggtcgtggccttcaggggtgtggagtgggatgagcagagggtgacggtggctgctctgtagagagcagaggcaggagcacggggctgaaaagatggggcacaagatgcagaggccccagggatgatgccacacatggactgtggccagctgaagtgggcaagacccagggtaagatcagggtaggagcaggatgggtt

SEQ ID NO: 8010 - DNA, 951 bp, Artificial sequence
  DNA replication origin
tttactttatataattttcctttttaaaaaaattgaccgtatcaggcgtattttttttggagacagggtcttgctttgttgcccaagctggagtgcagtgattcatagctcactgtagcttcaaactcctgggctcaagcagtcctcccgccttagcctctggagtagctgggacttcaggtgtgcaccaccatgcccagctaattttaaagagtaaacttttcttagagacagagtctcactatgttgccaggccggtcttgaacacgcgagctcaagcaacacctgtagcactgggattacaggtgttggcccctgtgcctggctaagttttgtattttttgtagagatggtgtcttgctgtgttgcccaggctggtcttgaactcctgggctcaggtgatcctcccaccaaggcctcctgaggcgctgggatcgctggcgagagcaccctgctcaggcctctttccacgtggtgcggtcgcttcgttccatccagaaggctgcttggttttcctggtgtggatgcatcactgcgtcttctgtttgaggcctgcgggctttctcctggagctgcagcctgcctgctgtgtgagccttgccgcaccctctgcccagcacacttggagtaacttggataaaggccagacggggcttcctgtgggtctagtgatggatgttttgctgattatctccctcgtttgtcatttccgagatcagaaagcctttgcgaggggtaaatcttggttctagacattccggctttggaaggcttgagcaggacgggtgtgaaaactgaagctgctcggcgtccagtgtgttcccaggatatgtgcacgagggagcggcggggacagggccggggccagcggctcatcgctgaccctgcatggggtggtgtgggaaggagaggggccgggcccagcccctcaagtcataaatacacgaggca

SEQ ID NO: 8011 - DNA, 1171 bp, Artificial sequence
  DNA replication origin
gatacggtcaatttttttaaaaaggaaaattatataaagtaaaatcccatttttataagcactcataaaactctgggttgttgttggttttttttgagacaagagtctcggctcactgcaacctccacctcccaggttcaagcaactctcctgcctcagcctcccgagtagctgggattacaggcccccactaccatgcctggctaatttttgtatttttacaatacaaaagagacggggtttagccatgttggccaggctagtctcgaactcctcacctcaagcgatgcacccgcctcggcctcccaaagtgctaggattacaggcgtgagccaccgtgcctggcctaactctgtgttatttgtattttgtcaatcagcatgtattcttttataatgaaaactgacaagtaacaccacgagcgggaggccccacggcgtgatgcgtgctcccgacaaatcttaatcccactggtttcagcacctcccagctctggaggaggccctagaagcgcagcgcaggagcgggtgtcagagtccagggacatccagagaaaacagtgccatgaacaacaagagattgactgacagacacctcaaccgaacacacacaggagccttgacgaggccccggtatgcgcacgggaagggccgggtgcgacgtgtcagggatgggggagacagcccagcacggactgcatggacgcacgggaggggccgggagcggcgtgtcagggatgggagagacagggacgggaagggcccagcacggaccacacagcacagcctcaccaaatcgcgaggatcttctcaggggcacaaacaccagtggccatcatggaatttctctcaggctgtatagagttatgaggctttctggtcttgacgtctgcgacttatttttaaacggttagaatggagagagggaaagccgccgtgggacacgctcaagtctggggaaccccatgagcaggaagtggacaatggacgccccttgtgctgccttcaacttttccgccagtttgacgtttcagaacacaacactgagaaacacaagcggcacatccccacagtgtcagatgaagaactggggctacctggcagcatctcctcagcctgcaggcggctctgaccacccccaacccccgagacttctcggccacgtcaagcac

SEQ ID NO: 8012 - DNA, 1176 bp, Artificial sequence
  DNA replication origin
cttccatgagcggtgttgagcagggtggaggagtgctgctgtccgtccttgtcaggggctctggggtcctggcaaggagaagagaggccgcagaggtggacaactccaggtccctctgtgggtgcccagcctcatcagggttgagcccaggaagatggcacaacgactccatggtccgtttgtcaggacaggaagagaggccggtgggttggggtggtgctttcggagagttctaggggcagagtggtctgtgtgagtgactgcgggggatgtcgtgttggtgtcaccggagcccacgctgactggccggagacctggcctgaccctgctgagcctcaggctgtgtctgcaaaggggaaacaagacctgtgcctcagagggcggctccacccccagccctgcctcgtgccgatgccctccagaactcctgtgccaggtgacgaggggaagtcgagcactcggggaggcctcagagctgtggcctggccggtgagggggtggtgacactagtgacccctgcgtctgtcccccaggcagggagagaggggagaggagaggccgggagcagcaggggagactgaggcagggagtcccacagaaggaagcctgtggggagggcacctgtagccgcgtgagatctgtcgtccacaagccagcccctgctcagcagccaggaggagctgttcccgcaggccggctagcgcaggcctgaagggacaggtaggggtggggcagcaggttagcagagagggcagcaggaggggcatgtgtccagaaatggagggcgagcaagggggttctgagctgaggggggacccctgcactgagcagggccctgagcgtcgtggaaggggccctgtgcttagtggaggggggactgcacttagtgggatgggggcatcccgtgctttgtggggggcctgcatttagttgggggggccctgagcttcatggagggggactgcacttagcggggggctctgtactgctgagggctgagggtaggtgtccctgtgctgagctgggggagccctgtgctgagtgagggagggtggactgtggggtgtaagctgcttggatatagcggctgcacctgtcagtgccctgttgggcagggtctcttctctgcagctgtgcctgggaggagctgggtgagacctgactgcctgcgggccc

SEQ ID NO: 8013 - DNA, 2273 bp, Artificial sequence
  DNA replication origin
ctggggaggtttctttctgtcctcgtttgctgagagttttaaatttcatgatgtagtttttccactgcagaaacctaaaagaaaactaagcaaattagaccccaaaacaatagaattaaattgattttcaaatgttaaaccaactctgctcctgatgtcttggtgggcttggtttgctgttttatgaagaattcttgggtccacattcgtgagtgatgttggtgtgtattctcttttatgtcttttcctcttttgggcgtcggggaaggaggtcccctctcttgttctgggtattggtgatctgtcctctctctctggatcagtctgtctagaatttatcagtctcgttggtctttggagaactgcttgtggttttgtttttccttctattgacctctgttcttaggttattcctgtctgtctctggagtagaggaagtgaaaggcagtggtgtatgcactggggccgcgcacgctggggctgagtgcggggggccatgtacgctggggctgagtgcacggggccgtgtatgctggggctgtgtgtgtggggccgtgtatactggggctgtgtgtgtggggccgtgcacgctggggctgagtgcggggggccgtgtacgctggggctgtgtgtgtggggccgtgcacgctgggactgtgtgtgttggccgtgtgcgctggggctgtgtgtgttgggggccgtgtgcgctggggctgtgtgtgttgggggccgtgtacgctggacctgtgtgtgtgtggggccgtgtacgctggggctgtgtgtgttgggggccgtatatgctggggctgtgtgtgtgtggggccgtgcacgctggggctgtgtgtgtgtgtggggccgtgcatgctggagctatctgtgttgggggccgtgtacgttggggctgtgtgtgtatggggccgtgcacactggggctgtgtgtgttgggggccgtgtatgctggggctgtgtgtggggccttgcacgctggggctgagtgcggggggccgtgtatgctggggctctgtgtgttgggggtggggctgtgcacgctggggctgtgtgtgtggggccgtgcacgctagggctgagtgcggggggccgtgtacgctggggctatgtgtgtggggccgtgcaccctggggctgtgtgtggggggccgtgcacgctggggctgtgtgtgtgtggccgtgcacgctggggctgtgtgtgtgtggggccgtgcacgctggggctgtgtgtgtgtggggccgtgcacactggggctgtgtgtgtgggggccgtgcacgctggggctgtgtgtgtgtggggctctgtgtgtggggccgtgcatgctggggctgtgtgtgtgggggccgtgcacgctggggctgtgtttgtgtggggccgggcacgctgaggctgtgtgtgtggggccttgtactctggggctgtgtgtgtgtgtggccgtgcacgctggggctgtgtgtgtgggggggggccgtgcacgctggggctgtgtgtgtgggggctgtgcacgctggggctgtgtatgtgtggggccgtgcacgctggggctgtgtgtgtgggggccgtgcacgctggggctgtgtgtgtggggccgtgcacgctggggctgtgtgtgtggggccgtgcacgctggggctgtgtgtgtgtgggggccgtgcacgctggggctgtgtgtgtggggccgtgcacgctggggctgtgtgtgtggggccgtgcacgctggggctgtgtgtgtgggggccgtgcacgctggggctgtgtgtgtgtggggccgtgcacgctggggctgtgtgtgtgtgtggggccgtgcacgctggggctgtgtgtgtgtgggggggccgtgcacgctggggctgtgtgtgtgggggcatgtatgctggggctgtgtttgcggggggcgtgtacgctggggccattatgttttgtagaaaactgctggccacgccacaagtcaatttgtattttacttagtgaaggtatttttaaagcctgatatgttaaataaaatcatagcattgaactgacaagtctttttaattttcaggagggtttgcatttgtgtatgaagctcaagatgtggggagtggcagagagtatgcattaaaggtaatgaaccatttaacgccttctctggatttctgacgtatgtaaagggactgtctggtgacagtcttttcagggatgcgtccctgttacgtactttgtttccttttacagcctggacatacttgtcccttttgcttctgctgaatctcagcagccttggg

SEQ ID NO: 8014 - DNA, 2157 bp, Artificial sequence
  DNA replication origin
aagctccgtgctgttctcttggccatgtgactgagggcaccagcctctgcagctctgtgctgttctcttagccaccagggttctgtcatccttgcttctttgtacctctcctggacccagagcctgaagtgcggtggctgcgctcacccagggaggggtgcggggcctgcgctcacccagggaggggtgcggggcagtgcagagcgcaggtaagcagggaggggtgcggggcagtgcagagcgcaggtaagcagggaggggtgcggggcagtgcggagggcaggtgagcggggaggggtgcggggcagtgcggactacaggtgagcggggaggggtgcggggcagtgcggactgcaggtgagccgggaggggtgcggggcagtgcggactgcaggtgagccgggaggggtgcggggcagtgcggactgcaggtgagccgggaggggtgcggggcagtgcggaccgcaggtgagcggggaggggtgcggactgcaggtgagccgggaggggtgcggggcagtgcggactgcaggtgagcggggaggggtgcggggcagtgcggactgcaggtgagccgggaggggtgcggggcagtgcggactgcaggtgagcggggaggggtgcggggcagtgcggactgcaggtgagccgggaggggtgcggggcagtgcggactgcaggtgagcggggaggggtgcggggcagtgcggagcgcaggtgagccgggaggggtgtggggcagtgcggagggcaggtgagccgggaggggtgcggggcagtgcggactgcaggtgagccgggaggggtgcggggcagtgcggagcgcaggtgagccgggaggggtgtggggcagtgcggactgcaggtgagcggggaggggtgcggggcagtgcggactgcaggtgagcgggaaggggtgcggggcagtgcggagcgcaggtgagcggggaggggtgcggggcagtgcggagcgctggtgagccgggaggggtgcggggcagtgcggagcgcaggtgagcggggaggggtgcggggcagtgcggagcgctggtgagccgggaggggtgcggggcagtgcggagcgcaggtgagcggggtggggggggttgcggggcagtgcggagcgcaggtgagctgggaggggtgcggggcagtgcggagcgcaggtaagcagggtctctggggcttggttagttggttctaggtcatcaggcctgtgaggcccagattctgccacagagtagctgccccctggcggctctcctggtaccaaccgccttcacttccaagttgacagcttgatcatcaacatttgtccactttggctagttcccagcgtgaagtaaaaatggtcagaaccaccacagcaacccttaggggctcttcgtatttgccgagcatggtcagtagtactttatgtggattgtgtggtcctcacagtagccctggaaagtgggtactataattacttccatctcgcagaagagaaaagtgacgtttgcagagattagttgcttgccagaggtcgagtggtggagtgggggctgggagccccagggaggtgtccttagggcccctgtcctggcccccgttgctctgcgcattgtgccctggaggagatgtctgagcatataaggtagtagaggctgttggggcggagagtgacaggccaacaccacttcatgctcagctgcggctgacccttggcaggaacaagcctgtgttacttctgtggtttctgtctgttaacatacagggaggtcactcttggggaggaccccatgggtgggctcaccattgggggaggtcactgtcgagggaggaccccctggggtgaattagacgttcggggaggtcactgtccagggaggaccccctggggtgaattagacgtttggggaggtcactgtcgggggaggacccccttggggtgaattagacgttcggggaggtcactgttggggacgacccccgggtgggctcaccactgggggaggtgacagttgggctgggccactcccctttcctcctcctccactccgtggactcctggtgaattgctcatggttgtctgtgtgggtgcgcatccccgtgtcccagtccgtctgtgctgctgtaacagaacgtcgtacactgggggcctataaaccacagacg

SEQ ID NO: 8015 - DNA, 1094 bp, Artificial sequence
  DNA replication origin
ccctcccaggtgggctcagtggcaggaaggccccatgtctccaaggtgggctcagtggcaggggaggccgcatgctggccccatgtgtcctccgcagggtacacttgagatcattttcttttattgaaaagagtctggctctgtcgcccatgttgagtgcagtggagcgatcacgactcactgcagccttgaactcctgggcctacgtgatccccctggcctaggcctcccagagtgctgggacgacaggcatgagataatgtgcccagccttagactgatcttaaaagtagaccgggccgggcacgacggctcacgcctgtaatcccagcactttgggaggccgaggtgggcagatcacccgaagtcaggagttcgaaaccagcctgaccaacatggcaaaaccccatctctactgaaaatacaaaaactagctgggcatggtggcgcgtgcctgtaatcccagctgctcaggaggctgaggcaggagaatcacttgaacctgggaggtggaggctgcagtgagctaagattgcaccactgcactccagcctggacgacagagcgagactctatctcaaaaaaaagtagacccttaggttgctgtggcgagccagccttgtagccgaccctcttcccacataggacttgtgactgagggcaccagcctctgaagctccgtgctgttctcttggccatgtgactgagggcaccagcctctgcagctctgtgctgttctcttagccaccagggttctgtcatccttgcttctttgtacctctcctggacccagagcctgaagtgcggtggctgcgctcacccagggaggggtgcggggcctgcgctcacccagggaggggtgcggggcagtgcagagcgcaggtaagcagggaggggtgcggggcagtgcagagcgcaggtaagcagggaggggtgcggggcagtgcggagggcaggtgagcggggaggggtgcggggcagtgcggactacaggtgagcggggaggggtgcggggcagtgcggactgcaggtgagccgggaggggtgcggggcagtgcggactgcaggtgagccgggaggggtgcggggcagtgc

SEQ ID NO: 8016 - DNA, 1579 bp, Artificial sequence
  DNA replication origin
gaagttcatcgcaagcccggcgacgccgcgcacgcgctgtctccgtcagacctccgcgcctgcgcgcgcagccaggaagtgaggccgcggcggaggggacggggctaggccgggtcgccgcctgacgcgacgcgtcctcacgggcgcctacgtcacggcgtcgaggcggaagatggtgcacctccgggccggcggttgctgagctgacccggacggcgagggagcgggagcccgagcccgaccactccggctgccgcggggtgcggcgcagccaccgccatgtcgctgctgcagtcggcgctcgacttcttggcgggtccaggctccctgggcggtgcttccggccgcgaccagagtgacttcgtggggcagacggtggaactgggcgagctgcggctgcgggtgcggcgggtcctggccgaaggtgaggccccgggtcggcagcgcgggtgcggccgcggagtgttgtctccgggacgctgggggcagcgtcagcccggagtggaagggcgtgggttagggctggggagggtcccagcgggatcgtgggtcagggtcggccaggggagggtctctgccgagggcgtgggtcagggccaggcgaaggtcatagcgcgggcgtaggtgagtgcctgctggcggtgattgcggagggcgaggctgggaccgggtcggggtactttcttgtcataagagtagggtcaagtcggagcaaggcctggggcttggggaaccccctcagggtgggtgggggaagatgttacggtgaggtgggggatggtggcaggcagggagcttgggtggggacccacagcggagactgagggacggtgcctagaaggccgacagctggagtcaggaggtgagcggtgcaggaggtgggtttaagccttggccttttgccggacatctggggttattgagcaggcagggacaggactggactttggaggttagggctggttcttctacagtccagggaacttgagagttggtgggtgcacacgtgttgcaggtagttgcggttgtagcctggggggtgggggggttggccgagggtagactgggctgtgtctcgtgatcccccttcgtctttcaacacctcagtgtttctcttcccggtgaacatctactcgtgtgattccgtgtgtagtacaggaagcagagccagtggttgtgacctatatagaacttgcagagtggacaggtcactcggcttaagtcctcttgagtcagtcttgagtcagttttgtctctgcatgctatttctagctccctggatgtcctctccgttcacacggaatcgatcaccagtgccagtgggtcccattctctcttgtggattttccttacattttttgtccagtggtgcctggaggtgtgtcatatttcactggctgtgaagtttatgggctaaacacagttgacttgggtgcggaagcgtaactctattctgctgtattggcacagggagagggagtgaagcgacacaaaagccctcaccctcaccagctccctggtacctctcagggctggagggttagcctgtccaggtgcctgctctgtgaccagacaggag

SEQ ID NO: 8017 - DNA, 1554 bp, Artificial sequence
  DNA replication origin
gcacactgggcacacgccacagctgtggctcagcacagcactccccaggcatttttaatatcagagatgcatctgggaagatgaataagatgccaggtggagagtactctggacagaagagaccccagcgcctcacggagacagaactgaggtatggctgcaggagccattgctgcatggtgctgggcagcctcgtgccaaccaggcactatggatttcaccctgcacccgagtgggcagcctcgtgccaaccaggcactatggatttcaccctgcacccgagtgggcagcctcgtgccaaccaggcactatggatttcaccctgcacccgaggtggaggctgggcacactgagacaagttccccaaacatagaatgtggccagagagccccatgttggctgagccccacctgcagccaggtgccccggagcagggaagagggcagcagtgtgtcaaggacgccagtcagaagggctgctatgacctaggagaggagtgacggaggtctggcatcccaggagacacacagcatgtgggaaagcagctcctaagagtattgggggctgccgtggggggtgacggagaagggggagcccacctggccctgatgccaccgtggtgaggaaggtaggtcagggcacattcttgagggatggtgagtgcttgcttcaggcttgtttcctgggacacagcagaagcaccggaggctgtctcagggcaggggagctatggggatggaaggagtcaggctggagctgcagccttcaaaggtacctcggattgagccgtgttagaaacagaagtaatttctgtgctacttggaaatgtgggggtggtccgagggagtggcacccgggaaggaggagaggagcagccgggggcaggacaggctgggctctccaccatttaaggggcggagacctcttcaggaagggtatggggagagcccttcagcaccagcgggaggtgacaagccagagcccccaggttttactccaaagggggtgctgtttacttggccaagggcatcaggggactgaaatatgtggccagctagagggtccgcaggaagagggatgtgctgtagtctgctcacaccaaggcgagacgcacaaaaacaaggagagttcaccccagagaatggacagaggctcactggtttccagccgggaaaaacaaacacacaaggcattccacttcactagcaatcagggagatcggggaggtgcaaatgaaacggagagaggccagccagggtggtgggcgtgaggcgacgggagggcagggacctggggaaaacagaaaccgaggctggaatgaacggtggggacagacggcggggagtgagacgacaggacggcaaagacgtggggaaaacagaagctgaggcagcaacaaacggcggggagtgaggagacagagacggcgggggcctggggaaacagaaactgaggcaggaatgtaaacggacatgtgtgtttcagcgacagtttagcaacagttaataaggtgtagtgccataccctccaagggtccattccaggcagtctcac

SEQ ID NO: 8018 - DNA, 1708 bp, Artificial sequence
  DNA replication origin
cagctcacgagtcaggactggaggcccaacctcagtactggcccaggaagggctacgtggtcactgctgtgccttgcgcacccatgaagcttgggccgcacgaccctgtcatgaggacacagagccaggcaggtgtgggccccagacgccctccagtcattccccttctaagatgctgtttggctctttagctcagaaacagtcaaggtggaaactctgcttgtaaaccctttcccgctcacctccaggcctgcaggagcagccggggtgggagtgtccccgctgagacggggcgctggccgcgtttactcagagcagctacgtaaggggcctgcctgctggggcagctgccctcccgcagaggaaacttctgtccttggggcaggcccggaaccttcctcttccaacctgtcctctggctcacttccagggtgctgcctttgtccactgaactcggaaacagagccctaggagcccagtctcccaccctcccaggaggccaggacctccgccggggtgagcacaggctgagcaggacttgttggctccctccctttccaaggaggcccccgcctcccgcctctgcctcctaagcctcagaagcttcgaggcgtgcagggtcagcaccctgtgccaggtcgagcctcggggaccctatatcttcgcagggccacaccacgcagagcacagcctgccccgttacctgttctggggagatctccgtgtgggtcacaggcaggatctgagggggcaaagagacagaaggaagcaggagagcaagagacgcttgttggattgggtgtggcagtactggggactcgagggcagtgctgggcccccctaagctgcctgaggagctgggggacccaaggatgctggcaagacctagacaggtctgaggtgggctgggcagtgcctcgagaggctcggggtggggcaggcctaagcaggggccccgtacagaccatgacggtggcgatgatggacagcagggcgtcactgaagctgagcatgcgttgggagcactggatcccctccccagcgtcctcgtctctcctgcctggggggcagtcccccggtgtatccagtgcctgctctggggtccggggctgggacatggcggggccgctgcctggcggttacaggagcctgggaggaaaggcaggtctgagtgtgcctgtggggcgctcctggaggtcggccatgcagcctcagccctggtgcagggacagggactggtatgggggggggcttggccgccactgagcaggggaagggtccacgctgctctgtcctctcccaggtgcccctcaaatttctggcctccaggctgagaggccaacaacagatgccactcccggccctgttactggtgaacactgatctgggtggactgggcctcagtttctcctcaggaaacgggagagacaaggaaaggcacagagatcacagaccccaaggccgacctaaacgtggaagaggaacacagcaccctgcggggcccttgaccgtgcatgcgtgcctggggctgtctgttctctacagggcccgtgcacacgtgcctggggctgtctgttctctacagggccgcgctctcccccgctctcgctctcggggcccgtgcacacgtgcctggggctgtctgttctctacaggggccgcgctctccctcagtctcggcacctgtgcacgtatgcctggggctgtc

SEQ ID NO: 8019 - DNA, 1139 bp, Artificial sequence
  DNA replication origin
agcctttcggtggtgacccggttatgatggcagagcctcatgaatgacattcgtgacctggtgcttttgccctcctgtcccctcccacatgcggatacacagagggtaccatccctgaggcggagtccacagcagacaccgagcccattaagagctgaccccccagcaggaacacagcccatagaacactctggagtacacctgtgggtgtgggcatggatcagcgccctggagaaggggtgggggctggaggggtgggggctgcaggtgccaggggagacagaccagctggagacggaggctggacccagaccagggcactcagggtctgctggggaggccaggaccctcccaggtgcctcacaggacccacccgagggtttcgccctgccctgggccgaggccagccccccctcacggtgctgtctcgactgccattcagggacactcatgtcacctgggctctgacagcagtgctcttgtattccagcagttcgacagaagtgtacagaggcttctggcaacacggattgccgtctacctgatgacctttctcatcgtgacagtggcctgggcagcacacacaaggtgggggcccgggcgcttccagcggtccatagctgctctcaaggttcccgtaccccgcaccacatcacgcacgggtccatggggtcggggaggacagcaggctactcctcccaccctcatccgcgtggggatggcaggacttaccccaaacccagggcctgggacagtgtggatggtgcagtaggcggaggtgtggacggtgcagtaggtggaggtgtggatggtgcaataggtggaggtgtggacggtgtggatggtgcagtaggcggaggtgtggatggtgtggatggtgcaataggtggaggtgtggatggtgtggatggtgcagtaggcggaggtgtggacggtgcagtaggtggaggtgtggatggtgcaataggtggaggtgtggatggtgtggatggtgtggatggtgcaataggtggaggtgtggatggtgtggatggtgcagtaggcggaggtgtgggcggtgcggatggtgcagggtgtggatgggagcagggtgctttctagggaacttcatttccttcgtgttttccaaactccgtgca

SEQ ID NO: 8020 - DNA, 3104 bp, Artificial sequence
  DNA replication origin
gccttcgtgggtggcctcccactagcctaccagcagacctcggccttcgcccggcagccccgcgatgagctggagcgcgtgcgtgtcagctgcaccatcatcttcctggccagcatcttccagctggccatgtggaccacggcgctgctgcaccaggcggagacgctgcagccctcggtgtggtttggcggccgggagcatgtgctcatgttcgccaagctggcgctgtacccctgtgccagcctgctggccttcgcctccacctgcctgctgagcaggttcagtgtgggcatcttccacctcatgcagatcgccgtgccctgcgccttcctgttgctgcgcctgctcgtgggcctggccctggccaccctgcgggtcctgcggggcctcgcccggcccgaacaccccccgccagcccccacgggccaggacgacccacagtcccagctcctccctgccccctgctagcagccacagagcccactcccagccgtcctcaccagagatggaccagggaggacaggatgctgggcaggggaagccaagtcacgggcaggccgcagtggttcttgcgtggcctggttttattttcattgtgaaatatcatgctcttatttcagtcctcaaattgttctccactttttgcggagagaggagtttcacaggaactggaaatgtgctttatggcatttgcctatccactctctccaacctgaagacacgttgccaagctcacctacccgaggggcagcccactcccagcccctttgaggcctatacagagctggtggggtcgggggtgccaagccaggccctcccctcccctcggttgttgacacaaagatgaggaagagatggtaggatagtgacgcccagactgtatttgtcctggatataaattactgttgcattcaggcagcgataaatacagaggggcccggtgtgcagggcacagaccccacctgggtacagactcacatacaggacaagcccctcaccacagttacacacgattcatacagaccacagtccacaccagggctcgcgaagcaaaactaatcacaaaggactggtcttgaagatgacaatgacgtaaacaagagtgcacgctggaggccacaagcggccttacaatgcgtgtgtctgtgcagtttggcagatgcggggggtcgggggattagtggcatcaagggccccccaggaggctgcagcaggctgggccaggccacactcctgaggccaaaccagagccacttctgaggtcaaagccacacccaggaaagctccgcaggattggaggcccaggccagctgtgccccacaagggaagggggagatccgcaccgtgggaccgtttctcgtgggggagtcggggcttccccacagagcgggctccatttttggtcagactcctcccggggccagtgcaccatctgaatccttgggcacgtggaggcagctttgtctttggctgggtgcaccccagcctggcccagatgcaggaccctccaccaagctgtctgggggcgtgggagcaggagggctgcaggagctgggtctccacacgctgacgagggataggactgagcagatgtcggctcacacaggcactgggaactgcacatcaacagcgggcaagcagcgtggaaagtgctagcgtggggtctggggctgaaagccagctcctcctccacgtgcatgggctgtttacacctcccaaactcctctgcaccgccatgccctgcttttggtcccttctgggtgctaagtgccccaccctgagggccgaggggcagacactcgggcccggcccacactctggtgctgccagggcagcacctgagacctcctagcctccacgtggacagaggttctcctccccaagcagaggcactaggaaagggccaccaggtccagctgggcactgcctgcccctggagctgtacctgagatccaagctgccatctgtatataacaaggccagaaaacaagggaaggcaccttctcccttccctgaacacaaggaagtcaccagtcaccaccacccggcagcctcacacgctgcccacacctgctgcccagggcggggaggtgaggctggagggactggcagcctgtgtctgctggggcagggacacaccagggagcctgctgctcttaaggactggccagggggacggcccgaggggcacaaagtgagatcagacccacctggacggcctgcatccagcactgtccagctcaaggggctcagtggggagagggatgggtgcccacccctgaggagaggaccaggcccccacagggcagagggctcaccatccagagccctgcgcccacccgggacacggggtaacactgccacccgcacaccagtctccagtgggatgagggctgtgacaccaacatgtgtcaccaatgggatgagggcgggtcccgctccgtcactgggaagatgctgtggtcagggctgtagccaggtccgaccacagggccggccactgtgtggacgtggagctgcctccagaccacctgaaaacaaggctggcgggagcagagatggctcgagcccttgggctgccccagccacccctacctaggatcgctctcaggggcaggcgcagcatccgcccgggcatccctggtggtcccggccctcctcggcttctgcttggccttcctcagcatgtgcacctgtcccagggcaggggacagaggaccagggtgacatggccgatgaaagaacggtacacgggcagcccccggtcctggggccccgggcagctgatgccatctcagccccatttcacggaaggggagggacctgtctggctgctccctgtgccacctgtggcccgcctggccactggcacagccctcctctgaagcaggcaccctcccggagtcagtgctccctggccgcagccggccatgccagcaccacctgggtaccactggccactcccatggccggcccagcccggcccacctcccctggctctccagcctcaccccacataccttagggccagcagctgagatgatcatgtgccccggggcctggacccagggctccccgtccacctgcaccggggtggccttgag

SEQ ID NO: 8021 - DNA, 2017 bp, Artificial sequence
  DNA replication origin
cagtgccgccctgctggccagcagcgagatggggtgaccacgcagctcatgtgtgaggcctcagatgtgagggtgctggccacgccttcctggggagggggctggtccaagccaggtgggctcagggttgggggctgggcactgcctggcaaccccagcagtggggacaccccaccttgggtccccatcctaacccagccccctgtctgtcagcacgcgaagctgcccccagacagctgtcccctccttgtgttcgtgaaccccaagagtggaggcctcaagggccgagacctgctctgcagcttccggaagctactgaaccctcatcaggtcttcgacctgaccaacggaggtcctcttcccgggtgagtccagcaggacccctggtccagggcagcagcaggggcgggaagggccccaggaggctgccacagctgtctcggccggcaggagctccacggggatcccgtgctgggaccttgaagtcctccacacggccaggacgggcacttggaagaggcagcctgggtgggggatgggctgcgcccgcagctggtagaggacacttcctgtctcccgctaggctccacctgttctcccaggtgccctgcttccgggtgctggtgtgtggtggcgatggcactgtgggctgggtgcttggcgccctggaggagacacggtaccgactggcctgcccggagccttctgtggccatcctgcccctgggcacaggtgggctcagccgtgcagccgaggagggggcctcagggtctaccccttcctgtgcagcttttgccgaggcctgggctggctgtcctcgtggtggggtctgcacccagctgatgggcgggtgggtgtggacagatgctctgtgtctgcttgtgtcccagggaatgaccttggtcgagtcctccgctggggggcgggctacagcggcgaggacccgttctccgtactgctgtctgtggacgaggccgacgccgtgctcatggaccgctggaccatcctgctggatgcccacgaggctggcagtgcagagaacgacacggcagacgcagagccccccaaggtacagggcagcccggcgtggggtgccttccaggctcctgcatatgaccccgctacacgcgtcacaacgggcgtcctcttcccagccacactcgggtgtacgcgcccgcatcatcccctctgcaaagcgggcagttgagggagacacagaaagtagccactgctggggattgtgctgagccagctggcgacagagcctggccaggacctgcccatgctgccctctcctgggtgctcggcttggtgccagggtggtccttgctcttgtctctgcctgccggcagagctgttggggagctcagggggcctggtgagggcggccgggtcctgggagatgaacgccctgtccccagatcgtgcagatgagtaactactgtggcattggcatcgacgcggagctgagcctggacttccaccaggcacgggaagaggagcctggcaagttcacaagcaggtaccggagccgcaggggctaccacctgtcaacggcatacctccctcaggtcccccagcaggaacaggcagaggggccggaacccggaggctgcctaaggcggggtagggcttcccctggtgatgggtgacctgccccgtcctgcaggctgcacaacaagggtgtgtacgtgcgggtggggctgcagaagatcagtcactctcggagcctgcacaagcagatccggctgcaggtggagcggcaggaggtggagctgcccagtattgaaggcctcatcttcatcaacatccccaggtgctcgcgggcggggctccccagaggctctgcccggcggggccatgggcaggctcagccctcgtcctgcctgcacctacacctctgtgcccgctctcttatgcggcagctggggctcgggggccgacctgtggggctccgacagcgacaccaggtttgagaagccacgcatggacgacgggctgctggaggttgtgggcg

SEQ ID NO: 8022 - DNA, 980 bp, Artificial sequence
  DNA replication origin
ggccatgcagcgcgagtccaggctggaaatccacgtgggactctgcgtggcactctgtgccagcgagaccaaggcctgtcccctggggggcctctggtgcacacctttggaggatggcggctcccaggccaccgcccacctacacagcagccgagaaaagctcttaactcacagggtggcacgcggcgtccctcgaccacaggacagagtccatctccccacacacaaccccaagaaacagtacccagggatctagacacagcgggctcagggctgggatccctacgacaggaggctagggaccctacgacaggaggctggggcccccacagcggggaaggctgggcaacaggagacacacaggctgggtgcagacacagggtgggcagcggcacaggggccggccgtggctgggggcaaggacacactcggggcttcgtgacccacttggcaggcagagccgcctgcggtcaccacttaccactcaccccagggcaggcagctgacgggagagagaaagcgcgtgtcggccccaaacctggctctgcccacagagcgagtggagctggggtgggggctgcatcctcgggacagtggggatggccaccctgtcctgagccaggcaaggccgggtgtaggggcacaggagggaggcatagcagggagccacaggcatctcccgtcccagccacagacaactcattctgctcgagttctgcttcgcctggactggggtcacgatcaagggtcaaggttcaggggtagaacagccatggacacctggggggtcctcatgggaccctttgggggctagatgggctgaggacgagaggccaatgtgaaggcacggtgtgcagcgtggagtcccaggctccagcccctccatgggccagaaccccgttccccccggccctgccctgtctccacggaccagacccccgttccccccggccctgccctgtctccatgttccagatccc

SEQ ID NO: 8023 - DNA, 1005 bp, Artificial sequence
  DNA replication origin
acgcggtgagaagaagccagttccgcctcgtcacggtgtcccgcctggccggtgccgaggaggtgctggtaagggggaggctgggggaggtctgagccccctcccaggaccgcatgtccccgcacctggcgcacctgacctggctcccccaacctggcgcccctcacccacctggcctccccctccatgacctgccccccactgaaccccgcctgaccccccacaacttggcccctctaacctggtgccctgcaggaggccgcactgcgggcccaccacatccccgaggaccctggccacctggagctgtgccggctgcccccttcctctcaggcctgtgacgcctgggctgggggcaaggctgggagtgctgtgatctcggaggagggcagaagccccgggtccggcgaggccacgccagaggcctgggtcatccgggctctgccgcgggcccaggaggtcctgaagatctaccctggctggctcaagtgagactgggcccgaggctcagggtctgctgggcggggtggggggagctccagctcagactgtgtccccacagggtgggcgtggcctacgtgtccgtgcgagtgaccccgaagagcacggcccgctctgtggtgctggaggtcctgccgctgctcggccgccaggtgcgtaccctgtgcctgctccccatgccggccagactcggtggggggtcgctgtccccaggaggccaggccaccatcccagcccaggcgtggctgtccccgcgggtgtcctgaggtggtgggggcctgcccagacccgatgccaagctctaccccaacaggccgagagtcccgagagcttccagctggtggaggtggcgatgggctgcaggcacggtgagtagacagcccgtgctgggcgtggcggtccctgcaccttttgggtttggacctgctgcccaggctttcctgcagggtggtgccggacatcaaggccgggctctgccctcctgaccagctccaccctgcatcc

SEQ ID NO: 8024 - DNA, 980 bp, Artificial sequence
  DNA replication origin
ctctcggcctgttggggtagagcttggcatcgggtctgggcaggcccccaccacctcaggacacccgcggggacagccacgcctgggctgggatggtggcctggcctcctggggacagcgaccccccaccgagtctggccggcatggggagcaggcacagggtacgcacctggcggccgagcagcggcaggacctccagcaccacagagcgggccgtgctcttcggggtcactcgcacggacacgtaggccacgcccaccctgtggggacacagtctgagctggagctccccccaccccgcccagcagaccctgagcctcgggcccagtctcacttgagccagccagggtagatcttcaggacctcctgggcccgcggcagagcccggatgacccaggcctctggcgtggcctcgccggacccggggcttctgccctcctccgagatcacagcactcccagccttgcccccagcccaggcgtcacaggcctgagaggaagggggcagccggcacagctccaggtggccagggtcctcggggatgtggtgggcccgcagtgcggcctcctgcagggcaccaggttagaggggccaagttgtggggggtcaggcggggttcagtggggggcaggtcatggagggggaggccaggtgggtgaggggcgccaggttgggggagccaggtcaggtgcgccaggtgcggggacatgcggtcctgggagggggctcagacctcccccagcctcccccttaccagcacctcctcggcaccggccaggcgggacaccgtgacgaggcggaactggcttcttctcaccgcgtcgtcgccatcaaagatcttcagcgtttgcttccctgggccgggtaagctccgtgagtcccgggcgcccgggggacctcagtggagttggggggaatgaggcgggcacttaccggactccggagttgcctgtgtctctctgcctggacccacggcagcg

SEQ ID NO: 8025 - DNA, 768 bp, Artificial sequence
  DNA replication origin
ggcccagcccacccctgctgtgcagcttgtcaggggtgatgggggaggccaagggctggccgcctggcaggccacaggacacttaaaggatgcagggtgctaggtggtggggatggggcagacccaagcaccggcagaggcaggggtcctccgggggcggcagacacctctaaccctgcctgccccccagtgtgtgagctgcacctccacccagactgtgtgcccttcgcctgcagtgactgccgccagtgccaccaggatgggcaccaggatcacgtgagtgtaccggccccagggagccctggggggtggggcgggcccagctgctgactgcccccgctctgcaggacacccatcaccaccactggcgggaggggaacctgccctcgggagcgcgctgcgaggtctgcaggaagacgtgcggctcctctgacgtgctggccggcgtgcgctgcgagtggtgcggggtccaggtgggcgctgggaagtcgagggggtgggggtggggcaggagaggtgcggggttgggtgggtgctgggaggtggaggagttggcggggcggggcaggagaggcgcgggttccaggtgggtgctcgggggcgggcggcaggaaggacacggggtccaggtgggtctgcgtcgtgtggggtctttccctggacctggcgcacctggtgcccccgcaccctggctccaaccccccagctcaggcccttctccccccaggcgcactccctctgctccgcggcgctggctcccgagtgtgg

SEQ ID NO: 8026 - DNA, 900 bp, Artificial sequence
  DNA replication origin
tggggagccaggcaggctccaggtaccttcgcagtggagcgccggtgcctccaggaccttgcggcagacagcacagaacttgcgcttgtggagcccccgggggccgaagcagtgggctacaggaacctggtggggcagcctcacctcagcacccttggtaagggcaacaggctgcccgccacccctcctcgctcttcacctgcgcaactctgcagctcacgctcctgctgagaactgcccaggctgagccagctgtgctagctggaggccccaggaacaaccacacccccaggtcctggggacagcctggctggtcaaaagcagggaggaggctgtggcctcctccagcagccctgcctagcgcaggggagcgaggccccaggaacaaccacacccccgggtcctggggacagcctggctggtcaaaagcagggaggaggctgtggcctcccccagcagccctgcctagcgcaggggagcgaggcccgcctgccaccccttccctccttggggcaggcgaggctctgtcgacggcctggcatctgtctcctccgagccaggaagatcccagcacacagggactgccctctgggagataatctggccataacgagtgtggaccaatgtttctgtgttggagaaagctgggctgttgcttttccacgagaagggaaggagaaggaccaagtcttcactcctgactctcgcccttgtccccaaacttaaaccacacccgataaaagcatacacagaaagaccgtgttccagaatagcagctgtgagcatgccaggatggcgggtgacttttattttgttaaatatatctcctttttttttttttttgagatggagtctcgctctgtcgcccaggctggagtgcagtggcgtgatctcggctca

SEQ ID NO: 8027 - DNA, 913 bp, Artificial sequence
  DNA replication origin
cttcatgtcagacgttagtgatacctgcagttgaaaggcaaagggcagatactgctcgggattaaaaggctgagcaccctgcatggatctgcagggaatgatggtgataaaagccagtccccgaggtcgcaaatagcaagatcctgtccatagaatgtgctcaaaatgacgaaactaaagggagcacagatgtagagaggtttccaggcggagaagtgggcgtggctgtgacatgcagcgtgagggctcctgggggggatggagatttcggcatctggcgtgacctcagtttgcaagatcacacacttaggggagctgacaaaggcttcagggggtctgttcagtttcctcacagctatgtgtgaacccacaagcatctcaaggaagcttgaataaaaagcaaaggcaggaagcctgggtgcctgagggtgtcttggccaccaccctccctctaagggctctgggtggggcagggaggtgactggcccaggtcactgcagggcacaggggacttcccttctctggtgacagtggtgacagcagggacatgtaggaagggccaggcttattcctccctcagctgtcagcgtcgccgtcttcagactgaggccccccaagtccgcattccctgatgcgttcaggctgcaggtggggcgcaggccgcgaggcaggcccgggtgtgcagcaggacgggaagccaggccagcaggcacacctgccactggcgggcatccggctgcgccgtcccctctaatgtctgacgccctgttcctaatgatgcagttccccgggtgtgagcaggaggccttaggccggtggtcctggtggtggccgacaccctggtgattccacactggcttgggcggcccctcgtcatgtggacggcccgaggctgccgctttttaaaattgat

SEQ ID NO: 8028 - DNA, 2617 bp, Artificial sequence
  DNA replication origin
gcaccggcgctttcgggggagtggagggcggggtcccagccctgctcgcgggacgtgccttcgtggggcggccggggcctgtgcgccgtggggccgctccaggctgcgggcttcctcacctgggaggtgcggacagcatctccatagtgccgcgcgatggctgcgacccaggggctgtgcctgatgcgagcgggacctcagctggggtccccatggccggcttcctctcccagtggctggggcagcaggtgtggctaagcagggctggcctgggcccctggccctagcccttctcatgctgtggcccagagtcccagcctcctggagagccaggccgggccctgccgtcccggtgcgcgtgtcccagccctgctccacccagctgcccagctcttgctggggtgaggacagcccttccctgttctgggcccgggtgctcccagggctggctctcatcttcccccgcggcaagcaggcgggccccggggactacagcccagcctctggagggagcgagggacagggggaccacagcccagcctctggagggagcgagggacagggggaccacagcccagcctctggagggagcgagggacaggaccggagttctggacgtttgacacttactgtgtcctggccagggacgctgaggtgggaggggctatccttagcctcaggcctttctctggggataggggtccactcaggtcagggtccgcagaggagactgtcccctcacacggggatgtcgtctgtggtggaaacggcatggttgttctgacccccagggctgcacaaggtggcctggcccgccagcttctttgtcacgtcagagcatggcacagccatgcctgctgcctggggatgccaggggcttccccagaggtggggagtgtgcatgtgtggctgaggcagctcccgacttgaggccagactccgggtcccctcccccttcggagggggcaaaagggccctcctgggcagcacccgtggaagaggggccagcagcggtatgggaaggagggcaccctccccgccaggagacccaagcgtggggcgtggggtgagcaggccctgtctccatggcagaggagggacctgggtgctgcctgtccccccttctctcggtggaccctggcctgcttccagagcttttctcttaagctgccaggagaagcttctcccggtcccatctggagactggggtggctagggctgcagcaggtgaagggcggcaccagcggggccttctggaagagctccctgtcccagctggactgcctggggctccgtggcacaaccttcacccggggctgtcttggcagttgtgtcactgggtgccctgcccactcccagcccccgcagcctttgccccagcccagggttcctgccctcccttctgccccggccccaccctcctgtctgttttactgctggggtgtggcgcttgctcctcttatgccctcctgagcaccccgccggctcaggtgctccctgggtcctatgcacacagccagagctccttgggaggcttggggctgtccactccccagcggctcctgcctcccagagccctcacctgccttgggtggctctcggtctcaggcacggtgcacagcacgtagcagggacaattaggggtatgcgtagtttcgggggagtgagacacagatgtccttggtaaagccaatctgccgaaggccgagaagcccctgccacctggcgaacctggtgagcccagggctgccccttgagaggcccaactgcagaggcaggaggagtgctgggcctacgtgcgaaggggagggactgctctctggatgagaggatacactcattgtcctccaggatggtcaggaccacccaggttcttgctcctgggctcctgggctgcaggctctctccaatgagtgggcagggtggtgggggaactcgaggaccacagggcccctggtgcagcatggtgggtatggcagtcattgccctggggcctctaacttcctgggtaggacagccattgggtaggacaggggccaactcacacagtgctcattcccacagtctgcaatttcatgtctcatgagaagtgcctgaagcacgtgaggatcccgtgcacgagtgtggcacccagcctggtccgggtgagtgtggggctgggtgttgcacctgcaagaggctgggggatgtgtcagctctcgtagggtcgaggcactgaaaaccttcatgtcagacgttagtgatacctgcagttgaaaggcaaagggcagatactgctcgggattaaaaggctgagcaccctgcatggatctgcagggaatgatggtgataaaagccagtccccgaggtcgcaaatagcaagatcctgtccatagaatgtgctcaaaatgacgaaactaaagggagcacagatgtagagaggtttccaggcggagaagtgggcgtggctgtgacatgcagcgtgagggctcctgggggggatggagatttcggcatctggcgtgacctcagtttgcaagatcacacacttaggggagctgacaaaggcttcagggggtctgttcagtttcctcacagctatgtgtgaacccacaagcatctcaaggaagcttgaata

SEQ ID NO: 8029 - DNA, 1201 bp, Artificial sequence
  DNA replication origin
cgcgaaccagccgtggggaactggtccacgtgggctcggtttgaccgcagccgggccagacttctccggacgccgcacgcgcggcgttgtacctgcggggtcccggcccgcggctgcgcagacaggcgcctcccacgcgagacgcggatgctgtccgaggcccccggccgcgcaggacgcccccggcgaggggcagcgctgcgggcctcccacagtgggtcccggaaagcggggtttgcggtgcttgggcggctccgtccgtggggtcttcgcacgcgcagacttggccctgcccgaggcccaggacccccggcgcccgaccgctgtcctcactgcaacgggggacccgcctgcggcccggggctgtccgctcgcgacccccacccgggcctcacgccgagcgcccagctctcctgcctcgtgcgcgccacgggtcttgttcaggtggcgctggtgtcctttgagagccgcgtccacgcgggtcacccctccccgccgctggcagcagtctgggtccttgcccccgtgggcctaactgtggataggagtctgcgaagcgggggaccccaccccgggccaccgagcggggacctgcagagggcagggctccagggccatcgcagcaggcggtctcagggggcaggaagagcagggaagggcctgtggggagacgcctgaaaggggctgggggctgtggactctggagggaaggagccgggagacctgtcctaggggctgtgctggtgagggcacccagaccacaggggattccaggaatggagggtgagccggggacccagtctgaggagggaggagcaggcccctgagatggtgaggggggagacgcagtcctcaaccagggaggattctgtttgtccagaagctgctggttgagctgctggggtaggaccctgggtggaccccagggtaaagggaatgcagccaaagcttcagggaaccttcaccctccaggagctgcgctctgggacagacagcaccctgaagaatgagggctgcctgggggcagcaggaaggcgtccaggcggaaagccggagcagaggccctgtggcagggtgctccgcagaaatcctttcctgatgcccacctatgctgggaggcccggagtcaccacccctgcattccctgtctcctgtgccagaccccaccccgagcctgccctcagccaggccccaagacccc

SEQ ID NO: 8030 - DNA, 1362 bp, Artificial sequence
  DNA replication origin
aggcctggagacgtggacgggcctgcacagaagaagctgtccctctggcagacaagctccgttgtggcgggtgccgtggtccaggctgggattcaaagttgttgttttttttttttttttccaaggcagaagaatttttcttagtacagaacaaaatgaaaagtctcccatgtctacttctatccacacagacccggcaaccatccgatttctcaattttttccccacccttcccgcctttctattccacaaaaccgccattgtcatcatggcccatccccaatgagccgctggacacacctcccagacggggtcgtggccgggcagaggggctcctcacttcccagtaggggcggctgggcagaagcgcccctcacctcccggatggggcggctggccgggcagaggggctcctcacttcccagtaggggcggccgggcagaggagcccctcacctcccggacggggcggctgccgggcggagacgctcctcacttcccagacggggtggctgctggacggaggggctcctcacttctcagacagggcggttgccaggcagagggtttcctcacttctcagacggggcggccgggcagagacgctcctcacctcccagacagggttgtggccaacagaggtgctcctcacatcccagacagggcggcggggcagaggtgctccccacatctcagacgatgggcggccgggcagagacgctcctcacttcctagatgggaaggcggcggggaagaggcgctcctcgcttcctagatgggatggcggccgggcagagacgctcctcactttccagactgggcagccaggcacaggggctcctcatatcccagacgatggggggccaggcagagacgctcctcacttcccagacggggtggcggctgggcagaggctgcaatctcggcactttgggaggccaaggcaggcggctgggaggtggaggttgtagcgagccgagatcacgccacttcactccagcctgggcaccattgagcactgagtgaacgagactccgtctgcaatcccggcacctcgggaggccgaggctggcggatcactcgcggttaggagctggagaccagcccggccaacacagcaaaaccccatctccaccaaaaaaaacacgaaaaccagtcaggcgtggcggcgcgcacctgcaatggcaggcactcggcaggctgaggcaggagaatcaggcagggaggttgcagtgagccgagatggcggcagtaccgtccagctttggctcggcatcagagggagaccgtggaaggagaccgtggagggagagggagagggagagggagagggagagcggattcaaagttttaaggccccttc

SEQ ID NO: 8031 - DNA, 793 bp, Artificial sequence
  DNA replication origin
gtctggaaagtgaggagcgtctctgcccggccgccatcccatctaggaagcgaggagcgcctcttccccgccgccttcccatctaggaagtgaggagcgtctctgcccggccgcccatcgtctgagatgtggggagcacctctgccccgccgccctgtctgggatgtgaggagcacctctgttggccacaaccctgtctgggaggtgaggagcgtctctgcccggccgccccgtctgagaagtgaggaaaccctctgcctggcaaccgccctgtctgagaagtgaggagcccctccgtccagcagccaccccgtctgggaagtgaggagcgtctccgcccggcagccgccccgtccgggaggtgaggggctcctctgcccggccgcccctactgggaagtgaggagcccctctgcccggccagccgccccatccgggaggtgaggggcgcttctgcccagccgcccctactgggaagtgaggagcccctctgcccggccacgaccccgtctgggaggtgtgtccagcggctcattggggatgggccatgatgacaatggcggttttgtggaatagaaaggcgggaagggtggggaaaaaattgagaaatcggatggttgccgggtctgtgtggatagaagtagacatgggagacttttcattttgttctgtactaagaaaaattcttctgccttggaaaaaaaaaaaaaaaacaacaactttgaatcccagcctggaccacggcacccgccacaacggagcttgtctgccagagggacagcttcttctgtgca

SEQ ID NO: 8032 - DNA, 1499 bp, Artificial sequence
  DNA replication origin
tgctctttgaggtaaaccaggagtctcccctgggagtggacggccctgcagcgggacctggcctgcctgtcccattccttccacctagagctgaggtacccgccttcctggcagggccagggccagggctggcgttggcccctcgtcttactgctgctgccgttccccatgaagatgggacctccccacattcctggccctaagggtcattttattagtcactgaacgcacgggcagcgcctggatcctgcgcccgggcagtcctgggcttgaacgtgtgtgtcagccgcgctgccagccatgctgaggctcgggactgagccgcccctttgttgtccccagccccccgctgccacacagccaggctgaccagtacgtcctcagctgggaccagcagctcaacctcgcctatgtgggcgccgtccctcaccgcggcatcaagcaggtccggacccactggctgctggagcttgtcaccaccaggtgggcggcgggcagggtctgggcgtcccagagccccttacagaggcacagatgggaggggagggctgggggctgctcggaagaccccttgttcccccacctcccgccgaagcaccctgttggggagagcgtgtccttgctggctgtgctggggtgagggctgtgtgctggagggagcccctgcatggggcacggtgggcttcctgcaggtctccctgcaggctcagggttggctgcgccgcacctggctcctggtgcacccgtgagcatccctgtgtgtgtctgctggccaggctgggtagggccactgcacctgagggctgagctgaggtctcatcggtcacagcaccctgggccctgacgctggtgcaggtggccaccctgtgagggggaggcacgaggtgtgaggggcacttgggtgtgtggggccttctggaaacacagagaccctcgtgcacttggccagagccgctggctcctaccagcagggtgggcaccgggcaggcctgggcatagggagtcctcttggcaccttggaggctgcatgatggcgggggacccttgttcaaataagatgtcaaccctgagcgtcaggtcaggcccatccctcctgagctgagggacggtgcattggggcccagccagcactgtgggccagcctgtctcggaggcagaggttcttgatttctgagtgtttgggtcctgcgtgtgatcagagggcctcctttcccagttggggttccccggtttccccagggcagctgtggcacaagagtgcagctcttgggtggctcctccctgggaagggtctcagcagtggcttgcagacgtctgctgtgggtccccaggagggagcagaggctgctgggcaggcctggccctgctacagatgggcatcggtggcctccagctccctgtggcgggctcgtgctgtctgcacggcatcgtgcacactgaggaacagctgctcctcctcagccgtgtccccggggccctccccgaggaagcctcctctg

SEQ ID NO: 8033 - DNA, 1840 bp, Artificial sequence
  DNA replication origin
tcgtgcagtgtgctgtgcgtccgggcgctggtgcaggacctgctccccgccacgcgctggctgcgtcagtaccgcccgcgggagtacctggcaggcgacgtcatgtctgggctggtcatcggcatcatcctggtgccgcaggccatcgcctactcattgctggccgggctgcagcccatctacagcctctatacgtccttcttcgccaacctcatctacttcctcatgggcacctcacggcatgtctccgtgggcatcttcagcctgctttgcctcatggtggggcaggtggtggaccgggagctccagctggccggctttgacccctcccaggacggcctgcagcccggagccaacagcagcaccctcaacggctcggctgccatgctggactgcgggcgtgactgctacgccatccgtgtcgccaccgccctcacgctgatgaccgggctttaccaggtgaggagccctgcttgggcacagggaggggcccagggcacccccccttaggttttggccatccacgagggcaaggctgggggcaagcacagggttggcagaggaggtgctggcccaagacagcaaggcttgggcagagctggggcgtgccggggcatcccagggcgaggcaccgacgcggagaggctgtggatgcaggaggggaggggcacggggagccagtccggtgggccatggccttggtggggaccagcaggccaggtgtggctgtggctcagtggtgctggactgaggccatgtggcctcccaggccttctgtcctaggtggagtgggggatggcctccccacccccgaaggtctcctgccttggcctgtccaccttggcccccgttggctccacatctgcatggggggcagtgggcaccatgtgtaggaagcagcaggaaggggttgccttctgataccagaggtcttaattctgaaataaaacgggctgctgcacgtgacaagggttagacgtgtctatggccagctgtgtgcacgtgtgatgctcacgtggatgtcacagttgtctgcgggcatgagcacgcgtggaaccagaactcaggcccgtgtgaggagtctggtttggaacacacggggccgcaacacagaattgtcaggtcctgtgccgtgaccaccacccctcgggccatgccaggtgctggtgaggggcaggtggctcccgccaggcgcctgctggcctgaccgcactccgtccacaggtcctcatgggcgtcctccggctgggcttcgtgtccgcctacctctcacagccactgctcgatggctttgccatgggggcctccgtgaccatcctgacctcgcagctcaaacacctgctgggcgtgcggatcccgcggcaccaggggcccggcatggtggtcctcacatggctgagcctgctgcgcggcgccgggcaggccaacgtgtgcgacgtggtcaccagcacggtgtgcctggcggtgctgctagccgcgaaggagctctcagaccgctaccgacaccgcctgagggtgccgctgcccacggagctgctggtcatcgtggtggccacactcgtgtcgcacttcgggcagctccacaagcgctttggctcgagcgtggctggcgacatccccacgggtttcatgccccctcaggtcccagagcccaggctgatgcagcgtgtggctttggatgccgtggccctggccctcgtggctgccgccttctccatctcgctggcggagatgttcgcccgcagtcacggctactctgtgcgtgccaaccaggagctgctggctgtgggctgctgcaacgtgctacccgccttcctccactgcttcgccaccagcgccg

SEQ ID NO: 8034 - DNA, 884 bp, Artificial sequence
  DNA replication origin
agccaataggccggagctgagcctggacagggtgccgccacgccgcccctcagcactgctggcctcagcacaccccatggcatgggcttggtgtcgtaatcccatctcacctcacgatggattctggatccagcagggcccagcgtccatccataccgggcagggggctggggcccgcgctgccaggagaaggcccagcaccaatccccggccctgggtgggcgaggggtccgccccaaggggcccgttgctgccggggaccttgtcgtttggccctggatccgggggctcctgtgaccatgccctcttctcggccgcaggtcggccacgggacctgacgcaacaggatggacgagtcccctgagcctctgcagcagggcagagggccggtgccggtccgacggcagcgcccagcaccccggggtctgcgtgagatgctgaaggccaggctgtggtgcagctgctcgtgcagtgtgctgtgcgtccgggcgctggtgcaggacctgctccccgccacgcgctggctgcgtcagtaccgcccgcgggagtacctggcaggcgacgtcatgtctgggctggtcatcggcatcatcctggtgccgcaggccatcgcctactcattgctggccgggctgcagcccatctacagcctctatacgtccttcttcgccaacctcatctacttcctcatgggcacctcacggcatgtctccgtgggcatcttcagcctgctttgcctcatggtggggcaggtggtggaccgggagctccagctggccggctttgacccctcccaggacggcctgcagcccggagccaacagcagcaccctcaacggctcggctgccatgctggactgcgggcgtgactgctacgccatccgt

SEQ ID NO: 8035 - DNA, 1811 bp, Artificial sequence
  DNA replication origin
tacctgtgctcagcccctgagcccccgcctcccgctggtccctaagcccccccggcagggccgcagagccacagctgcagcggctcctgggaggctgggagctcctcagaggcccacacagctctaactcctacaagcccctgattacagttcaactcccggatcagccgatcaggtaacatggctggagaaacccatgactcagcaatctgtaggtaaataattgaactacagagtccagggcacagaccactgcctgcaggttggcgccaccacccccactctccccgctgctcgcgggagccagagggccctgcggtcctcggtggtcttgccagcccctcgtcatcccagggccctccgcgcctgtgaggactccctcaggtaagaaccatcctgggcccagatctcagctgcagcagaggggggcgtgggagccgaggccagaaatgccctggactcgtggtttcttaggggcaccctcaggctcaaggcaggtggccctactgtccccattccacacacctggaccccaggggcttggggtgggcttcagggcatccagggacccagtgtggtggggtcttccagggaaggggacacaactcttgcaatgttgcctgagggccaggacccccgctctgtgccccaggggtgctgtgcccagcctgcatgtgtcaacctaccaggctgggctcactgccccaacacacccgccaggagactggagctcgcacaccctgggccagcgtgcaaacagcaggctcagcccaggctccagggtgtcctgggcacctggtgtcctgggagcaaagtctttgcctaacgtcgctgagaagaatgtttaaagtgaaagtacattggagtctgcaaacaggacagacccgaggcctcacgtgggaccagtcaggcctctaagcaccgcctccctaacgccacggtgttttccgagatcaagggaaaggtcaggtgcccttccggctctgccggcccagggtgactgtgtgcagcgggctgggccctctcggtgctgcctcgggacagtgtgtcatggccgttccacagtgagctggtgcagcctgggaaaaagggcgcctcacgtcccagaactgtctgggcaggggagacagacgccagtcaccctcctcccctcccagctggccctgatggggcccccgtccaggcatattctcagaattctgtcccaagtccaggcggatgggctaggctagtgtctgagtgctgctcccccagcagacttggggtcccagtacccacaaagcttggcagggacataggaggcctcttcctgagacttccgccagccccaggacccacagggcaggtgacagaggggtgggtggaggtgtctccaggagagcaggcgatggtttggatgggggagggagggctctggtgtgggcatggggtggacagcaggaccgtttgccaacctggggagccagggaggtggacacggagcagctggactcaggcttgcctgcacctgtgtccagtgactgtgacattctgacggtaggcacatgtgcgtggtggcagcccagcctgttcctgccccgttggggaggtgagcttcaggaggctacagggtggttttcagccaggaaccgcagagccaataggccggagctgagcctggacagggtgccgccacgccgcccctcagcactgctggcctcagcacaccccatggcatgggcttggtgtcgtaatcccatctcacctcacgatggattctggatccagcagggcccagcgtccatccataccgggcagggggctggggcccg

SEQ ID NO: 8036 - DNA, 2234 bp, Artificial sequence
  DNA replication origin
ccagcctacaagtcttttttttttttttttgagatggagtctcgctctgttgcccaggctggagtgcagtggcacaatctcggctcactgcagcctctgcctcccgggttcaagcgattctcctgcctcagccgcctgagtagttgggactacaggcgtgtgccaccacgcccggctaatttttgtatttttagtagagacagggtttcactatgttggtcaggctagtcttgaactcctgaccttgtgatccacccgcctcggcctcccaaagtgctgggattacaggcgtgagccaccgtgcccggccagttctgtctcaaaaaaaaaaaaaaaattccttgggagcctcaggtccccccgactttgacagtgagtactgggtgggagcctgcacggggcacctgtggccggagggtgagtgtaacgaggggctgcagccctcagtgctctcccatcccaagggaggccaggaggctgcggtgggtccctcgggtggggctggaaggccaacccggccctggcaccttgggcagcctgactctgtccggggaacagaagccacaggctctacttctcctgtccatgtgggattgaagccgagggtctcgcagaaccagctgatgtgccggggctccatttccccaagacgaggacactgacattgatggggcacagccccggagggaggagaccctggacactcaccccaccaaaggtacctccttgtggaagccgtctgccaagcgctgctagttccccacagccctgggtgagcccagggaagactgggctgcagtgcccccatttggaggtgaaatgggagtggaatgtagttgggatggccagagagtaggagacatcctaagtgtgagatgtggacagggctgaatgctccagggtctcgtaccccagagtgtgagatgcgggcagggctgaacgctctggggtctcgtacccctgagtgtgagattcgggcagagctgaacaggctccagggtctcatacccccatagcctccacctgggatgccctctccaagtctgatttctcctcgaagcccctgccctgtcctccagagtctgagcccttgcttccaccccagcccaacctgggccccagtggtccctgggaagcagctgtttgctcagcagttgggagctgtgctgtaagaagcggttggccagtgggtggggtaaggcagtcacgcagggcctcaggtccctccctgggacagataagggcccctctgggtgcagccaccagcagggttgttggagaactggggagacccagggggctggggttgttccctcaaggtctccctaaaggaggcagggaggacctgggtgctacagcaggggtggggcacctggtgcagacgcctgcatgcagggtggggtgggcagtgccacctggggccacagaaaaacctggagtgggaggtggcccttcccccctcaggaaaggtggtggaggtttccagaggctggcttatggggacctgtggtgaggttttaggcaggtgagcgtagttcaggaacagcctcagccgcactgcaggggcctggcctcaggtcttctgcaggcattgggccttatgcccttttagtccccacctaggctgggtgtctaaagtaggtgaggtcatcactgcaggatccttggggcctgacctgccccctcccacgtgtctctgcctcagtttctctgagcattgaggcagtggctggtgctgtcctgtggccaggcccagaggctgagtgcccagggggtccaggggccttgctggccagagagagtgggtagcccattctaccccgagcctgtgcacgcgcagggctgccaacacctccttccttccccgcttggcccacgcaggacagggggcgtgggggccccagcaactgggacctgcctgaatccgcctccctcctgaacccccctcccgcctgaacccctggccagtcttgtgtcacacgcttacttccttagttttgtctttaaatcagccgttttacattggagtccatttactgggaaaggagaccttgcatccttgcctcccacccgtgggaagaagcccggccgacagggctttgagaccggacccgagtttattcccagagaccctcccgcgggtgggcgagctccgaggtctggagaagaggaggccccggcccgcaccctctagcacctgtgtccccttcgtcccggccacagatgcaggttct

SEQ ID NO: 8037 - DNA, 1512 bp, Artificial sequence
  DNA replication origin
gcagctggtgggcctgagacagaataagggtggatatcatgggatatgaggctccatggggctctggaagtgactgctttgaggatgggaccctgacccagagcgaaacaaggatccctttcaaggttctgagctgagcagtgccagggcatttttcttttttcttttttttttttttgagacagagtctcactctgttgcccagcctggggtgcagtggcgcgatctcggctcactgcaagctccccctcccgggttcacaccattctcctgcctcagcctcctgagtagctgggactacaggcgcccgccaccacgcccggctaatttttttgtatttttagtagagacggagtttcaccatgttagccaggatggtttccatttcctgacctcgtgatccgcccaccttggcttccagagcatttttcaaggatccctctggcagctcactggagtcagggtgggagctggaagactggctgggggccatgggggttgcccagagaggtatggtgcccagactgggtggtggctgtgcaggctgtgagcagagggactgatgaggtttgaggtgagctggggggtgaggtggggggtcggggggtcgtacagggcaactgtggatttcagcttgggcagctaggcgggtggatgagcttggagtgagactggtctcggttttggccatgtggagttggacatctgagggtgaactgagtgaggagattggtgtgcaagggtctggagttgtgagtgatgcttctggcctgagggaaagggaatggggtgaatggaatagcagccagccttgagcctggagtgagaagcagagaccaggctggccagggtctgagggcttcctgcggacgccacgcaggtgagcacagctgcccgtggggcagtgcacctcctgtggcagctggctttgtgccgcatctgcagtggtgggggatggggttaccaccatggaccggaatctggccctatacagctccccgtctgtcagtctccccatgccacagcacccccagctccacagcaaaggtctggacacctcaacgcctcccttctggtcctcccatggtgtacaagatcaaggcagagccttggcaggagtctacagcctttgggtgtgggctcctgctccgccccgcctctgctggtccccacctgctcctgtaccccgggctgggtgtccagcaggagcagcaggagtccctggggtccaccccacccggcccctaccacctctcctcccctccatccaaaggacacactggtagcaaagaagtataacttaagaggcacttggataagaattaaatgcccagaaggtgcattccaaagtcccacggagttggagtagcggggcacggtgacctggaggaaagtgaagacccagctgggcttcaggttttctctgcagaaccccaaggcgatagcccggcagcccctgaccctagcggggggagccccagcatcagagatgtccctggcctgacacccaag

SEQ ID NO: 8038 - DNA, 977 bp, Artificial sequence
  DNA replication origin
ttcccatgaggcctgcattccgaggggacaggcgtcgtcaagggtgaagggggccgccctgccactgcacttgccgatggggctgaattcccacgaggcctgcattccgaggggacaggcgtcgtcaagggagaagggggccgccctgccactgcacttgcagatggggctgaattcccacgaggcctgcattccgaggggacaggcgtcctcaagggagaagggggccgccctgccactgcacttgcagatgggctgaattcccacgaggcctgcattacgaggggacaggcgtcctcaagggagaagggggccgccctgccactgcacttgcagatgggctgaattcccacgaggcctgcattacgaggggacaggcgtcctcaagggagaagggggccgccctgccactgcacttgcagatgggctgaattcccacgaggcctgcattccaaggggacaggcgtcgtcaagggggaagggggccgccctgccactgcacttgcggatgggctgaattcccacgaggcctgcattccgaggggacaggcgtcgtcagggaatgggaatctttggtgaaggggatacgacagggagtgaggagcctgatggtcagcgagggacctctctgaggagacacctaaggctaccatgcaacgggaccagccagcaggaagacatccaggcagcagatggcatcgccagtgcaaaggctctggaacaggaatgcacacatgacaatcaggcagcagggaggcagctggtgggcctgagacagaataagggtggatatcatgggatatgaggctccatggggctctggaagtgactgctttgaggatgggaccctgacccagagcgaaacaaggatccctttcaaggttctgagctgagcagtgccagggcatttttcttttttcttttttttttttttgagacagagtctcactctgttgcccagcctggggtgcagtggc

SEQ ID NO: 8039 - DNA, 2545 bp, Artificial sequence
  DNA replication origin
gcgcgcggctggaggaagtgcgctccccgcagcggggccttcgcaggagccgctccccagcctggagggccctggccggcccaccccagcggccccggctcacccagcagcgccagcagccccatggccgtgagcaccggcttgcgcaacagctgcacgtgcggcgggcgggtgttgttgacctggaagcgcgcggtgagcgtgcgctgcgcgaaggggtgcgggtggtagctcaggaaggcattgtcgttgctcaggagcgcgtaggggaaggcggaggtggtgttggccagtagcaggttctgatgctgcgcgatgacctgcgggtgtccagggcagctgggaccgggtggcgcggccaccgctcgcctgtcccgtctcgggaggaaggtggccggggggcgcgcagggcgttgggccggcccaccttcaccaccatggccgcgtaggtcacgtccgccctccacggctgtggcagggaccagcccaccagcgggtccgcctcgtcgttgtaaatgggggtgtccgcgaacttggggaagagctgccggatctgctgcgcgacgaccttctcctgctccaggatggagatggagctgcgcgcaccctgcgggcggggccgcctcagcaccaccagggtcagcgcggcccggggcacagcggctgagggcgcagaacaccggggcggacggaggggcagggcgcaccttcctgtggagggagatgtagtccagccgcacgcccgcctccccagtgaagaagttggtaccgtcgtggcagtggcgcaggaggccccagctcagcggggatcgcggtggggtgtggaaggagtcgccggggcctcccagccgcagggcggggctggcggcgcgcagaccctccgagcaggcatcgtagtagttcaggaagcctgggccgggggagcactgcgtctacacctgccctggggatgagcggcttagcctctgctcctgccttcctctgccccctttcagccgggcaggaccccaggaagcggtgcacaccttgcatggtcatggagacgttgtcaaagtcgtggtggtctggctcattccacgtctcgaagttccacttggaaacatgcgccagtccgtacctacctgcagaggagccttgctgtccccccagcacaggtgaatctcgcctcagtgactcccacggagggagggtgcaaggtgatgaagggcgtctgactcaagatgaaccccatctccatgcaggccagcctcccgccccacatcaggaagcgctggctcaagggggtccaagacctgggcggcggcctgggtgataggggtgcggcctgggtgataggggtgcagcctgcccaggagtaccccccaccccaggggcccagggccttcgcccacccaccaagcccaggagtaccccccagcctggggccccagggcctgcgccgaccaccaacctatcccttgtcacccccatccccccacaagggcctgcgcctgcccaccaatgtatctcctgaccaggcagcagcctgcgtgataggggtgcaacctgcccaggagtacccccgccccggccagggccccagggcctgcgctcgcccaccgatgtatctcctggccaggctggagaccaagtccttccactcaaacacctgctgcttgtcctcaaagtcagtgaagtggcccgaggcgctgcccatcagctcaaaccctggaacacaggagggctgccccaccgcccaccacacaccacacccatgctctgccaggcctgtgctccggcaccaaggccagccctgaatggacatccaaggactcagaggggctgggtgagggagagggtgggcagggcaagggggtgcaggcgggctgggagggcagagcccacagctcacctgggaggagctggttctccctgagaaggtccaggtacccgtccaggtgggtgaagttgtagctcaggccccgtccagtggaccccctgcagaaggacggtcagcgtcaggaagcagggtgcccacacagctccatgctccaggctggaaccgtggccacaacggagcatgtgggagcctgcaaggtgccacacaggactccgatcccggcttcccgaggggcccttccccttggaaaataaccctatgaaggcctggtatgaactagagtatctgtacatggagaccccccaaccctacaccatcaagagatggaaaacttggggtgggggttcggaatggctctgaggctcagtggcacgaggcaggccagtcgcgagcagcaggggccaggggtcaggagccaggcaggacctggtggacacctcaccctggttctctgcacctcctggaggcccaggagtgccccatttcccctcccacaccccaagaggcaacatgagtgcacaggaaagggagaagggggccaccctgccactgcacttgcagatgggctgaattcccatgaggcctgcattccgaggggacaggcgtcgtcaagggtgaagggggccgccctgccactgcacttgccgatggggctgaattcccacg

SEQ ID NO: 8040 - DNA, 1372 bp, Artificial sequence
  DNA replication origin
cctcctgggtcgcacaggcgtgaccccatcccaccctccaccgtgctggggtacgggagtcttccctcatgcagcctcagctccccgctctgcagaacaagtaagaaagcaagggactggcacgccgcctcaccaggggtgatctcggaaacccctgggtgggcagggccgagctggctcgccagcctgacccaggggctcaacacacttccagtccaggcttgggggtggtctgagtgggagcgagggggaaagaggcctcgctccagctgggtcctcatcagccaccggggtttacccttggaggctgccctggaatgtgcccagggccaagccacagagcctcaacccgagactgacctgtgcaaagccgctttaaagggggcgttggtaccaagatataaaagaaaataataaaatataaaaatatattgcaaagggggtgatgggagggcagcatgggcacagtgcagccccagctcgctgactgccggtggaggtgcaacccactggggctcagcacaggctcatggattgcccggggatgggggccctcttggcacagggacctccaggtacggcacagggtccgagaaggggcctggtcgggcccagtagtccagggctcgaactcggtaggagccagagacagcacctgtgtctggagacaaggggacatgtgtgccaaccggaacctgcccccacccgaaagccccctgaccccaggcttctcgaggcccccacccagtactgccctgaggcccaagaatggggtggccgagtccagggcagcgggtggtgggcgcacctgggctgaacacaaagaggttgaaggtcgatggcttcctgctgaccggggtgtacgccttaccgtcctgagagaactggatctcgtatgtccacaggcacctggggaggtcaggccaagaacaaggctggggtcaagacagtcctcaaaggtgggagcaggcagggcacggccgcgtggacccacagcctcattccctcaagcccctcggcggcacctccccagcccctgggcactcttcctgcccaggcaggagagggctggagcccgaatgtccatctcatgtcccctaggagaacccacaccccactggcagggcctggcgcgtggcccacagtgtgtggggtgaagggcagggacgcagggcggcgagggagggagccgatgggccacggcaagtggcccgagtgaccgcatgggtgaaggggtcgggacccagggacctgcctaggaccaggcagagggaggggcggccccactcacgcacttggagcccacgtgttcatccgaccagaccagaaccagctgcccttgggtcaggggcagggcgcggagccgcgtgac

SEQ ID NO: 8041 - DNA, 2262 bp, Artificial sequence
  DNA replication origin
gggagggggcggggcctggccgggcgggggcggggcccgggcctcccgcgccggcacgcgctgccctctggcggtggcggcggcgccggcgcggcagctcccgaggcgtttttcctcgtctcctcgccccgccccgccccgccccgccccgccccgcccgccacgtcccagcccgcggccggcccaggccccgtcctcaggcagccccccgcccctcgcccacccccggaacagggactgggccctccccgctcccacggcccttcgggtcaggcagcgcggagccgaggggccggcgcaagcacgtcctgccccttaaaactgaaacggggcggtcagccaccctcggggtctcaggccccatcctcagccaaccccatggggtgaccgcgggaagacaggttcttgtagccacctacccagccccggtgagccccaggcgcgcaggttcgctagcacggatcctcgcttgcccgcgacagcacctgccccggggcagaagaggcaggactgggggagagccgggcaggcctcacagaggcggcatctcaggaacagcaggtgtagggactgacaaggacaggcgggtggaggaggcttggcagagaatggagatgcagtaacagtgacttacacactctcagctgcagcaaccaaaaaaataggtgtgaaaacagcacgtaaggcactgggctcacgaaaccgaggaccgtggtgctggagagaggggaagcgacccggcagcgaggacagtcccgcccactgcccaggccggtgcagagaaaacccaggcagccaccggcgtctccctcaactgggaagacagaggtggccaggcaggggctggagttcacaggtgctccagagtgctggagaggagggggctgcaccgagaagcccagacacccacagagggtctgcctggaggcttcagctaagcacagatcagtgcaggagcgtgaagaaaacactcaaggccagggaaagacccacccaggatcagagcccatgcagggctgggaatagtgcctgtgctcagcagccagagtggggaagcatcgttagagcaggaagaagttctcaccccgtagtagggaagcatcaacacgagactaaatacagttcaggtcccaccaaacaccactgaataagaagacccagagccagatgtgggggctcacacctgtaatcccagaactttgggaagccaaggcaggcagaccagttgagcccaggaggtcgagactagcctgagcaacacggtgaaaccccatctctacaaaaatccaaaaagtcgccaatgtggtgatgcgtgcctgtggccccagctattggggaggctgaggtgggagaatcacttgagcccagggggccgagactgcagagagccaagatcacaccactacactccagcccgtgcgacacagtgagaccctgcctgaaaaaaaaggaccacacagtttccaagtaacttgatcacattcgagaaacaaatgcaaagatatgtataggtttacaaaaatatccagcaccaaacaaggtagaatacaaaatattgaatatccgggaaaaacaaaaaacaaaaaaacaggcatgaaaagaggcaggacattatgacccatatggagagatgggaaaaatcaatcaaaattgacctggggccgggcacagtggctcacgcctgtaatcccagcactctgggaggccgaggagggcgaatcacttcagaccagaagttcacaaccagcctggacaacatggtgaaaccccatctctactaaaaataaaaaaactagccaggcgtggtggcaggcaacctgtagccccagttactcagaaggctgaggcaggagaatcacttgaatccgggaggtggaggttgtagtaactgacctggaaatgacaaaggtgacagggcaagtagaggagagcacacacatgcttatgctgtgaccatgttccatatgttcaagatgctggaggtgacagggcaagtagaggacagcacacacatgcttatgctgtgaccatgttccatatgttcaagatgctggaggtgacagggcaagtagaggacagcacacacatgcttatgctgtgaccatgttccatatgttcaagatgctggaggtgacagggcaagtagaggacagcacacacatgcttatgctgtgaccatgttccatatgttcaagatgctggaggaaaggaaagacaatatgttaagtaaagacggggaaaaaagcctcaaatcgtacttct

SEQ ID NO: 8042 - DNA, 1159 bp, Artificial sequence
  DNA replication origin
gcccctggccccgccccccgtcccggccccgcccgccaggggccgcgacgctgcccgtgcccctcccactgcccgctcattcgggggccggcacctgccggcctgtccgctccctgcttatactttgcacgctcgcagccacgtttccgcacacctgtcccctttccacgcacctgtgtccggcagcccgcacatctgtgggagcgctgcctcctcgccagctgtccgggaagttcagcgccgctctcccacgggcgtgagaccgccccacccacctgtccgtgactgcagctccggccgggagggcggcaggtgggccccggcgctgctggctccttgtgggacagggccgcggcggcggcgcaggacgttctcccgccgggaggaccacgcggcggtccctggacccttccccgggtgcacagcggcggctgcgccagcgggggcaggatgggccgtccgagcgcacctccatccgccctcgcgacgcccacgctggcccagacgcgggatttggggtggaggacgctgggctgggaaccagcaccttgggacggccgggtagttcgggccttgaggagtcccacaccctgacagctggcgccccccacgccccgcctagctctcctcggcctggggacaccggctgccaggcctctccagtttcagcctttcctgggaggacttcctggaagagggggcttcaggccccagaaagagaggctgctctgggggatggaggaggtgctgggatggtgactccgcggagtcgagggtgtgaggcgggatgtgggcaggccgtgaggtttgtgttgcaagactgggaggcaggatgaggggaggccatggggcggctggaggtgcggcctgggagccctgcgtgctgggccctgggcagggacggcaggcgaggcgtgtggaggaagagccgcgaagagctgggcgctgtcttctccacgcctccgtttcttcatctgctcctggggccgcctgcccggtagcggagattgaatcgcatgttgacgtctattacgatgattaatgttcttgtcattcccgtcactagcaggtgagaggctgggaggcctcaggtgggaacatacctttggccaaaggcaccaggtaacccgaacgccccggggaggacccctgcctgcat

SEQ ID NO: 8043 - DNA, 891 bp, Artificial sequence
  DNA replication origin
tttcagtcccagacaccaagtatattaccaatatctcccatagcccatcctgccttccgtgggggtctctgcaggttcccagagtccttatcgggtccactgtggccacaaaccgcccactccccaagaatccacaggtgattagctgccctggactgcaggtacgagtatgaaagtgtttgcaagaccaggagcatgtcctggggagccaggactaaagcccacctggccagcaagcacgcatgaggggaacccctccagccagctaggggagccccggtgggtgctgtggacagcccatgggtgagggggccctggaaggaagggggcctggcgagcggggcggcaggggcggggcatggcgcgtgccaggcgggcactgtggcagggttcagggccgggcgggaagggggcggcgctggcggaggccaggctggccgggctgggcgccagaactcacctcgggcggcggcggccggcgggaaggcccccagcagcagcggcggcagcaggagcagcaacagggggctcggcgtcatctcggcctgtccggacctggggacattgggggcgccgtcactaacacgtggaactgggagataccgccctccccggtcccgggccgcggggatcaggggtctggccgccctccccacaggccctccccgcccgcgctccaggcggaggaagccgcagcggggagaagctgtgggtatcaaaggcagacaaagggtttacactaattaccgggctcccccgccgccccccctctccaaacaccgtctggattcctggcgcttgtaactccggccctgcccgcaggacacacaacactcagcgccccgcagataatcgcctgcgccattagcggacaaatttgcgctggggggg

SEQ ID NO: 8044 - DNA, 825 bp, Artificial sequence
  DNA replication origin
ttcgcacccctcccctgccgcccagcaagcgcgccgcatccaacctggccttatatgggcacgttcgggtgctgggtggcgggcggtgaccaggtgggccttatgccacagcacccccccctaccccccgcctgcccacatgggcctggctgagcggctgctctgagggcccggcagcgtcctgggctgtgtgggcactcaggccatactgggcgagcccctaccatggccagcggcctggacttgcattctctttgatctgtttggcctccccaatccctacacctgcctgtcctctggccactcggccagggaggctctggaggcctctgtcctgccatgtttcctggctggggctgaagctgactggtggatggccacggtcagccatggcagtgggcggcagagcccgcctcttcgtggagacgccccagcggccacccccttcgccttcgtcctcctcagctgcggccttggggctgaggatatccagccctggctttgcgtggcaaaggccctggcggcactggggagctgggatcaagctgctttccaagggcaggggcctctgtggtttgggtggaggtggggaggaggttcttccggactgtgctgattttcctagcgtggactagggcgcgaggtccatccaagtgtgtttctcctgctctgaacagcccactgtgcaccttcgttaggccaaggaccagcatgcagagggcttgggttatttttgaaaagccatttcccgctgggtcataagttctggaatcggcacatcgctacactcagatcatattttaaaagttcctcttttcccaaact

SEQ ID NO: 8045 - DNA, 947 bp, Artificial sequence
  DNA replication origin
gctccctttcagccgcaggccccgcgctgcggccctgtcaggggaaatgttggtttttccccagtcgtggcctccagcccctggcttgcccagccctggcttgcccagccctggctcaggaactgcggccgtgctgggagaggcgggctgtgcccgcagactggaccccggctgctgcatgctggccctctgtgcggcccgggcttgctgctcggcccagggtggactcctttgccccatcagggcctccgccagtgactccaggcctggtgtgtccaggtgacagcctcagcgggtcagcacaggagggagagggatacccacacccctctccccagaggccccctccagggctgcactccctgcctgcctgccactctccctggcggccatccctggagctgctggtcaagccccagggtgcctggctgccctctgcaggcggctccaaggtgggccgcagccccagagccatgatccaggatggctggggcaggggtgaagcaggggatgggagaggaggggcttcacgggccaaggcatacctagcaggagaggtgggtaccagtccccttggagcaagtcagcgtgggtgggggtctccttccaggtcattgcccctgtgtggggcaggggggtgctgcccatcttggcagaaggctcaattacttcttgcctggtgctgttaaggggctgaggggtgaacattggctgagcagtgacaggaaagagggagccgggctgttgcccttgtgtgtggcgtggggcccgctgggcacggtgacaccctctgggcttctaagactgagccccaggacagcctggtggccccgtggagagcttgggttccttgtccaggcccaccagccagtggcttcaaggccctctacactccctgtagccttcctgccctgttcccagtggtgactgcagggcttggtgtggag

SEQ ID NO: 8046 - DNA, 931 bp, Artificial sequence
  DNA replication origin
tggccccgtggagagcttgggttccttgtccaggcccaccagccagtggcttcaaggccctctacactccctgtagccttcctgccctgttcccagtggtgactgcagggcttggtgtggagcgcagtaccatgcaccagggtgcctgacgcaggcatcactgtgtgtcctggagggtctgggcggctgtgccctgtggcctgcaggggcctggggagctgcagcggacaggcccggtgccctcctgtccccagctctgtccttgagaagtccgccatgtgagtgggagcaagggcccctgacctggtggtgcccggtgtgcctgggctgctccgtggttggggcagccccacctgggggccaagagccctggcaggggacagagcatcagctcacccctgatctctggcctcaggggttctgggctcaggaaatgttcttgttgatgcttctgaagtggggaagggctgccaaggtctgcaggcagagcccctctggggagttccgggcaggggaggcctggggactgcagcccggcaggctggggttttgaggtgggggtgggggccacgtgaagctgggtgggcctggtgaggtctggactgggatgggtacggaggaatctttgcctgttttagtgctgtacaaggttctctccagggcgtgggactgcctgatgatgctctggtgcccgctgtgtgccctggtgtgtcgaggagggggagcagtgccctggggctggggttgcagaaggttcccccgaatgcttccagggctgggcagcatggtgggccacatgctgcatgcagcttgctggggcacagcctgtggggtagccacctgtgctgcaggcccccagttcccccgcacgtcctgtgggtctgctccccgagggccgcctcgctagctggtgactgtgtgtgccctgggt

SEQ ID NO: 8047 - DNA, 1118 bp, Artificial sequence
  DNA replication origin
gggcggggtggggacccaggcaggggatggggcggggtggggacccaggcagggaatgggggtggggtggggacccaggcagggaatggggtggggacccaggcaggggaaggggtgaggtggggacccagacagggggtggggtgggatggggacccaggcaggggatggggtggggcggggacccaggcaggggatggggtgggttcctttctgccaggaaaggaggcctctgccaggaaaggagggctcggcttctccacatagggtgggatggtgcaggtggccatgtggagccgcagcctttctgctcctgtgggtttcacaggtggtgggaggacatactggctgccccccagacaggagcggcagtgcccgtggtcagcccgagctacgtctctccagaggcttgctctctgaccccagggccttggggtcatgccccctcaaggctaaggtgcctggcagggtacggcccttgggggtgggcagacagacctgggcatctgtggtccctgaactcaggtctgatattgacacagacgtgggtgctgcacagactctcatccacacattgcacaggctcaggcagcccgccgtgctcggttgcttgtggatagctgtggggtcgctggcccatgcccaggcccggctgggccctgggctgatggttgggtgggaattaggtgaggggcctggggcctctttgggacccaccaggccccccatccccctactgcccttgtccttggggggccactgtcccctctgacctcgggtgtacggctgcttcctgtatgaccagaaggagactctgcccttttggttggtggttttcgagagttaccaagcgcagctgttttgcatcctctggggaccctgctcccttctcgtgtctcaaagagccagcctctggggccacggggctgccccggccatgagaggctgctgacgtggtgtttgctgggccagtgctcagggctttggtgcatgtgggcagctgaggcctgggtcaggggcactgcacctcggcccctctgctcatcttgggcaggtgacccaggtggagctcaggcccgaggtctgtgctgggccgtgggtccccttttgaccgcccc

SEQ ID NO: 8048 - DNA, 1105 bp, Artificial sequence
  DNA replication origin
gttttcgagagttaccaagcgcagctgttttgcatcctctggggaccctgctcccttctcgtgtctcaaagagccagcctctggggccacggggctgccccggccatgagaggctgctgacgtggtgtttgctgggccagtgctcagggctttggtgcatgtgggcagctgaggcctgggtcaggggcactgcacctcggcccctctgctcatcttgggcaggtgacccaggtggagctcaggcccgaggtctgtgctgggccgtgggtccccttttgaccgcccccccggctccggaccccaagcccctcctcgctgactgttcctcggtcccacccgcaggccccccaaagatggcggacaaggtggtcccacggcaggtggcccggctgggccgcactgtgcggctgcagtgcccagtggagggggacccgccgccgctgaccatgtggaccaaggatggccgcaccatccacagcggctggagccgcttccgcgtgctgccgcaggggctgaaggtgaagcaggtggagcgggaggatgccggcgtgtacgtgtgcaaggccaccaacggcttcggcagcctgagcgtcaactacaccctcgtcgtgctgggttagtcgctgctgcggtcagaggtcatgggctgggttggagccaggcaggggtgtgcaggagggcggacggggacacacctggggcccgagagtcagccagcccccggcagaaagccttccttcggtgccctgccccacctcagctggctgcacctctgccaccatcccccaggtatcctgtcccgttcctgtccccgtcaggctccagcctcggagccttcctcccagcggagggcggagggtggagggcgggagccgaaggcagtggtcccacagaagggctggggcccgaggccttggcagggtgtgccggccgtcggctgtgactttgaggctcgggtttcggagttcagaggagccgccgggatgcgtggcctttctgttctcttctgcgcctggggcccgggcgctgggcttggacaggtgtccagagagacacgccctccatacctagggacccggcaccccgcctgctccgctgggctcct

SEQ ID NO: 8049 - DNA, 959 bp, Artificial sequence
  DNA replication origin
ggtgacgggggtggggggcgtccgtctgtcccggccccttggctgcatccccgtcctctgacctccacgccaccccaccccgcagcacgaccgcgcttcacacagccctccaagatgaggcgccgggtgatcgcacggcccgtgggtagctccgtgcggctcaagtgcgtggccagcgggcaccctcggcccgacatcacgtggatgaaggacgaccaggccttgacgcgcccagaggccgctgagcccaggaagaagaagtggacactgagcctgaagaacctgcggccggaggacagcggcaaatacacctgccgcgtgtcgaaccgcgcgggcgccatcaacgccacctacaaggtggatgtgatccgtgagtgtggccccgggcgctggcgggcggggggtgctggtgggcgggggcgctggcgggcgggggtgctggtgggcgggggcgctggtgggcgggggcactggcagggcttgggggtggtgggctgggggtgctggtgggcccagggtgctggcggggtagagtccggcgcggcccaggagccatgcccgcgtgccacgttcccacagagcggacccgttccaagcccgtgctcacaggcacgcaccccgtgaacacgacggtggacttcggggggaccacgtccttccagtgcaaggtgcgcagcgacgtgaagccggtgatccagtggctgaagcgcgtggagtacggcgccgagggccgccacaactccaccatcgatgtgggcggccagaagtttgtggtgctgcccacgggtgacgtgtggtcgcggcccgacggctcctacctcaataagctgctcatcacccgtgcccgccaggacgatgcgggcatgtacatctgccttggcgccaacaccatgggctacagcttccgcagcgccttcctcaccgtgctgccaggtgcgcggctgccacgccacgccaca

SEQ ID NO: 8050 - DNA, 761 bp, Artificial sequence
  DNA replication origin
catccaggcagtgtgtgtgtctgtgtgtgtgtgtccaggggctatgcctcacacacagactgcctggggtgctggccattcctcctcgccatgggtcccctgccttcgtctgcagctccgtcctccatcctcccagtctgcctgtctggccggcccccccgtgcccactgcagatacggtgccgtctagcactgatagtggatgtgctggtggaccttgccctccacgtgtgagtgtgtgtgagagtgtgtgtgtgtgtgtgtgtggatgtctgtgtagagtttggggtacaacttagggccagcaactgggcctgggcccagtaagtgctggggggctgccggagacccatgctcctcacacagccccacaccagggccagcgctgagggcggccaacgagggaaggtccttgtctccgctgcggtcgcgggccgtccccggcgggcggtgcccaggcaggggaggggcaggcgcgggggtgcacggcttcttctgggcctggcaaagccacaggagcagggtgcccaggatgaagacagcgccggctgggatgccgatgaccacgggccacggcaggctagtggccgaggacgaggaggccacaggtggccctggcggttttgggtctgcaagagcgagaggaaaggaggtagggaggggaacgccgacacaaagaccaggagagcaccccagacccatcccaggggctgtggagacggtgcccctgggctgccctccctcggcagatgacctggccag

SEQ ID NO: 8051 - DNA, 1785 bp, Artificial sequence
  DNA replication origin
gtagacatgggcagaaacaccagcctggagggaaaggatgcactttcatgtttaacaaaataaattaaatatacggggcttcagctcaaactctacataaaattacagagatctggggccaccacgacagtggggtggggggtggtgtctggcctggacggggtgtggtcatcagcatggctgaaagaccaggcgggtcccgggccccaggagagaccacagtccctgcaacccagtcttccttccatcattattaatattatcttcatttcttaaatataaataccaaggccccttctctgtgtcagggggagaatgcagtggggatgagccactagccatgggctccagcctctcaggcttggggctgctgtgcccccaaccccagcccacagcagtaggggactcctgggcacccaaggcaggtggcaaaaatagccgccaaggccaggggacagaggcggggatggaggcggggactgaggcggggacagaggcgggcagagttgggggagtgacggtggagcagggaaagtccctcatcaactatgagcctcacggcacacgtactgcaggcttcacggcacaccctcccaaaagcacgtcagtctgcgtgtgtccaggcagcatatctgcacctgtgtgtgcatgtgtgtccggaagtgtgtgcccaggcagcatatctgcatgtgtgcgtgcgtgtgtatccggacagcatatctgcacgtgtgtgcatgtccagacagcatatctgtgcacatgtgtgtgtccaggcaatatctgcacgtgtgtgagtgttgaggcagcattatctgtgtgtgtgtccaggcagcatatctgcgtgcgtgtgtgtgtccggacagcatatctgtgcatgcgtgtgtgtgtccggacagcatgtctgcgtgtgtgtgtgactagacagcatatctgcgtgtgtccaggcagcatatctgcgcctgtgcacgtgtgtctggaagtgtgtgtccaggcagcatatctgcatgtgtgtgcgtgtccagacagcatatctgtgcacacgtgtgtgtgtgtgtgtccaggcaatatccgtgcatgtgtgtgtcaaggcagcattatctgtgtgtccaggcagcatatctgtgcacgtgtgtgtccggataccatatctgcacgtgtgtgcgtccagacagcatatccgtgtgtgtgtgtgtgtccaggcagcacatctgcgcatgggtgtgcgtgtgtatgttcaggcagcatgtccttgtatgttctggcatgtctctgtgcgtgtgcgtgcatttgggcagcttatctgtgtgcccaggcggcatatctgtgcatgtgcgtgtgtgcgtacgtgtgccttcagggagcacgtgtgcgcgcatgtgtgtgcatacatgcatccaggcagtgtgtgtgtctgtgtgtgtgtgtccaggggctatgcctcacacacagactgcctggggtgctggccattcctcctcgccatgggtcccctgccttcgtctgcagctccgtcctccatcctcccagtctgcctgtctggccggcccccccgtgcccactgcagatacggtgccgtctagcactgatagtggatgtgctggtggaccttgccctccacgtgtgagtgtgtgtgagagtgtgtgtgtgtgtgtgtgtggatgtctgtgtagagtttggggtacaacttagggccagcaactgggcctgggcccagtaagtgctggggggctgccggagacccatgctcctcacacagccccacaccagggccagcgctgagggcgg

SEQ ID NO: 8052 - DNA, 1078 bp, Artificial sequence
  DNA replication origin
ggggcccacagagcggcacccccacctcccacaagccccacccggcccttcgagcctcctggccagtgagcctggggtgaagggctccccatctttcaggtgcttggccggagcagaccactgtcagaagcgcagtcctgccctctgtcctgctggccacactcacgccctgggcgcctctgcccgcctcctgcctcaagtcctcgaagcacacggggcctctgtgctcccaggcctcctgcacgtggaggggaggggaacgcaattttgttcttgggagtgtggacgtgcagatgtgacgagggagccggcgcagggcacagacgcgtgctgccgtgacggagatgcgggaaacggcatcgggatggccgtgtggctggtggggggacaggagccacggggacaggagtccacggggcagggccaggcaagagacagccaggaacacaggccaggcgtccacagggcagggccccggcaggctcaggctggagaccgccgaacagaggggcgtgggggcgggagcaaggctctcgggactggacggccaagggggaagggtctggaagtcgcaggggagaaagcaggggctccaggcagcccctgaggaaggctagggaaggactgaggggtctgagctccaggctattggcccgggggtggctggggccccataggcaggagatgggtctgtcctgactccttggggtccccctgcccagcctggcatccaacgtggccacagcatgacaaagtccagagcccaagacccagaggctaggctgtgccagacctgtccgttgaggaccacacagcactagtcagcacctcctgtgggcaggcgcaagatgggctggaccacaagtcaagggtggccctgagtgggggcctggacctcacagcaggcagggtgcaggcgtggggtctgcggtcccagtgtctccttcagaggctctaggggacagccctctcggactgcccatccctccgcccactccctggggaggggcagcctgtcctctgcaaccccatgacccgctgcctgaggcctccctgctgcccaaggtggccagacgcc

SEQ ID NO: 8053 - DNA, 1671 bp, Artificial sequence
  DNA replication origin
acagaatccatgtcggcctgcgtgcccaggagggcacatccagggctgccctgcggcagcccctggctccgggatcctagcagctgggccctgggctcccaggacggccgtgcccactctcttggccctgccttcctcaggggtctcagggcatctgaggtcttttcagggtccctgggtccctctgtggagagtggagcttcaccaccccttttgtcggctgtggccctggccaaatcaccagaggccaggactggtggccagacctcctgttaaagagaataaaatgacactctggccaccctccgagtcccggtctttctgctggacaccagggagttcctgctgcagtcgacacaccggcacggggagacaggtgggacctggcgtccgtcacagcatcctgcagggctggatgtccctgggcgcccactggtccccatctctcaggctgcaggagccccccaagtgccccagccccactgtactcaggactcatgctcccagcaggacccctgaattcggcccccaggcagaggccctgccgtgacccaggctgaggttcagggtgagggggccagagaggccaccttttgaccccaggttaagcactctctccaccgtgttgggtgctgcgtgccaagcctggccaccccagcactctgccatggggacaaggaagcctcagaacatggcagctgctccaggggcccccagccccaccctgcggccaccagccccccttctccccagtcactgaatcaaactgcctgagtgggtggcccctgcccctgcacagaccctcgagcccaggaacctgggtctgggggccttggagcccaggcaaggattgaagagagctggggtgccctggggggcttgaattaggaggacctctctctgccctggttgggctctagcaggtggagctggtgcttgaggacagagctgcccatggggtcaggactgctgaggagctgcatacagtcaggcagtgaccaggcgactggggaaggggctgaccaggaggaacagccccagtggagccagggcacaggtcacaaagaggctgcctgaccagcctgtgtggcgcgagggtggctctctgggtggcactgggggactgggggacaggggagcagcaggctttgcaggtgactagtgtagaacgggcatgatcgggacccacagagtggcaccctcacctcccacgtgtgtcaaagccggcctgggtcacgaggccagaggtgggcccagcccctagacccacctgggctcctgcccaaggctgcggaagggaatgggaaaccctcccatggggccaaggccgcctctgcttcaagagcccacagggagccccagccttggccacacccactcaggcccagcatgcagctgccagcacagtggcgggagccttccggggagacccacctgcatcccctcgctggccacactcctcccaaggcagaggcaagggagagacaggccgagcagaggaggccaacggtggcgagtgcggcccctgggcagagccggtgtttctcagggactggcgtctctcctcaggcactgcaatgcaaacctaaaattcatcggcaacccagagccctggaacacaggcctgggtcttgtgtggctgaggcccaggacccgccaggccccaccagc

SEQ ID NO: 8054 - DNA, 1599 bp, Artificial sequence
  DNA replication origin
ttcctgggtgtcggaagaccttcatctatgcccctgccctgtacccgctcagtgggctgagcacgggcagggtgtggttctgaggggcaaccccaccagcctgcttgggccccagcgtcttctcagcgtctgcctcctgtgaaaaccttccactcagtaaaggagcacagtaggttggttgccgggccaggctgggggcacagtggctgctgggggccgaggcggctcctggggtgtgtcctctgggaagatgctctctgcctcagggctgggcgcagccgtgtgccttgtacacgggcctcagatgtggtgggagagcgagggggagggaactttgggaccagctaggggcgagatgcccactccggggccccaggtgagggctgtgggaggaggagccgaggcagctgcagccccgcctgctctctgtggcagccgcatctggcccagccggcaggtggtgacagctgccagcagctggctgggcgagggctggcctgagtccggggtagcggtggaggcggggctgtgtgcccgggtcctccaggagcccctggagttacagtgggtaggcggtggtccagggaagggaggaccacctaccccaagccctgaaggacctttggagacagagagcagcccagagcatgggggaccggtgggaatctgccctgatgccatgtggggctggggactccaggatgctccgtctgcctctggggtctcctggtgtctgggggctcgcggtgtcgggggctcccctggtggggagtagagctgcagaggacagaagaatgagggtcgctggctagagttggggtcctagcctctccctaaggcgcaggtctttgctagaaagcagcggccccatggtggggccaggccaggtgggctgcagccaggaggccctgggacgaagaggccacaggcttgctggggagaactcagcagagcccaccctaaccttgactttcctggaagggtccagggtctccagcaagtagctcctcccacacctagactagggtgagagaggggtgcagggatcgggaccgtggcctcctcgtcctccagtccccacccacctgtgcccagctgcatctcagcagctgttttgggaccgcctacccgggttagccctggcgctggcttctccttggctgggatgcttcaccctcagcaccctggggaacaggtagggtgggtgggtttgtgcctggaaccccaggggtgcctggcttcaggcagcagcagctgtggagggtagaccgcctttgttgcggcaagaccagctggacccctctccggcccgactcctgggcacctgccatctgtgagcctccttgaggaatgggcatcgggccggacaccttctgtggtcccctcacaatgcagcctgcgcccggcctgggctctgaccctctgatgtgtggcagggaggtggagcatcccgagggtggccacccccattccctcctgaccccaggctgcagggagcaaggaccccagcctccatcctcattgtctggtgtggcctggtcagtgccctgagcagctccccacccatcgtgcacctgaaccaagtcctctggggccggg

SEQ ID NO: 8055 - DNA, 1101 bp, Artificial sequence
  DNA replication origin
gccccggctgggtccggctggctgggacgggacagagggagtcttctgctggggctggtgaggcctgaatcagccccgggggtgttggggtgggggtgtctcttgtacacgggtgtcagacccagacttccctgccaaaggctctgcccagatgagcctgctgtgaaatcggtgctccctgcccggccagctgggagctgcgtgcccagagctcagcacctcccagctcctctggtggaagaacagatggctagagcctgctcggggccatcccttgtgccccaggtcgttttggggcaggcttacctcaccggcacctcctggcccaaggccttggagcaccgttcccctgaccccgcgtctctcctcagagctgggttctgagtgtgggcgtccagccagccagggaccaggccttgctgggggcccaggcccacctgggacgggatggtgcttgccatggaggatggtgcttgcccgtggattgcctgtccacctccaagggcttgggtgggcttgcaaacagtggtgctcattaaatgcttggttggggccaggtgcggtggctcacacctgtaatcccagcactttgggaggccgaggcaggtggatcacaaggtcaggagattgagaccatcctggccaacatggtgaaaccccgtctctactaaaaatacaacaaattagccgggcatggtggcatgcgcctgtaattccagctactcgggaagctgaggtaagagaatcgcttgaacccagaaggtggacgttgcagtgagccgagatcgcgccactctactccagcctgggcgacagaggaagactccatctcaaaaaaaaaaagaaaaaaaagcttggtcggaggagctgctggacttacgctgttgaggcctgtggtgcagggcagtgttggtgaggcttggccactctcccctcctgggagcagaaacctgactccctttgacttccaaaagccaaccctgcacatgggcaccccagggacctggggtcagggaggcctggccacagagggacggcagagccactcattcctggcctggcatggtagacgggcagtggcagacattgccagacacaggg

SEQ ID NO: 8056 - DNA, 1424 bp, Artificial sequence
  DNA replication origin
ggcccacacggcagtcctgggagtcggacggcccctgtctgcccggcaccacttcgggaacatagtgacaacccccagcccccaacaggccccactgcccctcccagggccctccctttcagggtgggctgtatccagctgtccagtaggtccagcacaactgagggctgagcccagggcctacgcaggagcgcgtggctgccgacgggaaagtcaggtgtgccccccggggagtccaggcttccgtggggacctctgtctacagaggtcacagccaggcccctgcagccgagttggctgggaaggagctgaggccgagataaggatctggcccagcagggggggtgcagggaccacctttccgctgggcacaggggaggctgaaatgcctcctgagaagggcctcccagctgtccccgctcagccctgggccaggagacccctcgggtagcctgtggggtgtggggcccagggcagctgcctgccagggagcactgggacctgatccccagcccccgaattccctggccccggcctcaccagggaaggggtgtgaaggaaggggtgaggaagggggcagacagggtctcaatgcacaccccacacacacgagcacacactggtacccccatcggggcagagggtgggactctgaggtggccggggacacttccccgcagagctgcccggtgggggcccctggttgcccttttgcagcgaggatggagggacaggggagctgtgctgtgtgtggcaggcccctccgccacatctgagggccctggggaatggcaagaagagcagagccctccagaccaccaggctgggcactgtgttgaccctgccttccactgcagccaggaaagggctgggcccagaggggcgagagggcagaggaatgtgggctgccgagtggggagctgggtctgtgcggacctgcacctcagacccgcctgcagccagcactgggcgcacaagccgcggccacacgcaccctgcaggtctaggccaggccaatcccccatgggtgccccagcacagttacccaaaaggtcagcgcacggctggggcatggtagcggaggggcggggagggtggaggaggagtgagggccggggcagggaaagggagggccgggagggtgtggggtggagggaggggtgccagagcctcctggggtgggaggctgggtcacaggctgggggagcagctggggatggagcttcccgacccacacagttgggaccctcacccagggccaccctctcagggcccttagtgggcccagcactgtctcttcccctgggggtctccctgggcccaccccaccccaggccttgcatggctttccaaattccagaaccttccgtactcctggcaggatggccccggggctgtgctccaggacccacgtcccgatgcca

SEQ ID NO: 8057 - DNA, 1006 bp, Artificial sequence
  DNA replication origin
gtgggcacagcccctctgaggcgggaaggtcacagcggctgtcccagctgccccaggagtgtgggagcaacggggtcccaccatgtcgggtagcacctgggcccacagaccccagaggcaacctcactcctgctggcttcgtccagggtgtgtcggccatgggggccccgtggaggggaagggtctgccctgtggttgccgggttctctgtggcacctggggggcagaggggcctggctgtatgaggccaagcggcccttgatttgattgaacacccctgagacagagcctacccagccatggcggggggtcttcagggccttctgcctgccccttgcgcccttgtctgccctgggcagctgccctcagcctctcctgcacactggtctgaaggcttcaggtgtgtgggggggtggcgggtgctgggccggggccgcaggagctggccaggcttggccctgagtaaagccctggcccaggcgtggcggtggtggtgggggcgggcctctgtgtgagcgggagtggttctgggctcatgttacattttccactggaaaaacagccccattttgaatgttggctctgagcgttttaaaaattgcaaatatatccagtttcccaaacgagtgctcaccaggccaatgtggttgttcctgccggccctgtggagggtgggcacccggcccagtgggagtgaggggctgggggccttgggaggggagggttggtgctgcagttctggggagcagccctgttgtcacagcctagggacactgggcccctgccacctagatgggcaactggggcccaagcccaggtccagggaggtggggaaactgaggtccttgtggcctggagcctgtgggcctgtcactgaggaaccctcggtcctgaaatgggcagcacctggccatggcaggctgcagcccacaccgtggtcagggagcctggctgtaggaggcctcatctcccaggtgtgcccaggttctgcattcctgccgctccc

SEQ ID NO: 8058 - DNA, 1978 bp, Artificial sequence
  DNA replication origin
ggggaggccctgggctggggcggggggtgtccgtgagtcagcaagtgaccaagcaggggttgcatcacctcgatgactcgcacgcctccctgcagagggtcccgcggctgactcaggaaggggatgagtgatgggtgtgagtcatcactcgcggagccagtggtcactggaggcgtccaaacacagactctcagtgttggaattggcaggagctgtggggatggacacactcagtctgtggctgcagtcggggaaaccaacgccctgctccccatgcagcctgcacaccgcacccaggaagcctgcctctcctggacaaggtcctccacagctccctttgtcctcagtatgtggaccctttggggtgtggcccagcccctcctgaccccttagggcacaccccagccacaaagcaccacacgcggccacccaggtctcaggcagcctgggaaatgtgtctgtgcatcactgctctgtgccagtggacacgtgtgtgcgcgtgcatgttggtgtgcagatgtgtgtatgcatgcatatgtgtgcatgtaggtgtgtacatgtatgtgtgcgtgtaggtgtatgtaggtggtgtatgtaggtgtgtgtatgtgtatgtgtatatatgtgtgcacgcatgtatatggggtgtgcatgtgggtgtatatgtgtgcctgtgggtgcatgtaagggtgggtgtgtgtatgtcagtgtgcaggggtggggggtgtgcatgtgtgttgtgtgcgggggtgggtgggtacgcgtgtgtgggtaggtgtgcggtggtgggtgtgtgtgtcagtgtgtgggtgtgggtgtgtgggtgtgtgtgtgtcagtgtgcaggggttgggggtgtgcatgtgtgtgtcagtgtgcaggggtgggtgggtgggtgtcttgtgcagatgtgtgtgtgtcagtgtgtgggggtcggtgtgtgtgtgtctgcgggggtgggtgtgtgggtaggtgtgtgtgtgtcagtgtgggggtgggtgggtgtgtcagtgtgcaggggtgtgtgtcggtggggtgggtgtgtgtcagtgtgcagaggtgagtgggtgggtgtgtgtcagtgtgcgggggtgggttgtgtgtcggtgtgcggggatgggtgggtgtgtgttggtgtgtggggtgggtgtgtgggtaggtgtgtgtatcggtgtgcgggggtgggtgtgtgtctgtgcgggggtgtgtgtcagtgtgcaggagtgggtgtcagtgtgcaggagtgggtgtgtgtcagtgtgcgggtgtcactgtaggtgtgtgtcggtgtggggggtggatgtgtcagtgtgtgggggtgggtgtgtgtcagtgtgcggggggtgtgtttgtggaggtgtgtgtgtcggtgtgtgtgtgggtgtgtcagtgtgcgggggtgtatgtggaggtgtgtgtgtcggtgtgtgtgtcggtgtgtgtgtgggtgtgcatgtgtagatgtgcgtgtgtgcatgtgtgggtgtaggtgtggaagtgggttggtgggggttgggtgggggtgggtgtatatttgtctgtgtgttggtgtgtgggggtgggtgtgtctgtgtgtgtgtgtgtaaacttctgcccagtccctgctggggggcactctcagactcagtatttggggaggctgagggagttgaggagagcagcaggaccctggacttggagaacggtttggaggacggtggtctttggtggctgctcagctccttatggccccaggtgcaggtgacttggtcctgactccatgtttcctgccagcaggggagtgtggcctggtgggtgggggcccccaggggaggtagggcttgcgggagtgtggatacccggctccttcgggtgtggcggcaccagtgtccctcctgcccgctgtgctggttgcttctcttactttgctcccacacgggatgtctccctttattctattttcacttgcagtgcttctggtttctccacttttacatctt

SEQ ID NO: 8059 - DNA, 1979 bp, Artificial sequence
  DNA replication origin
caatccagaaagcccccagaactgacaggaaggccagggagaagccaggctcaggaagtgggcaggctggaaggagatgggtccggccacacctgcggacctgtcacggtggtgtgcaggtgcaggacctgcccctgcagcctgggctccgcctggatgctcgcgacctccgagagacacccaaatccccgcacccgggcctgagtcgcctcagcggttcccgcgcctccgcatggacctccaggcaggtgtgcccacccactgcaaggcgggaggagccgcgtgcacctcgccagctcccgggtggcaccctgacactgacctgacctggacccccaaatcaaggggagttggggccgggcagcctgaaggcgcagagccccctccccaagcacgagcttggttgccaggaagcctctgctgcggctctggagaggatgaaaatgcgttcaaacccaagcaactataaacacgaagaaaggttttgaacacgttttgttttcagactaagaggaaattcctaaaattcttcggtggtaaaaccaagactgcacaccgaattcacattggagcggggctagggaagcatggctccggaagggctcgggaagggctcggggatggctggggaagggctcggggagggctcgggagggctgcggaaaggctcgggaagggctcggggagggctcgggaagggctcggggagggctcgggaagggctcggggatggctcgggaagggatcgggaagggctcgggaaggctcgggaagggctcgggaaggctcgggaagggctcggggagggctggggaaaggctcgggaagggctcgggaagggctggggaaaggctcgggaagggctcggggagggctggggaaaggctcgggaagggctctggaaggactcgggaatggctcgggaagggctcgggaagggctcggggagggctggggaagggctcggggatggctggggaagggctcggggagggctcgggagggctgcggaaaggctcgggaagggctcggggagggctcgggaaaggctcgggaagggctcgggaagggctcgggaacggctcggggagggctcggggagggctgcggaaaggctcgggaagggctcggggagggctggggaagggctggggaagggctcggggagggctgggggagggctcggggtgggggtgctggggaagggctctgggaaggcttggggagggctcgggagtgggtgttggggaagggctctgggagggctcggggagggctcggggagggctgggggagggctggggaagggctcggggagggctcggggaggactcgggaagggctcggggaaggctcggtgagggttccggaagggctcgggaagggttcggggagggctcgggaagggttcggggagggctcggggaggactcgggaagggctcggggtgggctcgggaagggctggggaaggggtcggggagggctggggggttgctggggaagggctcggaggcggagggcaccaggcactgagcctcgcagaggcggccgatatcctgagagcctccctcgagaggcagctcggcgggcacctcctccgccagactccgaactccagatctcaccactgtctttgcacacccttctctgaagccctggagaggcccccatgtccccgcagagggatgaccagtattgcagacgcagcgcacggaagagcgcccagccagctctggcacccgccctggccagagtgctgtgcccgttcgtaccgggtctgctcagggcccccctccacccacacccccatcaatagagccttttgtgactttcagctgggaaagaattccacacttaaagaaaagttaacgatattagcgttgatgccagaacccggctgccctaacacggattcccccactgttgatggcttgtctgtttgctttgttgtgcgggctgcacacacccacagtcatg

SEQ ID NO: 8060 - DNA, 1338 bp, Artificial sequence
  DNA replication origin
gaggcagtcattaggtggttgattgttggggggtgaggccggatgaggcaaaaggtatcagtgtcatttggactatctctccacaagacactcatccattatgggggacatagtggctgcagtgagaaagcctgatagatgcctgtgtggtcaggcgaccaaggtgaacatcctcctggaggaatcaggcgaccaaggtgaacatcctcctggaggaatcacgtgaccaaagtgaagaggaatcaatcaggtgactaaggtgaacatccctgtggcagaacaggtcacctctgtgctccgatgtgatgtgctaagcagagcagtagcatttctggggcattcccaccaatagaggatggtctggtctccggaggaaataccagacaacccaggttatgggtcacccttcagaatttgaggcctttattcttcggaactgttgaggacaagaaaaagaagtatgaagaaatgttccagtccagaggagagagaagagatgttacagctggatgtagctcatctttccatgagattcttgaccagaggagaagaaaaactctgtggtgacaactgacgggatggtacagctgtgtcagcgtggacgcctagcctgaattacgggtggttttgtaggattgcgctgtgtcagcgtggacgcctggcctgagttacaggtggtttcgtaggactatgctgtcagcgtggacgcctggcctgagttacgggtggtttcctaggactgtgctgtgtcagcgtggacgcctggcctgagttacgggtggtttcgtaggactgcgctgtgtcagcgtggacgcctggcctgagttgtgggtggttttgtagggctgtgctgtgtcagcgtgggtgcctggcctgagttgtgggtggttttgtaggactgtgctgtgtcagcgtggacgcctggcctgagttacgggtggttttgtaggactgtactgtgtcagcgtggacgcctggcctgagttacgggtggttttgtagggctgtgctgtgtcagcgtgggtgcctggcctgagttgtgggtggttttgtaggactgtgctgtgtcagcgtggacgcctggcctgagttacgggtggtttcgtaggactgtgctgtgtcagcgtgggtgcctggcctgagttgtgggtggttttgtagggctgtgctgtgtcagcgtggacgcctggcctgagttacaggtggttttgtaggactgtgctgtgtcagcgtggatgcctggcctgagttgtgggtggttttgtaggactgcgctgtgtcagcgtggatgcctggtctgagttacaggtggttttgtaggactgtgctgtgtcaacg

SEQ ID NO: 8061 - DNA, 1046 bp, Artificial sequence
  DNA replication origin
gagaggatggggtcggggagagaggatggcataggggtggaaggacagggtgggggtgagaagatggggtgggggagagaggatggcatgggggagaggatgggatggcggtgagaggatggcatggaggtggcaggacaggagtgggggtgagaggacggggtggaggtgagaggacggggtgggggagagaggatggggtgggggtgagaggatgggtgggggagagaggatggcattgggggtggcaggacagaagtgggggtgagaggatggggtaggggagagaggacggggtaggggagagaggacggggtaggggagagaggatggggtgggggtgagaggatgggtgggggagagagaacagggtgggggagagacaatggcattgggggtggcaggacagaagtgggggtgagaggatggggtgggggtgagaggatggggtgggggtgacaggataggtgggggcaccaggatggggtgacagtgataggatggggtggggtgacaaggtgggtgggggtgacaggatggggtgagggtgagagaaccaaggttggggggtgacaggatgaggtgggggggtgacaggacaggggagaggctgacaggacagggtgggtgtgacaggagcagggagtgggtaataggatggggtaaaggggtgacagaatggggttgagaggtgacagaatgtggtgggggtatgatatggtttggctgtgtccccacccaagtctcatctcaaattgtaatcccatgtgtcaaggggaagaatctgggggaggtgattggatcatgggggtgctttcccccatgctgttctcatgacagtgagttctcacgagatctgatggtttaaaagtgtttggcagttcccctccaccccctctcctgccgctatgtaagatgtgccttgctccccctttgccttctgccatgattgtaagtttcctgaggccttcccagccatgcagaactgtgagtcaattaaacccctttcctttataaatcacccagtctcaggtagttctttatag

SEQ ID NO: 8062 - DNA, 856 bp, Artificial sequence
  DNA replication origin
ggggactgctgggaaggtatgattgtgttttgaaatgttagaaggatatgagatttgggaggggccaggggtggaatgatgtggtttggctctgtgtccccacccaaatctcattttgaattgcagtccccatgtgtcaagggagggatccggtgggaagtgattggatcatgggggcagtttcccccgtgctgttctcgtgatagtaagttctcatgaaatctgatggtttaagagtgtttggcagttccccctgccctctctcctgctgttaatgtaagacgtgccttgcttcccctttgccttctgccgtgactgtaagtttcctgaggccttcccagtcatgcggaactgtgagtccattcaacctctttcctttataaattaccgaatctcaggttattctttatagcagtatgaagacagactgatacagggtgacaggacagtgtaggggtgaggggtgacaggatgggatgaggggtgacgggatgggatggggtgacaggacagggtggtggtagcaagatggcctgagtggtgacaggatggggtaagggtgacaggatggggttggggtgacaggacagggatggggtaccaagataaggtgacaggatggggtgaggggagagatgggggtgacaggacagggcaaggtgacaagacagggtgggggtgacaggatggaaggggagtgactggctggcaagcagggccaagggtgatctgtccgctccaggtttgggtgtacacagaatgttcatggacagacaggaggcagcagggtcacaagctggcttccagacttggggaagcggccccaggttcccttgtctttaaagctgggttcctg

SEQ ID NO: 8063 - DNA, 1629 bp, Artificial sequence
  DNA replication origin
agacccttttgaggagggagcgtgtccttgccaggcaggctgctctgcctcctggccctcaccactgtccggcacagccctcagagggaagtggccaggacgaggggctgtcctgttgatcgaggctgtccctggcagggcccctgagaggccattcacaatgtgctggccacttgagtcatctatagctaattctaggtcttcaagtacagtttttaactgggggccagaagcgtttattagacacaataaatgtagagtcatttctttctctttcagaccgacgcagatatccaggcattcttcatgagcatagacagtctgtgtaagaagtactccagggaaacctcccaggtgagctgtgaggggtgtggcttggttccgtgatgagccaggtgcactatcccgagaccatggagctatgaggggtgtgcttggttctgtgatgagccaggtgcactatcccgagaccatggagctgtgaggggtgtgcttggttctgtgatgagccaggtgcactatcccgagaccatggagctgtgggagttgtgcttggttctgtgatgagccaggtgcactatcctgagaccgtggagctgtggggggtgtgcttggttccgtgatgagccaggtgcgctatcccgagaccgtggagctgtggggggtgtgcttggttccgtgatgagccaggtgcgctatcccgagaccgtggagctgtggggggtgtgcttggttccgtgatgagccaggtgcgctatcccgagaccgtggagctgtggggggtgtggttggttccgtgatgagccaggtgcgctatcccgagaccgtggagctgtggggggtgtgcttggttccgtgatgagccaggtgcgctatcccgagaccgtggagctgtggggggtgtgcttggttccgtgatgagccaggtgcgctatcccgagaccgtggagctgtggggggtgtgcttggttccgtgatgagccaggtgcgctatcccgagaccgtggagctgtggggggtgtgcttggttccgtgatgagccaggtgcgctatcccgagaccatggagctgtggggggtgtgcttggttccgtgatgagccaggtgcgctatcccgagaccatggagctgtgggagttgtgcttggttctgtgatgagccaggtgcgctatcccgagaccatggagctgtgggaggtgtgcttggttctgtgatgagccaggtgcgctatgctgagaccatggagctgtggggggtgtggttggttctgtgatgagccaggtgcgctatcccgagaccatggagctgtggggggtgtgcttggttccgtgatgagccaggtgcgctatgctgagaccatggagctgtgggaggtgtgcttggttctgtgatgagccaggtgcgctatcccgagaccatggagctgtgggaggtgtgcttggttctgtgatgagccaggtgcgctatcccgagaccatggagctgtggggggtgtgcttggttctgtgatgagccaggtgcgctatgctgagaccatggagctgtgggaggtgtgcttggttctgtgatgagccaggtgcactatcccgagaccatggagctgtgggagttgtgcttggttctgtgatga

SEQ ID NO: 8064 - DNA, 1775 bp, Artificial sequence
  DNA replication origin
gggaactctgaggggagggggacctggggtggaggggccgcgggggcgcgtggggggccgagggggagaaacggcgcatggagcggggggggcatgggggggtgagaggccgcggaggtaggggtattcggaggaggggccaccggggagtgggggccgcgggcgtgatgaggggcccgtggggagagggggacactggagaagcggtggggagggagcgggggagtgaggggctgcgggagggtggggaaagaggggacgccggaggtggtggggggctgcagggaggaaggggacgccagaggaggggggcaaggtgggggatgtggggggtcaaggcttgggggggaagggggataccgaggagatggggggaggggagacgccaggggaggagggcgtgggggagggtccgcaggcaggaaggggccgtggaggggaggggccgccggggggagcgggatgcaagatgagggggacacaggggtcgggccacgagtcctgtcagtcgggggctctggcttgcaggctgcgggtccgcctggaggacctgggggagaagcgggcaggcggcaaccttaacgccagtggaggactctggccctattccatgggcagcgcggggccctggtgtcaagtggacagtcgcattgtcagggaggcgtttttctttctgtgaaaattttgtgttgaactgatgtttatgcaagaacaaaagcaaaaacacagtgagcttttaccaagcgaacttccccgtgaaagcagccagctgggtgccggtggctcacagccctccagccccaggggacgccagctgtgctgacctccatcctcggagttggccttagacccatggagccttagtgaatgcagccctacaaccagccctacagcaaagccgctttctgtggctccccatctttcttcctttttctcccttccttctctttgcctctttcaaggcagagctcagctttgtcgcccaggctggagttcggtggcgggatctcggtttactgcagcctccgcctcccaggctcaagtgattctcctacctcagcctccagggtagcggggctacaggcatgtgcagccacgcacccctgatttttttaatttttcacagagatggggtccctttgttgcccaggatggtctccaattcctgtcctctaacaatcaccggccttggcctcccgaaatgtgggattagcaaagtttatcattgtatttgtatgtaactgtagttcatctactttcattgttgtgtggtgttccattgtatggatacaccccaagttactcatcgtttccactgtccatggccctttgggttgtttgcagatttggctgcagaaataatgctactgtgaatcttcttgctcctgtcttcggtgatcttaggtacacatttctgttgggtgtgtaacctgggagtggagttgttgatttcaggtgtgtatttaaaaacaaaagtgtctcgggcagcgaggtgaaaagtagattggagggagatagaaactgtgggagagactgcagctgagcacatgagaggtgatggggagaagtgataggttcaggagaagttaggtagattcagcagacatgagtcggagacaagggctagagaactggacagggtttcactgctagacaaaacactggagaggagcccagcgggagggaacccagcagggtggggcacagcagggtggggtgcagggcccctgagctcatgtctggacacggcctgtatcctgtgagagccatccagg

SEQ ID NO: 8065 - DNA, 1060 bp, Artificial sequence
  DNA replication origin
agttggggtgggagcgggagtggggatgtgggagttggggtgggtgtgggggcgtgaggcggtgggggtggggtgtgatgaggcggtgggggtggggggggcagttgggggtgggggccaggccgcgctgcacgctttgggactagtgtccaggtggccgctggcgcagagacctcagcacgggaggcctgagcctgcttccctctgaaacggaaggcgtagctcgggaaggacctctgctgcttccaggttccagcatggggaagtgactttttataaaattgtcctctgcgtggttttgagagtttccacccgctgggacgctgcaaagctcggatcgagaggctcaggcaagtgcttgtgccgggagagcgcagggtgagcgctcccggtagctacgggccaagtgacccctgcgccccgaaagatgtgagtaaaatacagctgtttccagggcctcgtatgaaaaccttcttagtaattttatattgattacatgttaacatgatatttttgatatattaggttaaatatatatcagtagcgttgattttaccctttcaaaaaatccttttcaatgtggagactagaaaacttagaattacgtatgggctgggtgcggtagctcacgcctgtaatcccagctactccggaggctgaggcaggagaatcgcttgaacgaggcggaggttgcagtgagccgaaatcacaccactgcactccagcctgggcaacagagtgagacttcgtctcaacaacaacaacagcaaattagaattatgtatgtagcccacttttatttctgttagacagtgctgatctctaccaagtttaaaatagcaagaccagcaacgtggcaaaaccccgtctctacaaaaaatacaaaaattagctgggtgtggtggtgggcccctggggtcccagctactcgggaggctgaggtgggaggattgcttgggccctggagatcgagcctgtggtgagcctgacggcacctgtgcagcagagcgagactcagtctcaaaaataagtttaagaataggatgaggtgcctaatcta

SEQ ID NO: 8066 - DNA, 1174 bp, Artificial sequence
  DNA replication origin
tggaaatggcactgacagggagagcttagaacgccgtggagatcatggaaatggcaccgacggggagagttcagaacgccgtggatatcatggaaatggcaccgatggggagagcttagaacgccgtggatatcatggaagtgacactgacagggagagcttagaacgccgtggatatcatggaaatggcaccgacggggagagttcagaacaccgtggatatcatggaaatggcaccgacggggagagcttaggacgccctggatatcatagaaatggcaccgacggggagaattcagaacgccgtggatatcatggaaatggcaccgacggggagagctcagaacgccgtggatatcatggaaatggcaccgacggggagagctcaggacgccgtggatatcatggaaatggcaccgacggggagagctcaggacgccgtggatatcatggaaatggcaccgacggggagagctcaggatgccgcggatatcatggaaatggcaccgacggggagagctcggaaatggcaccaacggggagagttcagaacaccgtggatatcttggaaatggcaccgatggggagagcttagaacgccgtggatatcatggaaatagcacccatagcgagagtttagaatgccgtggatatcatggaaatggcaccgatggggagagcttagaatgccgtggatatcacggaagtggcaccgacggggagagtttaaaacaccgtggatatcatggaaatggcaccgatggggagagcttagaacgctgtggatatcatggaagtgacactgacagagcttagaacactgtggatatcatggaagtggcaccgacgaggagagcttagaatgccgtggatatcatggaaatggcactgacagggagagcttagaacgccgtgcatatcatggaaatggcaccgatggggagagtttagaacaccgtggatatcatggaaatggtaccgatggggagagtttagaacgccgtggatatcatggaaatggcactgacagggagagtttaaaacgccgtggatatcatggaaatggcaccgatggggagagcttagaacgctgtggatatcatggaagtgacactgacagagcttagaacaccgtggatatcatggaagtggcaccgacggggagagctcagga

SEQ ID NO: 8067 - DNA, 2624 bp, Artificial sequence
  DNA replication origin
gagagtttagaacaccgtggatatcatggaaatggtaccgatggggagagtttagaacgccgtggatatcatggaaatggcactgacagggagagtttaaaacgccgtggatatcatggaaatggcaccgatggggagagcttagaacgctgtggatatcatggaagtgacactgacagagcttagaacaccgtggatatcatggaagtggcaccgacggggagagctcaggacgccgtggatatcatggaaatggcaccgacggggagagctcaggacgccgtggatatcatggaaatggcaccgacggggagagctcaggacgccgtggatatcatggaaatggcaccgacggggagagctcaggacgccgtggatatcatggaaatggcaccgacggggagagctcaggacgccctggatatcatggaaatggcaccgacggggagagctcaggacgccgtggatatcatggaaatggcaccgacggggagagctcaggacgccgtggatatcatggaaatggcaccgacggggagagctcaggacgccgtggatatcatggaaatggcaccgacggggagagctcaggacgccgcggatatcatggaaatggcaccgacggggagagctcaggacgccgtggatatcatggaaatggcaccgacggggagagctcaggacgccgcggatatcatggaaatggcaccgacggggagagctcggaaatggcaccaacggggagagttcagaacaccgtggatatcttggaaatggcaccgatggggagagcttagaacgccgtggatatcatggaaatagcacccatagcgagagtttagaatgccgtggatatcatggaaatggcactgatggggagagcttagaacgccgtggatatcacggaagtggcaccaacggggagagtttaaaacaccgtggatatcatggaaatggcaccgatggggagagcttagaacgctgtggatatcatggaagtgacactgacagagcttagaacactgtggatatcatggaagtggcaccgacgaggagagcttagaatgccgtggatatcatggaaatggcactgacagggagagcttagaacgccgtgcatatcatggaaatggcaccgatggggagagtttagaacaccgtggatatcatggaaatggtaccgatggggagagtttagaacgccgtggatatcatggaaatggcactgacggagagtttaaaacgccgtggatatcatggaaatggcaccgatggggagagcttagaacgctgtggatatcatggaagtgacactgacagagcttagaacaccgtggatatcatggaagtggcaccgacggggagagcttagaatgccgtggatatcatggaaatggcactgacagggagagcttagaacgccgtgcatatcatggaaatggcaccgatggggagagtttagaacaccatggatatcatggaaatggtaccgatggggagagtttagaacgccatggatatcatggaaatggcaccgacggggagagcttaggacactgtggatatcatggaaatggcaccgacagcgagagtttagaatgctgtggatatcatggaaatggcaccgatggggagagcttaggacgccgtggatatcatggaaatggcaccgacggggagagcttagaatgccatggatatcatggaaatggcaccgatggggagagtttagaacgccgtggatattatggaaatggcaccgatggggagagtttagaacgccgtggatatcatggaaatgtcaccgacggggagagcttagaacgccatggatatcatggaaatggcaccgacggggagagtttagaacgccgtggatatcatggaaatggcaccgacagggagagtttagaacgccgtggatatcatggaaatggcacccacagcgagagtttagaacaccatggatatcatggaaatggcactgacagggagagtttagaacgccatggatatcatggaaatggcaccgacagggagagcttagaacgtcgtggatatcatggaaatggcaccaacagggagagtttagaacaccgtggatatcatggaaatggcacccacagcgagagtttagaacaccgtggatatcatggaaatggcacccacagcgagagtttagaacaccatggatatcatggaaatggcaccgacagggagagcttagaacgtcgtggatatcatggaaatggcaccaacagggagagtttagaacaccgtggatatcatggaaatggcacccacagcgagagtttagaacaccgtggatatcatggaaatggcactgacagcgagagtttagaacaccgtggatatcatggaaatggcactgacagcgagagtttagaacaccgtggatatcatggaaatggcaccaacagggagagtttagaacactgtggatatcatggaaatggcacccacagcgagagtttagaacaccgtggatatcatggaaatggcactgacagcgagagtttagaacaccgtggatatcatggaaatggcactgacagcgagagtttagaacgctgtggatatcatggaaatggcacccacagcga

SEQ ID NO: 8068 - DNA, 802 bp, Artificial sequence
  DNA replication origin
gaaaacggcctctgacctgacatactttaaaagtgtgtgtgtggtgtgtgtgtgttggttaagtaaaactagtttggggttcatcacacaattctctagtttcatgtgcttaaactgttctagaatagacggttttgttttttttagctgtgtgaggaagtagagaagtggagctagcctatctggcaacccctcaagatgtcaggctatgaaataacactggcaaacacttacacagagtgtactgtgtgccagggactgttcttagcactttacacagagagtatcatttggtctttacagccaccgtataaagtgggctctttattctctcagatgaggaaactgaggcagagaacaactaaggaacttgcctaggatcgcacaggaggtaaggggcagaggagggacacccagacagtgtggccccagagtctaggcttgtcaacattgtgcttcagaacatctctaaaggaaaacattggctgtttgggagactgaggcagagggaacagaccagtgggaagggagagaggtctctgaggaggaaggaaaaggtgggctctgaaactggagctgggtttaggtaggaggaagggcaggtcgtggatgaagacagctgcaggtgcgtgcctggtcacccttgccacacgcttggaatccagccagagctccacctggcaccagaaaagcaacagctacacccttcaccaaatgcccactatgcaccagaccagggctgagaagcccacaccgcctgtgtcatctaatccctgcgacaatgcactgcccctgccttatg

SEQ ID NO: 8069 - DNA, 1092 bp, Artificial sequence
  DNA replication origin
ctctgctcacaggcgccttggcctggggcggggcaggtgctgatgagcattctcctagctcttccaggcacctgctggacagggcaggctgggaacgctggggccgagtggcagttccctccctactcagctgggtggcagccactggcctcacggagcgcctgtggtctggagcgcattgctgggtcgtgggtcagggcctgttggctctgggtctctgggtctcacctgatatgggtgtgggacagtcagtgtaggccccagacaacagcggacttcagactttcccgaggaggaactggagcccaccaacctggccatgggccccgtcgtcctccaccctccatgttgctggctggagttgaggcaggtacggggccgccccacacctgccccccaagccatgtggtagggacagatgtcgtcttgaggagcagcagtaattacaagcttactgtcagccgtccctggaagcaagggccaggtcaggtcagacaggaggccgcctggctggcgggaaccactccccagacagagactgtgcccagtcctgggtccctcctcatttgggatgaactgggcctccctgtgccagcctcggtgctgcccctgcccagtgcaggcttgggctcctcactcatttgtccacgcggatgccccattccaagcagatgtccccgagccacttacccaacaggcagacgtgccagcactgttcgtggtgtgcaactggtctggcgggaagagcccctcgtgggcagagggtccagagaggtgcggtttgccccacatttgggggcactgggccacagtgggcaggggagcacatggccagtgccctgggctaggagagggataaagtcagctgtggccaagcagaagcagtattgcaggggaagggtggggagagactgtgctatgagctctgagcaggaggcaggacatggagagaagggtgggagacggacagagccagctgtgccagccgagggaccagagtgggcagtggggacggagcacagaccaccgcccacaagggtctctcctgtgacttctggcttcccgagggcagaggctgggatgggcatgtgg

SEQ ID NO: 8070 - DNA, 1097 bp, Artificial sequence
  DNA replication origin
tggtgagcgcggggccggccgggggcggggtccggggggccggggccaggcgcgctgagccgctgtcgccgcaggtctcgtttgtggtgcgcatcgtgcccagccccgactggttcgtgggcgtggacagcctggacctgtgcgacggggaccgttggcgggaacaggcggcgctggacctgtacccctacgacgccgggacggacagcggcttcaccttctcctcccccaacttcgccaccatcccgcaggacacggtgaccgaggtgagtgggcaccccgcgtgcgcaagggccgctatggcccccgcggtggggacggggctggggcctggctgcaccctcgcctcccagcccaggacagccgcttgcggcttttgtgtggaagaggctctgcttctagcgccagcagtgagcaagggggtgcagccctcccatactctcccaacccggggtcacagcaccgcagggaggacagcgggacgcgcgtcccgaggaggctgccccttcctggcctcggtttccagcccgtgttccgtgggatggctgagaggagtacatgggaccctgtccccaacagtggtgcagagggcacgctggacgctgggcagtggccccagtgaggccatacgcataccagaaggtgggcttctcggaccccaggccaacctcctcttcttcctccccagataacgtcctcctctcccagccacccggccaactccttctactacccgcggctgaaggccctgcctcccatcgccagggtgacactggtgcggctgcgacagagccccagggccttcatccctcccgccccagtcctgcccagcagggacaatgagattgtagacagcgcctcaggtaacggacatacaggtcacatgggacacacagcagccccgaaccctgccacagggcgaccaccaaacccgaacctaaggctctgagaaattccaagtagggattcgtagtgcgtactgcaagatggtgcctagaagatttaggattctgttgattcacacactgaagatgtgactcttgcacattatttgcagttgaaagcatcttacagggccacagcccagaggaaagaat

SEQ ID NO: 8071 - DNA, 829 bp, Artificial sequence
  DNA replication origin
caatgtccactgcagcagctgctggggtcccttctctgctgccacctcatctggcacagggtggggcatgggatggagacatctgagtacccaccaggcccacacacatatgtggacatgcatgcatgccacacacacgtgcacacacttgtatacgtacacatgcccgacacagctgcaccatgccagatacacgcctcacacatgggtgcacacacacagcacatgtgctcacacaccatgcacatgcctgcatctgaggctgaccctgcctttgatctggaggatgctaatggaccctgcagagagaaagtggatgtcactgcagagactcagtgggcactggagggtgcaacgtcccctgtcccagtctctgcccaggtccatcctgtcccctgccccacacacccttcatcactgggtgtccccgtcaccgggtatctgtcctgggggagtccagcacgccaggcctggcctctctccagagcccccccagtctcagtgggccccaccctggggctggggaggaggaataggagtgtgggggagctgggtggggactgagtcctttctccaggagggaaggttgtgtgtccctacagccctgtgtcaccagaacacctccccagcaacaggggtcactcccgtaggacctgccgctgaccatgggacaagaacgtggggggcatgggaaggatgtggagggggcatgggaaggatgtggagggggcatgggaaggatgtggggggtgtgggaaggatgtagggggcgtgggaaggacgtggggggtgtaggaaggacatgggcggtgtgggaaggacgtggggg

SEQ ID NO: 8072 - DNA, 1020 bp, Artificial sequence
  DNA replication origin
cagcacgccaggcctggcctctctccagagcccccccagtctcagtgggccccaccctggggctggggaggaggaataggagtgtgggggagctgggtggggactgagtcctttctccaggagggaaggttgtgtgtccctacagccctgtgtcaccagaacacctccccagcaacaggggtcactcccgtaggacctgccgctgaccatgggacaagaacgtggggggcatgggaaggatgtggagggggcatgggaaggatgtggagggggcatgggaaggatgtggggggtgtgggaaggatgtagggggcgtgggaaggacgtggggggtgtaggaaggacatgggcggtgtgggaaggacgtggggggtggtgtgggaaggacgtggggggtggcgtgggaaggacgtgggggggtggcgtgggaaggacgtgggggggtggcgtgggaaggacgtgggggggcagcgtgggaaggacgtgggggacggtgtgggaaggatgtggggggtgtgggaaggacgtgcgggtggcgtggaaaggacgtgggggagctgtgggaataacacgggggtggcgtgggccctgctccctgtccctcttctttggacgaggctgccagtatgtggaacccaggggggtgccctgtggcccagcagctgttcccaccttccctgcagccacaagctttgaagtggccttgccagaggccccacaggacgtctccggggagctgcggccagactttgggcacagcaggcagtgcctatggggagagagacaccctccggccggcctccctccacccccagccccacgacggcaaatgggctcctccaagggtcttcggcgaggtgtgcgggcctcttctgccaaggccatgtcattgggaggtggcccagtcagggtggcaggaaaaaggaccaacggggctcacccgcaggtcccgatagagggaccacttcagaggcggttcaaggagccgagccccagggtgggaggcctgggaccagcccc

SEQ ID NO: 8073 - DNA, 1605 bp, Artificial sequence
  DNA replication origin
aagaggtggcactttccgttatttattttacaattttttggataacaggatcattttaattattctactttttagttccttgaggttttctttgcagccaatacacaacagacatggacttatcggaagtcggaacgtttggaagctctgtttcccgtgaggaatcttcggaagcgctgtttcccatgaggaacgtgagcatgaccatccatattgatctgtctgcatttttctgttgccactagacctaattatggagagagagacacggagggagctcctgtgaccctcaagtcccctcatcatgtccccgtcctgttggctttccgagtttagctcccatgtttggaccatggaggtttatgtcttctatctcagtcatcgtccctgccacatgcccaaccagacatgctgacatcacaggccctacttagccctgtttcctctccccttggcctcaccttgatgtcaggggggtgtcctctggtctgactcagaggcagtgactggcttccttctagtaccttctctggataatgagtatggatgacataccttctagtgtctgctgtcgcgcttaccggtgacacttctgggctggtttgtgatgcctgggatggagccgtctccctagtggtcatggatgatgtttcactgtcccctgcttctggtggcacagatgagaactccaggcctcgtgctctctctgctggcacacacatcttccctccatgctggctgcacacctgcccatggggtttctgcaggagaggagacagccagaggcccaagtggggtgtgtggcaggcaggcagcaaccctggtcactgcagtggcctctgctctgagtctcgggagtaaccctggtcaccgcagtggcctctgctctgcttctcagctatgcctggtgtgacccccagggtcttggtcggcatgaggccacagagctcacgtgcacttcccgcagctgcttccacggtatagatgagaggttcccatggagctcacatgacctctagagacttgcagacccctatgctgtcagacagaggaggctgaggctcagagaggcacagtcaccttcttgaagatgcacagccgtgagtgaagaagctgggatttctcctggtctctctgaccctggaacacgtggcctctgggtgtgcccagtaagagacgttaaagaagggcctcccccatgagccctgactgaggcggggcgctaggcaccccatcgatgtgcttcgtggttcacaggggagaggcagagggcctgtcggggggcagcgatggggcagccagagggggcggtcctggcctgtgtgagcctccttgaggggagggtgccaggaactaccccatgatcttctattctcatgtaagccacaagaccccaacccagatccccacagcaaaggcgaagtcaccaactcaacaaggcgcgtggccaggcgtggggctcacgcctgcaatcccagcaccatgggaggctgagcaggaggatggctcgaagccaggagttcgaaaccagcctgtgcaacacagcgagaccgctctacaaaaataaaaaaaaatcagctgggtgtggtagtgcacacctgtagt

SEQ ID NO: 8074 - DNA, 834 bp, Artificial sequence
  DNA replication origin
tgatcaacaccaaatgatgcccctccctgggcccccacccttcccaaggctgccgtaggcactgctggcaaaagcctcggatgcttgggctggcagggaaggccaggcggctccgatggggcctctggggacaggattgcgggaggccaggatcctcgtttttaaccctgaaccttagcacctctgcagggtcccccaggtgctgggcacggctctccctggacaaagcccacagctccacggatgccagctgcagttctagtaaagatgtggacatggaaaccgaggggcagggtttgcccctgggtgcagctgctccgaggaggccccagctcaaaggtgcctccccccatgcccagttcaggcatcgggcctcagccagcgccacctcctgtgtccaggagctccgggcatggcctcttccccaggacctcagccgggtgctgtctccacccacagccagttcctgtccatgtgcccccagggccctgccctgtgcaaagtctggtcagcgttacggggagggcgtggcgagggcacagggaggggacagctgggtcttccgccttagccacagggacaggccaggcctcacagccaagagccccgggaagagctgcatgcacacggctggagagaggctctgcacccgagcacagcctgctgcgactcctcatagacccggaaaactgattagaaggcagaggtgagtttcggagggtggctgtgcacaaaattcagagtcaggaatcagcatctttcaaattcaagcacttccagttaggagagacaatgaagaaagaaaagggaccattcccaacagcaacaaaaatt

SEQ ID NO: 8075 - DNA, 897 bp, Artificial sequence
  DNA replication origin
ccagcagcctctcagggcacccaggactggagagggccctgccaagggtctgcgggtgccactcacccacccggctgcagcccccagctcccctgggctgaccgtgggcctaggccgagctgaaggggctggcggttgtcagcccttggtctggccccaccactgctctgccagggcagggggaggccggcagcccaggttgtggggccagagggccacgctgtgacagacgagaagagggagtgacctggagggcccggggcagggaccaacagcaaatgcctccctaggtggtctctccaggacagatgtgtcccctgtgggagggctggggcgcccagcaaaagcagcagctcctcagggaacggggacccagcgggctgagtggggctcttggaatagaaggagcctccccaggctcagctctgcaggcggagaggggaggcagggcctgaggctcatggtagggaagcggccttgccctgtgaggtctccctcagggggcagaagagccgggaccccgccagcagcagagaacaaaccccagtctaaggcgaaccccaggtgtggggtaggtgtaaaagcagatggctttgaccacgagtgcacaggtgaggggcagacaggtgtgagcaggtgtgagcaggtgaggggataggtgggagacacatggagggtgggaggagatagggacaggagaagaggcagtgggggcaggtgtggggcaggtgtggggcaattggaggtgggtgggggtggatggtgtcatttgggagtggatggggttaggtgtgagcaggtgcagggcgggtggggagcacggggaggaggctggagttggtgtgggcaggtgcagggcagtgcccgggaggcactgtcaggtgaatgtggggctgg

SEQ ID NO: 8076 - DNA, 985 bp, Artificial sequence
  DNA replication origin
cagcgggtgccccatgacaggacgtgtcctgctctgtccttacgacgcagggtctggcctgctcacgcgattccacagtgagtgggcacagtggtcagaacctggtcccagccactggcacccggctggtaaagaccgtgggagtgaccagggccgccaaccgtggtgaacggtgaggccgccggatgaccagacgggctgtgctcgcgggcggcgggctgttagtgttgtaaactacatgcgctttaaataccttttaccgagtgctagagccgttcatcaccaccccacgcagaatttcagctgcttacgttgaacaaattcaacaagtttatcctcaagtttatatgcagcaacaaaggtctatgaatttgggctcataaaactcaggcgaattaaagaggaaacagccacagcagcctggttctgacactgagggctccggggcaggggcagggcccgctggcttggcgtgcgcgtgcgtgcacaggtgtgtgggtgtctgcctggtgggcgggcggcgtgtgcgtgtgcgcatgtgtgtttgtgaactggcgatgtgatcgagggcacgggtgctgggcttccccctcatgggtaaaaccagagctactgtatgccagccgtggaggcatggacggcccctgagctcggacagcagacggacagaccgttgacgcgttggcaccgtggccagagtccgttcaagaaaggtcggcagagagggctgagaacgcggcaggcacatcctccaagggccctgctggaacccctggagcaggaggaagcggtgattctccaggccttgggtagggctcagaggcaagaggggtggagctggggagggtcgggcagccccagcacctcaggctactgcgccttggtggggaactctcctgcggctgctgatgaacacccgggctctggtctcctgtagacttccgccccgggcacgggagcaaggggaggctgcaggcagctccgg

SEQ ID NO: 8077 - DNA, 958 bp, Artificial sequence
  DNA replication origin
ggccggacgtggcccaaacgcccaggggacccccagtcactctgggaagaggactgggggaggctgggaggccagtcagaagagctgaggaccgtctaaacgcactacatcctagaaagggaggcgcctgttctacgagaaggaacatggtggctccttccatccccagggacgaggctgctgcaggagggaggagggctcggcaggcggaggtgggagcagcagttctgagggttgcagccacggccggagtacccgggcagctccccaggtgcagaacagcccgtctgtcaacgccccctgccagggatcccaccaaatggggaggaagagaacacaggcagacacagagaaaggcgtctcccacagcgcagaaggcggacgacacgctgtttcccactgcgcacaacacaaagccccggaagtcgggctgccggtggcgaaaaccagctaaagccgcgggccggcgccggccacgcctgacacgggagagcagcggctgttcggggcgagaccattcttcacttctgtctctgccattctcttccacatgatgtctggcttaggataagaaattatgatgatgcaggtgaagagacaggaggatgtagtttctaattagaacaaaacactggaagcggacagacgcacagatgaccgaggctggaatcagccagcaaaacctcttaataactactataaacatgctcagagatgacaacaagtgtggatgtaaacagcagaaaaatggaggcttccggaagatgaatggtaactctataaagaaccacatagaaattccagaacgaaaacatccctctgaaacggaactccctggacaaagctaactgcaagaaaaggatcgggagcttgaagggaggggctcaaagtcagcagatggcatccaaacagaagcagagagaaaagaatttaaaaaataaattttaaagaacaggcc

SEQ ID NO: 8078 - DNA, 1512 bp, Artificial sequence
  DNA replication origin
cccagatgctccccctccctcacggggcccctcacctggcctctcccagctctactttcccttaagacatggctctactcccaggatctcacacacgcacacacacacgtgcacaaacatgcacacgcttgccgctctgagctcaacctgggcctggctgtgtggggccggttcaccgctgcatgccggacccaggacagtgctgggcccaggataggcggctgcaaagcgagtgggcaaatgaagagcgaggggtcgctgaaaggcaaaccactccccggggatagggccagcgccaggggcagctgctggtgaccacggaggaagcccacggctgcccgaaccccggccccagcaggatctacacagccagctccaggggactcaaggggcgagcacatgctagaccgtggttgatgtgcgtgcccacacatatgccggtatctatctgcgtacgtgcccatgactgacatcaatgtgtgtccatgtgaggtcatgtgtatggtgtgatatccatgtgtggtgcccatgtgtgccatgtgatacccgtgtgtgtgtgctgtgacatctgtatgtccccgtgcggcccatgtgtgtgctgcgatgtccatgtgtgatgtctgtgtggggtccacgtgtgtgctgtgatgtccgtgtgatgtctatgcaggcctgtgtgagacccatgtgtgctgtgtgaggctgtgtgtactgtgacatctgtgtgttatctgtgcgtgcccatgaggcctgtgtgtgctgtgatgtccgtgtgtgatgtctgtgaggcccacgtgtgctgtggcgtgtgacatccgtgcaggcccgtgaggcccacgtgtgtgctgtgacatccgtgtgtgatgtctgtgtgtgccacgatgtcttgtgtgaggcctgtatgtgtgctgtggtgttgtgtgtgacatctgtgcaggccctgtgtgctgtgacgtccgtgcaggccagtgtgagacccatgggtgtgttgtgatatctgtgtgaggctgtgtgctgtgacatctgtgttatctgtgtgtgcccgtgaggtccacgtctgtgctgtgatgtccatgtgtgatttctgtgtgcgcccgtgaggtcatgtatactgtgatgtctgtgaggcccacatgtgtgctgtggcatctatgacatccgtgcaggccagtatgtgtactgtgacatcggtgtgtgatgtctgtgtgtgccatgatgtctgtgtgaggcccacatgtgtgctctgatttctgtgtgaggctgtgtactgtgacatccgtgtgttatctatgtgcccatgaagcccatgtgagtgctgtgacgtccgtgtgtgttatctgcatgtgcccatgagacccacgtgctgtgatgtctgtgtgaggctgtgtgtgctgtggcatccgtgtacgttatctgtgtgtgcctgtgtgagacccacgtgtgctgtgacgtccgtgcacgtagggcacacgcctgggactcccgggccctggtgcctgtgcgcactcagtc

SEQ ID NO: 8079 - DNA, 2077 bp, Artificial sequence
  DNA replication origin
cctgtgtgagacccacgtgtgctgtgacgtccgtgcacgtagggcacacgcctgggactcccgggccctggtgcctgtgcgcactcagtcctgtcctgggttgggaccgacacctgcagcagccccaccccgccccgggcctctcctcctgggcacagctgaagagcggcagcgccagacacagggagggacacaggcgtggagctgcggccgacgcaccaagtccgatgatgcccaaggtctccccgcggatcctggcagcgccggacgccacctcgcggatctgctcgacgctctggactcgtgtgccctcccgcagcgcctggtgcagccaggtggcccgccggtacaggttcaggatgtggcacagcgtcgagtcggccgtctcctccacagacgccgcgggcacgttgcagacggcaatgcctgtggggacaaggacacggcggtcacccccgggccgggcccagcctccgggaggacaccggggccgccgtgactggagcgggtttgaagcttcccaaggaagaagccaaaggccgtgtccccaaggccaccccgggaggccacgagatgaacacgttgctcacaggtcgggcgcaacagagcaactccaggagccccacctccactttaggttcacgtggcagcacacacacggcaactgctcggtgtgtggtagggctggggtgtgagacgctgccctgacccctcccgactcagcgctggcagcccaggaagagacaagcacgtgtctccccgcgtcacctcgccaccccgattcctctcgggggtaccctgctgggaggctgtggccaggtcagaatctgggtgccggccccgcctgcacacccctacgtggacatccgcacatgtcctcaggcctcccccaggcccagccgggccccgaagccccttccgccctccatgccccacccctgcagtcggtaacactgaagctggagccattcctggaaagcaagtccatcccatttctcccgagtggccaggcacgcccatgtgtgacccctactccccgctcccggccttgtccccagagacaggcccttccccagccagtgcccctccctgagcctatttaccctcatccctggcttgtccctggccagggccgcccctgcacggcacttcccaccccatccggatgattgcattcctgtgtccgactggccatccgtctccctggggaggaggagggggcaggaggccaggacagggctgcattcataggcccggaagctggacaggaccgtgtggttccgcaaggggtcccgggggccgggagagggcctgatgtggggcggcgcaggcaggggctgcatagcccctagacacaactcacttggacgtaaaaatgttaaacaagggagactgagggagagccaagccaggcgccacacgagattggaacaaagacctcctgagggtgggccagatcccaggggtgccccagaccatccctggctgaagaacagagcccaggcctgggaaactccacgggtaacagagatggtaaacagcagggacccctcaaaaagcaccaggcatgcacccgacaccacacacccaggcctgcacccgacaccgcagccggcccttcctgggacgccaccacagagacaaaggcgggaggaggctggcacacaggtttggcccatgggcgccggcggaagcagctgaagccagtgcaggagacccccagatggaggcatggcttccgacaccacctgcgtcccccgcaggaacacagacggttccaactttgcaatgccataaactgtatcctaggaaaagggaagcaaaaccgtgaggcgctggccaactgtgggcaagggcagggtacaacctcgcctgttaccagcatcgagaggaggagaaaaaacagaccgagcctggcagaaaacagaaagtgcgctccaagcaggacggccaagcaccgccccaagtttgttctaatgagtgtctgtacatggatgcagacacatgtgcatgttccatgtgcgtgtaggtgcacgggtgcagacgtgcgtgttccatgagtgttccatatgctgag

SEQ ID NO: 8080 - DNA, 1394 bp, Artificial sequence
  DNA replication origin
aggcgggaggaggctggcacacaggtttggcccatgggcgccggcggaagcagctgaagccagtgcaggagacccccagatggaggcatggcttccgacaccacctgcgtcccccgcaggaacacagacggttccaactttgcaatgccataaactgtatcctaggaaaagggaagcaaaaccgtgaggcgctggccaactgtgggcaagggcagggtacaacctcgcctgttaccagcatcgagaggaggagaaaaaacagaccgagcctggcagaaaacagaaagtgcgctccaagcaggacggccaagcaccgccccaagtttgttctaatgagtgtctgtacatggatgcagacacatgtgcatgttccatgtgcgtgtaggtgcacgggtgcagacgtgcgtgttccatgagtgttccatatgctgagtgcacaagcagaggtgcatgtgttctgtgtgatgagcatgtgatccatgtgctgagtgcgtgtgcacaggtgcagatgagtgtgcgtgatccgtgtgctgagtgcatgtgcacgggtgcagatgagtgtgtgtgttccatgtgctgagtgcacatgcacggctgcagatgtgcgtgttctgtgtgtgttctgtgtgctgagtgtgcgtgatccgtgtgctgagtgcgtgtgcacgggtgcagatgagtgtgcaggatccgtgtgctgagtgcatgtgcacgggtgcagatgagtgtgcgtgttccatgtgctgagtgcacatgcatggctgcagatgtgcgtgttctgtgtgctgagtgtgcgtgatccgtgtgctgagtgcatgtgcacgggtgcagatgagtgtgcaagatccgtgtgctaactgcatgtgcatgggtgcagatgagtgtgcgtgttccatgtgctgagtgcacatgcacggatgcagatgtgcgtgttccgtgtgtgttctgtgtgctgagtgtgcgtgatccatgtgctgagtgcacaggtgcagacgtgtgtgttctgtgtgctgagtgcacacgtactgggttgcaacacgctgctgttcccgctgtgtctcgggacagagacctatgagccctattacagccatacactgacggccctgccctcacccccagggtcccagtacccaagcaaggggcaccagccagacatgcatgcagacctgtgtgaagccacagctggatttcctgctgcccaaaagagaggaagtgccctgagatgaggctctgtgaggaactgaatggctgcaacctcatgccggccccagacgggaccacgaaccaccgccagccacaccaggcaatgtgcaacggggtcctcagtgtggcagtgaagcctccatggacgaagcaagacgggacggagcttgcatgaatgggcacaggag

SEQ ID NO: 8081 - DNA, 1240 bp, Artificial sequence
  DNA replication origin
ggaggggcatgggcccagccgtactgggagccctcggctttggggtggtcagtggagacccatgccccgtcccctgcaggcgtgtgctgcaggcccactgcacccctgggctgtccaccagagcatttcttttctctgccatgggttccaggaggcacttccctgcttcctggatactggcagctcggtggcctctgctcacctgcaggcggatggggcagcggatggggcgggagactgggccgagcgtgcttgtggccgcggccactggagagcctgctgggtcactctgctccttggttctgtcgtgcgcctcccctcctgctggccgaacggtcctgggtactgcttggtctcctgtggccggtctttggaggaggaggggagggaccggctgggccctggccccagctccgcctctgcccagctgccgtggggctgacagtggccccacctggtgctccctgcctggcacggggcggtcgggcggtgcctggaagctgccatgcttctgtgacgcctcagagcccttatttctccagttggccccgatgaggcttagttgcgtcatacgcgaaaggaatgggtgttaatgagctttaatcatctggttctgggaaggtcaggggcacagagtggactttaacaggttttaacccttttcttcctttgttctgtttcttttctcttcacatctataattggaagtaatgccaggcagagggttgggggcgtcctacgtgaaacactggtgaccccatcagggattccgggcagccacgcggtagcccaggcaggaaagggacaaccatgttcccaaagtcccgtgctgtcatcttgtgtcctccagtgtcctgggtccctcctgtccccctgcctcatggagctgccctggggtctcggacggtctgggagggtctcggggggtctcagagggtcttggagggcctaggagggtcgggaggtgtctcggtgggtctggaaatgtcttggggagtctcagagggtctgggaggttctcagagggtctggagatttcttggggggtctcggagggtcttggagggtgtgagagggtctcagagggtctgggaggatctcggaggggccttggagggtctcggaggggacttggagggtctcggaggtcctgtgcccaagggagatggtagtgggtgtccacagtctgtgtccacttgagtcagcgagctgaggcacacacgagttgtctttcacgtgg

SEQ ID NO: 8082 - DNA, 1455 bp, Artificial sequence
  DNA replication origin
gcaggccccgtggagtgcggtggctccctggctcacagggatgctgccgtccaaggtgccgtatcggctcgtggatgacttgggcagtgtctgtctggggtgctgtcgtcggaggagctgtttcaacctgtgggtgacgggccttgtctgtctgggggaggttctcttggccccgtgctctcagcccagtggctccatgctgctgtgcggctccctcttgggggcctgccttctctgccattgcagggcagggcctcagttttctctgggcggcaggtggctgtatctcaggactggaaggctccgggtcaggctgtgcacagccttcgttcatgtcagcccctggctgggcagcaccgccaggccctagtctttgggcctccaggcctggacagccagagggggcatctcaccaatgcccagatggctgccggggactcacggcagggcagctttgtcacgagagggccactcgagcccggagtaatcagggcttatggggacagggcagggtgagggccgctgagaccacccagccttagggtgcccttctggtggtcggggagcccttcctgggcagcggctttaggggctgctgtggggagggggaagaagatggggttggtgaggaggagcttttgggacactgtcctggtggaggtcgtgagggaggggagcggaccggttggcccagcagggctggccagtggagggacgtggagggttggtagctgccgagcctgggtctgagcaggcggggatgaggaccaggtgctgaggctggggaaggaacaggggtagctgcttggtcctggcgcatcttggtgccccctgggacttcctggaacaccccccccccagtgcccagagacccactgtggctgtctggatcggggcaggtcccagcccatggtgacccccagtgtgccggggcaacccggtccctctccagaccagaatggaccgatgcccagcacacacgtggatcggggcggagtgggcaggcgtggccaacaggagggaggatccggcaagcagatggtgatgtgcatccagagacagggcgttgacatgtggccaggaggctctggggtcatcgggccgccaccgtgcagccccccgggacttgatgcctccagagaacctgggggctgctgcccctcacctcacccccatttactttaaaatcagtttttgttttagagcagtcttagatttacaggaaaataggaagcacaagcttccatgtgctctacactcacttccctcgtgggtcccttgagtgctttcttacaacatgaggttaagcgtctgcagggtgagaagctggagactgtcctcgtgtcgctgggctgagagccgtgtgcggctgtgagtttttgatgaggaaaagcagtgtgggtcctggatttggacagcacaggcccctctgggagccgtgtgccttcacctcgg

SEQ ID NO: 8083 - DNA, 1125 bp, Artificial sequence
  DNA replication origin
ggccccaggtggtaccagttctcacgggtgttgaaggagagtgaggatggccctgagggaagcccagttggtttggttggggaggcgttggggctatggccctgagagaggtgtgggcggtgttgggaccaggccccttctgcaccctcccctggcaccgccgttaactctccaggcctggtgtggcccaagccaccctgcctacccgtgctaccctacccacacgtgccaccctgacctgcttgtgccatcctgcccgcccgtgccaccctgcccacccgtgccaccctgccctgccgcccgtgtcaccctgcccgtccatgccactctgctatgccgcccgtgtcaccctgccctcccgtgccactcttccctgccgcccgtgtcaccgtgccctcctgtgccaccctgacctgccgcccgtctgtggtgtgggggctcctgggctgccctgtctgcgtggctggcaggagcctcagaggcatccgaggctgtctctccagtggtgtcgtgtgtagactgtgttgggaaggggaggaaggtgtagccctgataccccacatgtggtaggagccaggaaggtggcgttctgggggttcctggagctcacaggttgtgtgcatgtgctcgctgaacaaacagggaaacgtgcggctccacggatgtcctggagaggaatcttgctggcaaatccatgcctttgatcacagcccctgcgctgtgtcctctgagctgtgatgcggccctgcaggccccgtggagtgcggtggctccctggctcacagggatgctgccgtccaaggtgccgtatcggctcgtggatgacttgggcagtgtctgtctggggtgctgtcgtcggaggagctgtttcaacctgtgggtgacgggccttgtctgtctgggggaggttctcttggccccgtgctctcagcccagtggctccatgctgctgtgcggctccctcttgggggcctgccttctctgccattgcagggcagggcctcagttttctctgggcggcaggtggctgtatctcaggactggaaggctccgggtcaggctgtgcacagccttcgttcatgtcagcccctggctgggcagcaccgccaggccctagtctttggg

SEQ ID NO: 8084 - DNA, 763 bp, Artificial sequence
  DNA replication origin
caccgcactccacggggcctgcagggccgcatcacagctcagaggacacagcgcaggggctgtgatcaaaggcatggatttgccagcaagattcctctccaggacatccgtggagccgcacgtttccctgtttgttcagcgagcacatgcacacaacctgtgagctccaggaacccccagaacgccaccttcctggctcctaccacatgtggggtatcagggctacaccttcctccccttcccaacacagtctacacacgacaccactggagagacagcctcggatgcctctgaggctcctgccagccacgcagacagggcagcccaggagcccccacaccacagacgggcggcaggtcagggtggcacaggagggcacggtgacacgggcggcagggaagagtggcacgggagggcagggtgacacgggcggcatagcagagtggcatggacgggcagggtgacacgggcggcagggcagggtggcacgggtgggcagggtggcacgggcgggcaggatggcacaagcaggtcagggtggcacgtgtgggtagggtagcacgggtaggcagggtggcttgggccacaccaggcctggagagttaacggcggtgccaggggagggtgcagaaggggcctggtcccaacaccgcccacacctctctcagggccatagccccaacgcctccccaaccaaaccaactgggcttccctcagggccatcctcactctccttcaacacccgtgagaactggtaccacct

SEQ ID NO: 8085 - DNA, 1542 bp, Artificial sequence
  DNA replication origin
tcctggggcgcgcgctcccgggccactcgcgggagcgcgcctcccgcggggaggccgccggcgaccgtggccgcgcgctgtgggggaaggggacggggcgcgggtgccgggtatgaccgtggaggaggccgctgccctcagaccgggcccaaagcgcagcccccggcggtgacgcgggagggcccggggtctccgttcccgcgaactccgcgaggtcccggaccggcccagcgcccccacctgcccttgcctgggcccgcccaggtcccggggcgccttcctcgcgggctgcggccgcggaagcagggagcacgggcgggcgccgggcttgccaccatcgccatcttgcagcgcccgcgtcctgggccggcccgagccgctgcgcggagcctctctttccctcgacccggctgcaaaggcagagtccgtgcgcctgagccccgggccgagactggagcgttctctggcggcctccaagggcgccggtgtctggaagcccggcctgggccagatcccttttgctgtcgtctccgtgattgccgggacagaattcccttccagtggggaaaagggaaggcggtcgcgcccttcccggtgccctgagtggggaggtgaaaccctgagagttggggcaagagggcctggagctagggccgaggcggcgggtgcgcagggtgttccgttgagcccgagccccccccccctccccggcctctccaccgtttctgtaggagcgcggcagggagcacacgtccctcgggaagaaaacggcgctggcggctgggcccgcaccgcggccgtcctcgctgagctcctagcgcgtggcctttgcgcgtctgtgtacccgtctgcagcttggggcagggttgggggagaaccgtggggtaactatttgccgttgcagctgaggatgacagctgcggtttgggggtccccctttctgtgtcctggaactttgtagggcgtggctctgccctgggcctcagcacccggcctcccaggtctcccctgcctgcccgggcctggccacctccctctggggtctgggtttggctcctggttggggctgtcggctccgcagacgccttttgctctctgtgattctgttgcccatctttgagcacctgcttccatacaggcgtcctctgcagagctctgggagggacacgcactgggggtggcatctggtcactcctgggggtgcctcgtccgcctgcccggccatttttggggtgtctgccatgtccccaacatgcacttcttcctgtcagccttgaccagggcagctgttagttctgagaggtgggcgtgtggttggggatgtcagcgagtaggatcttcccttttactcgcttgtcattaacctgagaacgtggcagtgggggaggagaggcttggcccggggtgcacaggactgtgggctggtcctgtccctctgatgagtgggacgagccttggtccagtcctgtgggcttggcgcagagccggccccctgccatgtcctggtgggattggaagtgctggctcgtcctgtctgcctcc

SEQ ID NO: 8086 - DNA, 1140 bp, Artificial sequence
  DNA replication origin
gctgccgccctcccgcgctcgcttctcgccccgcggcctggcccgtgcgcctccgaggctggccaggggcaccgaggccgcgggccccccatcgcccccacccgagccctgatttaccgtccgagagccggcggcacatgggaccccgagaggagaagcgcgcctgccccagtgcgtccccaggcgggggagccccgactcctggagggaccgcgtcctgcccggcccgggaagttcagggctggagaaccccttccccgaccccatttctcttttaacaagagtagggtttgtagctaaccaacgtcctgacagctcagctctgctttccctttaagcattaatatcaaagccctgcctgctaccggtgaagccccgacccgggagggcccgaaagtcccttcagggagaggccgcactgggcctgctcacccaggggctgcccctgcagactctcccgaggggcccagggatattcctcgcgccgcgagtggacgcttccatccaccccatggggagggcctctgcgcgtggctactctgagccctctggaatgccgagatagttgcataatttcagaaaccacggcatggagacggaatgatgcagactcctatccgcgagatacctgctgtaatttcgctgtggttcgtgaggacgcgtcctgggctgccctgagaagcctacgtctccccttcgaggcccgggaagacctccaaccccgctgacaatgctgggccctcagccagacctgccctgcgtgccacgttctgttctaagatcgggctgccgagctgtggcctggaggaaacctggcaggtgtcaccagagctttggggagggtgaggccctgtcggggaagcccagtgggagtcatgaaggagggaacacgtgtggagcccttgtagggggaggggcagccctgcagagatctaagaaaaaattccagaaaaatgagcagcaacctccaaggccaggcatcggtgcaggggacaaggggtcgtagctggaggggcctaggtgaggctgccgggaagggacgatgtggttggtggagtgcacaggcagggacctcactggactttcctgtctgctcagcatggacaggcagcccaggagaaggcagcacgtggccgggtg

SEQ ID NO: 8087 - DNA, 874 bp, Artificial sequence
  DNA replication origin
ggaggaaccggatgcagtgatctacctggtttgtcctggtgtccagtaacttggagttcttctttcacacgtggctggcacagaggagacactcataaatacccgagttgaataaaatagtccattgacatggagtcgcatgaagcagcattcgtccatccaaaacgccgatgcttctttagagtggactgagttttcccccaatactaggttgtcccacgcgatggacaaaaatagcccatgtggcaacggaggctggccggggggacctaatgcccatgcctctggcattcccaccaaggtgactgtccagtagctcccaggacagcccatccgtgtagggcaaacgccatgagccactcctgtgtgcaggcacagggcaggcccaggcacagggaggcgggtgggcaggcacacaaacagccaaacgctgaccctggagggcggtggtcatctgctcatcacaggggaaagactggaggtgggagaggcaggtgccacccgcaggagttgggacgagctgtgcacacggctgggcacacgcaaagctgagccttcttcgtgagcaacacggtcacatttgggtgtaggaatcttggctggagttgcccaacgtggggagcagacagctctgcagccaggaccccagttggagaaggcagcgcttggaacaagccaggacagtggacagacgggccggtgccaaatagaagtcatgataacgcgctgacaagctgtgcagacgaacactgtgtgtagacggaggccatggagagtgacgatggggaagacgctggatccctggctggcctgcatccctctccgttctcagttgcctgtggaattccggggagctctgctccagctacactgc

SEQ ID NO: 8088 - DNA, 965 bp, Artificial sequence
  DNA replication origin
ggtgatggctccagtcctgcccactttgccccatcctctgggtcccgagcctaccctgggcctttggactcctgccaggccttgcggcaggtgcatcacactgttgggttcctaagtgccacaggcctgggatcagcagacatgaggaacaccaacggtgtccctggaaagcaatccccggggctgggtgaggcaggaggagtgtagcaggtggggaagctggatagaggtggccaggatgggagctgtgctctgtgggccatgagaagggtggaaggacttgggggcagggagagattttgggtttgtcttcataagggtcactctggctgctctcagggggattgaaggagcaaggcagggagacacagtggcgttcatggtcatgggggaagggctgctttccagcggtagggctgagaaacggtgaggaagaagcctggggtggcgggtggcttgcactgactctgggctgcggtcctacctaagctccagggaggacggggtttctgaggagacctggggaacaggacacatccatggaaccccccggtggaggtggatggccgatgagcctggggcccagaggcagcacttgaagtcacaggagctaagagcaacagtgggtaaggcaaggagaggggtcagagaagcgtggcctgggtcagagcgtgccttccagggaggtgagtgaacctaaggggaacctggcaggaggagggatgagtagggtctgcagtagagacaatggggctggcagggcagagttcgggcaacgcggacctgcctggggagaagcggcttggagccgatgtggacgggtgcacatccagtgaaccacagtgtcagggcgtgatccccggggtggggaacgtgaggaccaggaggaggggctgtttgagcagggaattgggtgcagggaccttgggcgcaggtctgaggagggggatatgggcgaccccttc

SEQ ID NO: 8089 - DNA, 1630 bp, Artificial sequence
  DNA replication origin
aaacccaaaaaaacccactatgatggaaacagtcaacagagggtggagacgacctgttgaatgggagaaaatatttgcaaactattcatccaacaggggactaaaatccagagtatacaaggaactcaagcaacaataaaaaaaaaaatcccactagaaagtggcctgagggcacttttagcccccaaaatagaaatgtctattttgggaataaacatatctcaaaagaagacagacaaacagccaacaggtgtatgaaacaatgctcagcacctctaagcatcggggaagggcaagtcaccaccacgacgagacgtcatcttaccccagttacacgggctcttattagagagacaaaaaataacagatgctgctgaagatgctgaggaaagggagctctcacacacggtgggtgggcgtgtacattagtgacggccgtaccggttaacagtgagaacggtgggtgggcgtgtattttagtgacggctgtaccggttaacagtgggaacggtgggtgggcgtgtacattagtgatggccgtacaggttaacagtgagaatggtgggtgggcgtgtacattagtgatggctgtactggttaactgtgggaacggtgggtgggtgtgtacagtagtgatggctgtactggttaaccgtgggaacagcgggtgggcgtgtacattagtgacggccgtaccggttaacagaacggtggtcgtgtacattagtgacggctgtactggttaactgtgggaatggtgggtggacatgtacagtagtgacggctgtaccagttaacagaacggtgggcatgtacattagtgacagctgtaccggttaacagtgagaacagtgagtgtgtacattagtgacggctgtaccggttaaccgtgggaacggtgggtgggtgtgtacagtagtgacggctaaccgtgggaatgggtgggcgtgtacattagtgacagctgtaccggttaacagtgagaacagtgagtgtgtacattagtgacggctgtactggttaaccgtgggaatggtgggtgggtgtgtacagtagtgacggctaaccgtgggaatgggtgggcgtgtacattagtgacagctgtaccggttaacagtgagaacagtgagtgtgtacattagtgacggctgtaccggttaactgtgggaacggtgggtgggtgtgtacagtagtgatggctgtactggttaaccgtgggaacagtgggtgggcgtgtacattagtgacggtcgtactggttaacagaacggtgggcatgtacattagtgacagctgtactggttaactgtgggaatggtgggtggacatgtacagtagtgacggctgtaccggttaacagaacggtgggcatgtacattagtgacagctgtaccggttaacagtgagaacggtgagtgtgtacattagtgacggctgtaccggttaaccgtgggaacggtgggtgggtgtgtacaatagtgatggctgtactggttaaccgtgggaacggtgggtgggcgtgtacattagtgatggctgtaccggttaacagtgggaagtccctccaccaacagtggaatttctcaaaaaactaaaagtagaactaccatccagcaattccactactggg

SEQ ID NO: 8090 - DNA, 1248 bp, Artificial sequence
  DNA replication origin
tggcggtgcaggagtcggcggctcagttgtccatgaccctgaaggtccaggagtacccgaccctcaaggtgggcgcctgcgccgcgcaggctgagggcagcgaaggcgtctccagccagtgccctcgggccgcgaggggccgccccgggagggccagcggcgagggcggcgggagctgggcgcggcctcgcggggccgtgcgggcttctcaggggcgcccggtccgcgccgggcaggtgtggcgggggcggcggctttggccctgccaggcgcccgactgtggcccctctgcttgaagagctgcgtgagccgagccagcgacgactctggcagcgctaagggtggcgaatttggggctggggtggaagccggagtttgcggggcgtggggtctctggcgcccaggcagacggagtgcgcggcgtgcccagccagtgcccggccgccctcccgggagcccagggctgggaggtgccggctgcgccggtcgctagttaggaactgtagggagaaacctcacggcctgatggcacccagcgacctttttgatgggcgtcaccaaacctgaaatacagctcttgccgtccggctgccggttgcgtgaccttgggtggtcacctagccacgtcgcacttcttagaatgaaatttgtgctcctagtagaaggagccgatacttgttctttacctagttagtagaggatttgatatgaagcacctgggaaggaattccttaaaagatcaaggtcatagctttcctagagctgcggctgagcttcgtggttctgtgttgccttcctggagagctgcgtagtttctctctcctcccagagcgccctggtgttcacgtccgtctgaggacggacggtgtggcgacaggtgtggaggatgcagtatggccaggttgctgtgcgttcccccagccccagggcagttcagcgaagggctgaagagcacaggctgtgagccatcctgctggggtgtgaatcaggcttctctgtattcgtccttactgggagacatcagggcccggttggtgactgtttattcttgtcaggtttaagcagtggtagcgcctgtgtcacctcagggtgaaatgagtgaccacgtattgtttcaaacagtgcctagcattcattaaaaggtccctgctacagttagcgctgctgaagtcaggctgtaccctgctgtagctggtcttcataggaaagcagaagcaagcttctcctcctctttattaactagcggtt

SEQ ID NO: 8091 - DNA, 2803 bp, Artificial sequence
  DNA replication origin
cctcgcagagcagacgctctaaaggagacgcccaaccaaagcacagagagatgcaggcgaccgcgtcagactgtgacgagtgctgcaaaggaaaccaggcaggcaagggacaaagggcaaaaggaaccacatcctaattttatttagggcagcaatgagcccacactcaagcgcgtgctctctctctatatgtatgtatacacacacacatacgcacgtactttttcaggctcctccaaagctagaaatggccagccccgtgctctggggaatgagctgaagtgtaaacgcttgggaggatgtccactaaggcccccacgcagggagctggccacgcagggcggcactgattcccccttaccctcctcctggccgcgaaggccgcagccccagcagccatcgtggactcaaggataaacgtgagaaacagaaatcgagaaaacctccgagttctcggctgtcactgaacaagtgccgggggacatcgctgtcaactgacttgggaagggtggcttagtaaggcaggtctggggctcgtctggggccccaaggccgagatgcggcatttggttttgcgcctggtatcgtatctttgaactgccttccagacatgcgaagagagctccgggaggtgactacacgggatggcctcagggagagaggcctggggagggcagcagtgtggggacaggagcttggagaccgtctgtgaagccacacaacctctggagggctggctggtgacataaaacaaaaggcctccaagactagagaagacagcataggcaagtgaggacatgcagcgaggggtggggagagcccagaggatggtgtcacgggagccgagtgatgggagcgtctcgaggcagtggggtccgctgtggactgaccgctttcaggagcatcatcctgtcctcaagaggaacatctgggtggagtgttggggggcaaaaatctgatttaggtaaaacaggaagagagacatgaaggggcagagacagggagtagtagctggaggaggacgggggcaaggaaggggttttcacgagaggaagactcagagccacgtgcacaccagggagctgcacagccaatgggaaaaccgaccaacagagagagaaccaagtgcaggagcagccacaaggcaaagggcacagcacaggtgaggggggcacagcgcaagtgagggaggcacaggcacgggtgaggggggcacaggcacgggtgaggaacggcacaggcatgggtgaggggtacaggtgaggaatggcatgggtgacggctgcacaggcacaggtgaggggggcacaggtgcgggtgggggggcacaggtgagggtagcataggtgaggtgcagatgtaggtggggggcgcacgtgaaggtggtgcaggagcaggtgagggaggagcaggtgagggaggagcaggtgaggggggcacaggcacaggtggggggcacaggtgagggcagcacaggtgagggcagtgcagacgtgggtgaggggggcacaggtgcgggtgggggggcacaggtgagggtagcataggtgaggtgcagatgtaggtggggggcgcacgtgaaggtggtgcaggagcaggtgagggaggagcaggtgagggaggagcaggtgaggggggcacaggcacaggtggggggcacaggtgagggcagcacaggtgagggcagtgcagacgtgggtgaggggggcacaggtgcgggcgagggtggcacaggtgtgggtgagggggtgcaggtgaaggcagcacaggtgagggcggtgcagacacaggtgaaggggcaaaggcgcaggtgtggtgggcaccggcatgggtgaggagggcacaggcgtgggtgagggggcacaggcgctggggaggggggcacaggcgcgggtgaggggggcagaggcacgggtgagggggcacaggcgcgggtgagggggtacaggagcgggtgaggggggtacaggtgtgggtgagggggtataggagcgggtgagggggtacaggagcgggtgaggggggtacaggtacgggtgatggggctcatccaccacgggtgtgggagcaggtgcaggtcaggcagggtctgcgtgacaggcatgggcgagcatgaagtaggagggaaagtctgagagaaggacaggtatgaaaggctcgcctgggaggagaggaaggaggctgctctgggcccctccctcgagtggggcagcactcagggtcccggtccgggtccacagtcagccatcagcacagcaggtgctttcttctgctcagccacattcagctcaacagtcactaaatgtggtattaacacagtgaataattctttttgttcaggttttcaaaataatggcccctagctataacgattctgaaataacagacctaaaaatcatcagcagttaccccggcaggaagtgtgctttgcgatgcctgggtcagcacccagacatccccactcggcctgaagcccccagagggtggggctcgcagcacagcctctctgcagacggggcagtcacatgctacaggcaccggccggccttgtcttcattctggtgccaatgtgtctccttgggcttgcttcccattctgctgacccctgtacccacagaccgagtcactgcccagcacccagtctcactgtgagaccctccctgcacagctctgggacacccccagccacatcaccccaatggtgctgtgtgcctgtgtgcctactggggtgagagccggccaggacttcaacacggtccacagagcctcaccccaaaacttagctccgccaaccagctcacaa

SEQ ID NO: 8092 - DNA, 1268 bp, Artificial sequence
  DNA replication origin
tccactagaccctgtgagagcaccaaggcagcggtgctcacagcaacacccagggccaaggactgagcccggggggaaacgcgaggatggcgctctaggagcccgagggggtgagctgtgttccagccctgtgagaggtcgagatgggcagcaagaatccatcatgggtctcagcagtgtcttggggttacctggtgccctgactatagcactgtgatgggggtaaaaccagatgagaagcaattccagagaccccaaggcagggctggctcagacagaggggacctgtgggtcccgcacacagttaaccagaagacggcgcgtgtgcctcttcgtggataaccagaagacggcgcgtgtgcctcttcgtggataaccagaagacggcgcgtgtgcctcttcgtggataaccagaagacggcacatgcctcttcaggtcacagggatggggcagggggtctggtgcatgaacaaaggctggccttgggcggggcacaaatgacatatctccagtaaaagaaaggaaacagtgagcacaagcaggcaggcgacagacagggccaagccgcgggcagagcacaaggacggggcaggcatggggggctcatggagaaggaggggcatatggaacagtacctggggtacagggtgctaaaatgcctcaagaagcatggctatgctgccaggcagtactcgacacccactccaggcagcaaccgggttcctcagcagataggtgcggcttctgtggccagtgcaggggccttgcacagcggggtttccatgctggaatgttctagaacaatgggaagcagagaagggcaggggatggggctacatcgcgaggggtggaggcaagggagaaaggaaacgcaagaggctgaccacagccagatgagagcacaggccatgagaccaagacatactctagaatgcggcaagtggacaaaagtgagatgcgaagtttaggaatttcccagacagacgggggagaaattggttcggccaacagccattgactgactcctgtgccaggcactcgtgggtgtgacgtgaacgacgacaaaggacggcccgtgccctcgcagagcagacgctctaaaggagacgcccaaccaaagcacagagagatgcaggcgaccgcgtcagactgtgacgagtgctgcaaaggaaaccaggcaggcaagggacaaagggcaaaaggaaccacatcctaattttatttagggcagcaatgagcccacactcaagcgcgtgctctctctcta

SEQ ID NO: 8093 - DNA, 875 bp, Artificial sequence
  DNA replication origin
tgtcagcgcaaaacccggggtacaggtatcgggcgggaaaatcctaagcaggatgtgtgcagacaccacagggaaatgagaagaacctggagagccgcttagacactgacttcctgccttcagaaggctaagtcccaggtgcgtttccacaaagggtcagggcctctcagctggggaggaggccctcaccacagcgcagacacacacacggggtgggggagaaacacgcacattgggggggggggggcacacacacgggaaggggacacacgcacacaggggtggggacatgcacatggggggagggggacacgcacacggggagggggacacacacacacactggaggggggacacacgcacacgggggtggggggaggggaacacaagcatacgggggtggggggaggggaacacaagcatgtagggacacaggcatgccgggggacatgccacagggcggctggccataggcctggggccagctggggcgctgtgcctgcgtctggcgggcacccacctcgatgccgctctggcgcgccagcttgacagccgtgttgtagtagccgcaacgcagcaggtgctccaccatcatgcgatccatgcgcttcctcttccacacgctggccgccgcgggctggtcgctgctatgctctttgaggtgctcgatccggcgcttgcacagcttggcgctctcgtcctcggcctggatggattccaccgcctgagccacacacaacagaggcacgttcaggacagggatgccccgcagccctgcaccaagggaggccaggctgccccaatccacaacactcacaaggagaaaagcagggattacgggacagaaaaaaaaccgtgctctaccgagtccgcta

SEQ ID NO: 8094 - DNA, 1608 bp, Artificial sequence
  DNA replication origin
gtccgtcacatgagcctgggcaggtgcaggtgagaatgcccttccctgacacccaggtggaggaaaaatggcaccagatgggggccacagcagcccagtgggcagcacggcagaggcatcacagacgaccccgtccagcgatgagaatgttgggtgcacactggagtggctgcgagtcatgacctggagacttcggaaactcaacaagactgcagggcacccaggggcaccagccccggtcaccgcagaggatcagtgcactttgccatctggcagatcaactcatggcacagctgtgacacatcacattcacgcttgtgaaccgagacgccataccccagcggtgccgagagcaacagtgctgtgcaggtctgggcagatgagggcctccaggacacgaggactcactcgctcaccctgcccactgggcagctgctcgccactcccctcctggagggcaggacggacaccacacacacacacaagcagggaggctgtgcagcagtggggagaaggcatgggtgggagggtgccgctccacccagggcagcatctgagagaaggtgaacgaggtgcgggacaaatgccgaggacaagagccagcaagagggtggggccaggtgggtctgcgggtgagtccggagtgtggggcctgcagatgagtccggagtgtggggcctgcagatgagtccagagtgtggggcctgcgggtgagtctggagtgtggggccgggtgggcctgcaggtgagtctggagtgtgggggctggggtgggcctgcgggtgagtctggagtgtgggggctggggtgagcctgcgggtgagtctggagtgtgggggctggggtgggcctgcaggtgagtctggagtgtgggggctggggtgggcctgcgggtgagtctggagtgtgggaccgggtgggcctgcaggtgagtgtggagtgtgggggccggggtgggcctgggggtgagtctggagtgtgggaccgggtgggcctgcaggtgagtctggagtgtgggggccggggtgggcctgggggtgagtctagagtgtggggccgtggtgggcctgcaggtgagtctggagtgtggggccgggtgggcctgggggtgagtctggagtgccgcaaggctggggagctgggcaggagcgtgacaggagtgtgggggaggctgcaagccagcagggcgtgcagatggctgcatgggggcgtgagtgtggccccatgggcacccgaggccttggactgcacaatgtgaggccgcctccaaggctgggaagggagccttgtgctggggttgaattcagccagggctgaggcccatgatgccccaggtgggagccacacacatgtgggtgggatttaagccgtggaaagagagaagacccctggttagacagaagcagggaggaggtgggctgaggagccgtggcagggagcagcatgggagggaggcctgtggggccaggcgcatggctgggcatggggaggctgggcccgggacagggccatggggcacaatcctctcgcacaagtcctgcctgagaggttctcaagtgttgtcatctcagtcaaatggaacacggacgccaccttaacccgagtcag

SEQ ID NO: 8095 - DNA, 980 bp, Artificial sequence
  DNA replication origin
gacccaactatcccgaatgtagactgggtgctggcttgaacccggggctgttctgggagaacgtgggcaagtcctgtcccgaggcgctgatgccccgggtggggaggagacagggaccacatgtggggctgctggctggtgcctcacaggggcatgaggcagagaagcaagcttggagcaggcaggacccaggtcggcagggcggggaggagacagggaccacatgtggggttgctggctggtgcctcacaggggcatgaggcagagaagcaagcttgcagcaggcaggacccaggtcggtagggcggggagcgcctgcaccgaggttatggacgggggaccgcacagacacctggcgagaacatggcgggcagaagccggggccggtgccgaggccccaggcgggtggcacatggaatggaggcctggcccaggggacactgaggtcctaggtggctgtgaggccaaggggcggctcgcgtgaagggagggcgcttccaggatgtgtagaagacggagagaggccgagttggggctgctggctgaaggcactatgcctgaggcaggggcgggggtgggggaagctcctgcaggaccaagtcccacatgtgtctgcctatgagcctctcacgtgcacctaagggaagcccaaccctcaatctgaaatctcagcaacctcagtccaacgtgggccgagacttgtggctggggtgggggcagcggcaacattgaccgcagtcatccaagatgagacgcggattctacggaagtgacatgtccgtctaaaccgtaagatcttccgtgtggtttcaggacattctcagggcttcaccccggaaacaggatataggcgtgggcaccacggagcgagtcttgggctggggccgcgtgtcactctgggttcacatggcctggctctcaggacggcatgaacagaaactccacgtggcagatgaatccaccccggaccactgcattta

SEQ ID NO: 8096 - DNA, 1181 bp, Artificial sequence
  DNA replication origin
aagtccctgcccttgcgtggaccctggagaggcccggggtcctgctccggctcctgatgctgacctgggcgcatggtggcaggtcaggcctcgtcttcacgcacgagggagccaggcctgcaacgaggtcccttctgtgcctgagagggctaaagcggggatctcgggacccgggccagtggagagtggcgtgtgagcattgcggggacacggccaggggccccctgtcaagaggaggggctcccgctctgctctggcctccgtgtggcctcggtgcctgtgtcgctggcctctgtccggcggcagtctgcttccatcccgagtcagcctccgtctccttgagggccccggccactgtcagccctggagtctgaaaacaaaacgtgtccatcccggagtccctccgtcacagatgtcttcatctaggtggcagctggttccgcatagggtctgttgacctgttacccccactccgcatagggtctatttgcctgtgttaccctggctccgtgtagggtctgtttacctgtgttccccccgctccgcgtagggtctctttgcctgtgttccccccgctccgtgtagggtctctttgccttgttccccctgctctgggtagaatctgccctagagactcgcggggcctccacctcataatgtctgagccgagctcagagctgtgccctctgcggcctcgtctgttgcaggggagcaggcaggtcccaggaagtgcgtgtccttcctcccgcaagcagacacgtgctgcctcgaagcctcagcagccagccgggcaggcatggcaaacaacaccccagtgtctcgggggcaggcgcagtgtgagctacatcctctgctggggccgtcttgggagtggttctccaggtgccagggcctggtcagggaagtccggcctcagctcagcgtggccctggagccacccacaaggcacacgggagctgggctggggtggcaggtggggcatcggcaggacgtttgtggggtgagggagtgcgggtgtttggctgggagcccagagggtgttgtgtatcactcactgaggctggacaagagggaaggcggagaagcctggccacatgtctcctgagggctccaggcagggccctctcacctgctgccagggtcccagcccgcaggagcttcccgtccacctctgaactcac

SEQ ID NO: 8097 - DNA, 744 bp, Artificial sequence
  DNA replication origin
gggtggatgcaggggtgagcacatggtgggcatggggtgggcatgggggtgagcacggtaggcatgggatgggtgcaggggtgagcacacgggcatgggggtgggtgcaggggtgagcacatggtgggcatggggtgggcatgggggtgagcacggtaggcatgggatgggtgcaggggtgagcacacgggcatgggggtgggtgcaggggtgggcacatgggcacgggagtgggcatgggggtgagcacaggtgggcatgggggtgggcatggggtgggtgcagaggtgagcacgggcatgggggtgggcaggggggtgagcacacggtgggcatggggtgggtgcaggggtgggcacatgggcacgggagtgggcatgggggtgagcacaggtgggcatgggggtgggcatggggtgggtgcagaggtgagcacgggcatgggggtgggcaagggggtgagcacacggtgggcatggggtgggtgcaggggtgggcacgggtgcagagtggagccactcacccaggagcagccagctgctgggttggggccaggtctgagcacagggtgcctggttagtgatggcagaacccccaaccctaccccagtgaccgcggagagtcggaggctccaatatttacagataaaatacaaagcgtcagcaagagaaagaaccacggaagacggtgcagcctaactcctgactcaggggctgtagagaaaggagaaccagggggacaggc

SEQ ID NO: 8098 - DNA, 2046 bp, Artificial sequence
  DNA replication origin
cagcctggccccccgccctgcccgtcccacacagccctgtcccgatggcgatgcgtgccagcctggcccccctgccctgcccgtcccacacagccctgtcccgatggcgatgcgtgccagcctggcccccctgccctgcccccctcacattgtagccgtagacgtagccgttgggcagcatcatgggcggattgttctcgttcatcacgtcgccagaaatcttgcagaccaggcgggagttggcacagtgggccatgggcaggggctgcgccagcttgttcagggagcggctgcacacagggcagtcagggctcttggagctgccgtcctccttgtagcactgtctgagcatcgggtcaaggaagggttgggggccactcagggcagccggggtgagcccagccccctgtggccactctgccctgggctgcgtgcccttctggctatgtgggcgccatgctgactacacggggctgtctttcgaggcacaggaagtgctgcactcgacagctaaacagccccactgaggcctcggtggagacaagaagcctgcgccttctcaccccggcctccagcaccaggaccacaggcacagagtggctccgtcgcccgccgccctctccccggccacgcaacctctccaggcaggacaagagccacccagcagggacgttctgctggcacctaggaacaggcagtgggcaagcacgccagccctctcgcccagagttccacaaagaggggacaagggagggggcctgagtctcattcataccccggcacagccaggtaccagcagcaatcgcgaaacactcactgccctctgggcctgaggcaggtcacatgaaagacattcataggcggggacagagtcagttgcaggaggacagtcagtcacaggtggggacagagtcagtcacaggtggggacagagtcagtcacaggagagggcagagtcagtcacaggcaggggtagagtcagtaagaggctgagtcacaggcaggacggagtcagtcacaggtgagacagtcacagggcaggggcagagtcagtcacaggcgaggacagagtcacaggcgggatggactcagttgcaggaagggacagactcagtcgcaggcaggggcagagtctgtcacaggcaggaagaagtcagttgcaggtgggacagagtcagtcacaggaaggaatcagtcacaaacgggacagactcagtcacaggcagggccacagtgagtcgcaggcagggaccaagtccgttgcaggcgggagccgagtgagtcacaggcaggaactcagtgagtcgcaggtgggacagagtcacaggcaggatggagtcagtcacaggcagggacagagtcacaggcagacagagtcggtcacaggtgggacagagtcagtcacaggcgggacagagtcagtcacaggcaaggttcttggtaatcacacgggaaaactattctgaatggtaatctgccggctgccagaacacatcaaaatcgggcttttagatcaatgcccatggcggcctctgagatgatgagagaggaagcgcgccacttcccagagtgaaggctgcacgacgcatccgaggcccctcaacacggccccaccccgaccatccagacaccacgcaagtgcagcacacgggagctcggggctgtctgtggtgggaggacaagagtggcaaggtgcagggtcagcgtgttaaaatatgaccaaagatgccaaccccaggccaaaccgcactgcgcacgggaggtaggatacggtgtcttgatggctgagaggccagcctgcagggtgagggtgaacacagaattgtttcccagctggtgtagtcggtagttgtcgtaccggaactgctggatcagcatccgccaccgtgcagggtccagaaggtcctggaagacagagagcagagggtcctggggatgctcccagggaagctcctgggacagcttaaaaacgtggaccatggtgaagcaggtgccatcggcccacagccatcccccagtgacccacacactttgcactaagggtca

SEQ ID NO: 8099 - DNA, 772 bp, Artificial sequence
  DNA replication origin
ggctgccctgagtggcccccaacccttccttgacccgatgctcagacagtgctacaaggaggacggcagctccaagagccctgactgccctgtgtgcagccgctccctgaacaagctggcgcagcccctgcccatggcccactgtgccaactcccgcctggtctgcaagatttctggcgacgtgatgaacgagaacaatccgcccatgatgctgcccaacggctacgtctacggctacaatgtgaggggggcagggcaggggggccaggctggcacgcatcgccatcgggacagggctgtgtgggacgggcagggcaggggggccaggctggcacgcatcgccatcgggacagggctgtgtgggacgggcagggcggggggccaggctggcacgcgtcgccatcgggacagggctgtgtggggcgggcagggcagcggggccaggctggcacacgtcgccattgggacagggctgtcctctcgccccaccctgccttagcttcgttcgaaatggatgaaggggtgggaaggacaggcgaggtggccccgggatttctttggcaggtgtgccttcgggaaggaactttgcctgagaggatgagtcattccctggtggttcattgtggggattttccatggaaatccgtgtgtacgttgtagtcgcttgccttaatgcattcccggttttatttttcagtctctgctttctatccgtcaagatgataaagtcgtgtgcccgagaaccaaagaagtcttccacttctcacaagcc

SEQ ID NO: 8100 - DNA, 1205 bp, Artificial sequence
  DNA replication origin
ttttatcatctctaagtttccattggttcttttaaaatatcttttagaagtatcttctaattcttggcttggtgcagtggctcatgcctgtaatcccaacactttcggaggctgaggtgggcagatcacttgaggccaggagttcgagaccagcctggccaatatggtgaaaccctgtttctactaaaaatacaaaaattagctgggcgtggtggtgggcgcctgtaatcccagctatttgggaggccaagacacgagaatcatttgaacctgggaggcagaggttgcagtgagccgagatcacaccactgcactccagcctgggcgacagagcaagactctgtctcaaacaaaaacaaacaagaatatcgtctaactctcatcatgatttatcttggctttctaatcttatccagcattcaacaaatattgagcacctgctttttgtctggcttcatgaaacaaagatccctattttcagggactgtatgttttaggagtgaagagaaaaaagcgaatcacctagtaagacagtaagtctgtgtgacacaagggccagaagtgccctgggaacaagcacggcaggtttagaaaacggatggggggtgttgagccagggaggtgagcgggtgcagaagtatttgctcagggtgagacatgagcagtggctggaaggaggcaaggaactctgtggatactggcagaagcttcccggcagagggatccgctccccagaggccgtgtggcagcaagagcaggctggagaagtcaaccggtgggatgcagggggcagcaaacacaggccacgacaggttttgccttgccctgggatgggagccgtcggaggattttgtgtagaggaatcctgtgatccgaccttagactttcaaaggtccctctggttgctgcatgatggtctaggggtaccagggtgcaagggaaagacaaggtgacggcagtgacctgctgcaggggtggccaggaattggcagtggcaatgaggcagtgggacgtgctcagatctggatgtgttctgaaggtagggctgtcaggatttgcaaaccaaatgggcatggagtgagaggaagagagaagcccaagtgagtcagataattggtccaagcgaacagaaggatgcagggcaggcccaggcacggtggcccaggcacggtggctcacgcctgtaatcccagcactttgggagg

SEQ ID NO: 8101 - DNA, 1075 bp, Artificial sequence
  DNA replication origin
tccggtctgggcctcaacgccacgcccgcccgcgggctcgcagccaggtcccttcacctgcagagggccggtgaggaccgcccagacgggcgggcgcgggcccccgcccccgagctcgccccgcgcagggcgccctgaaccccgcggcgcctccccgctccggcctcgggaagggaatccctgggcgggcttgggggtcttcggggcccacctcggcgccagacgcacagcaggtacccctgggcccgggctggccctgggcggaatgagaagcagaggcgccgtccgtcctgccgccgaagtccgcagcctcgaacgcaggggagtgcgaggtcggctgcggacggacggacctggagaccgcgcttgggaaaccgtggcttcggaggagcgtggtgtggaccccactcgcggggcgcccggcacaggccacgcagagcagacgcccgactgggctcccggggctgggtgcagggcgggggccgccggcggcgggccggggtttctttttcggggggatgggcgtgcccttgcattacggtggtggtagctcacaactctgttaatcgtgtttttacagggtgggtttcaggatgtgtgagttatatctcagtaaagcaattattttaaaaaggaaaagaagagggactccctgcgccgcccctctctgcagcaccagcttctgtccctgggcgtcagtggctcccagctcctagcttgcagccagccccgagccgctcctccgcctcaccccttcctcaccctgcctcttgcttcactgagcaagctgcagccagaccctccctcagcgccccttgccctgtgcatccaatccccggcctgtggcttcctccaaggcacccatccagcagtttccctctgtcttctacagcgtggttttttttgttgttactagttctcattagtataaaagggtgccgtttctcccatactaacaaaaccctctctttatccaacttttcttaccaattgctaagtccagtctcctttacactgccccggggtgtcctctcagccctcaggctcaacagcacagccaagctgcccgtccact

SEQ ID NO: 8102 - DNA, 1534 bp, Artificial sequence
  DNA replication origin
gggctttgtctctggtgaacatgtgggctcccgccctaggggtcaggggtcaggcccctcttcagttgtccttcctcccttcaggaaacagctgcgatcgcaggcgcctttgaggtgttgctgctgggaatgctttttagagatgcaggtgtgtgtcagagtgattctgtttttcggtttttctcttataaacccattaagggtccccttgcttggtattcctccaacagggatctctctcccgggaagtttccctcagctgtgctgtgggaacaggaatgcaggcgcctccatcccgggggtacctcaaccctgggggcatctccaccctggggcacctccaccccagccaccccagggcaccaccaccctggccaccctgggggcatgaccttcagctgccctagcagccctgccagcccctctcctggcctgagggagctgaaggtgaggaatgaccgccctgctgtgctgagcccacaccaggtttgcggtgggtgagctgcagaggcggggctctcagggaaggatggtgcgccctgggggctgcgtgcgagctcccacaccctgtcctgggccgtggtggggctgttggaaggatgcaggccagagggaaggtgaggcggagaagagcttgcccacagccgcttctgagcgcgtggatggagcagttgatgcccaccgtgtggccatgttactgagcagtgggctcgctacccagtgcacacagaagccagtactgcagcagcagcttttgggaagagaaaggctttaccagggcaggcagcagggaggcaggtgcctccccagttcttcttggccctgttatgcccgcaagacagcttggcgttctgttagcaacagagcaggcctgcctgggctggtcttatggtcacagctgcagccatggtgtcttgtgccacagccgtgctgtgtgcaggagccaccgtctttctctggcctgatgagatgagtcaccacacaggtccctgcctctgcccactaagtcgggcgcaggaaggggcagggtgggctcaaggaactggcttttctcaggggaaaaagaaagcaagccttcctgccattctccagctcctcaatgggaggagggaggcgggggtggcacgagggctctccagactcagtgagggatccccccacacctaccctggcagagaagtggccttgtcaaaaggaaatggaggtggttttcatacaagtcctcaaggacagaatgttccagaagtacttgtccctttctgtcacctgacatgctgtggtcacaccagcaccacgggagaaccctgtgtggggagctagccctggcccgttgcctaagagcagacgcacctgctccacctggtgggaagataactcacctaagccccgggggcaccgcagacgcacctgctccacctggtgggaagataactgccctaagcctcaggggcaccgcagacgcacctgctccacctggtgagaagataactgccctaagcctcgggggcaccacagacgcacctgctccacctgg

SEQ ID NO: 8103 - DNA, 1435 bp, Artificial sequence
  DNA replication origin
gtgtcgggggccatccatggagcttgggtgttatgaatcttgtgggaacagctggacgagaaaccactcccctaaaggcggccctggggcccgttcagtttgtcctgcttcaggactgcacggttggctgaggcctggggcttcctgaccgtgttgcagctgctcacggtgaccgtgtgtccagacctcaggcgggggctctgcaaggagcctcgggaagccaccctccctgcccactttcccctctgcacccctcaccgcactggcctcttctctgtgaagctgcagcagaagggggcacacgggggtcatctgtgcgaaagtccggaccgttgggcctcaagaggccacctgggtactccagcgcctgccacagctcgctggcacggcctatcgggggaacagggcccctgccgccgcctcagctcctgccgcaggacggttctccacacccgggagagggtggggaggacagtgccaaggctgtgtcctgggatggaaggtcaccctaaggcgtcttccttagagggcagaggtgggtccccctggcctcttgccagtccccgccatcaagacccagggccaggtgtgacacggaatattgccgtccccacagcacccatttcaagggccgggctgcctgtgcaaacaccgtaaccactaaagccaatgctgcggggtctgcggggcgtgatgcgggagcgtctcatccgtgtgaggggctgatgtcagaacctccagagagcgggggggcaggggagccgggcaagggtcctggggcagcttcagggcctgaggagcaccgtgtgcccagggcagccactgcctctgtgtctggatgcccaggaacgggccccgagtgccgggacgtcctggcacattgtccacagctgcctgtgttcccggggttctgctgggctcacacacgacacacgagagcaggatggtaagcgaggcaggccctggtctcactcacagcaggactgagatttgagggccccgtcctcagggctccacagacaccgcccctagtgggggccagattagggacagtgtgaggagggaggggctgggcaggctgctcagcggccggagaggtcgggaagaaacagctgtccctgtcacacattgccaccaggggtgccccaaggccagtgcttggtttctgagcctgggaggtgacgcccagcaaagctcccaccgagaagcggatgcccgtccctcctcccacctgcctggcccgtccccaggaccacaggctttgccctgagcccccaggcagttgggctgagagagaggcctgagcagctgctggtgaggacccggttagtcctggatggcaccggggccctgctgggcaggcctggcttcacgttccacctgcctggcccgtcagcaccacgcacctggtgcatcgagctcacggcttcatgtt

SEQ ID NO: 8104 - DNA, 832 bp, Artificial sequence
  DNA replication origin
ccgcttctgggacctggggcggccctttctaagcctgtctgtctcgggccagggccaaggggcccgtcgcccatctgtctctgaaggtggcacccacaggcagtctgtcagtgtccgagggcagcagttgccccaggaccagtgcctaactttggtgatgccgccactgggagcccaggcccctggcggaagcctcccaggtcacatcttgccttgtttccccacagggcagctgtgcggagggtagtggcagccatgaaccggatggaccagaagaagcacgagaagttttcaaaccagtttaactacgcactgaactagagagcggggcccagtgcactggccatcagcactttctccctctgccagtgtctcaggacagcagagtgggcgtgggtctgggcagtaaccatgctttgtctattactgtgtttgatgtaaagaaatggtgtgttgcaatgccctgaaggtacggccgctctgctgctacagggttcggcatcgtctggtgatgggtctggcctcgcagaagaggccctcgggcctggagatgtgaacacaggcagcgaccctgttccagagggcttctgcgagtcctcgtgagaccagtgcttgtcgtggtgtggggttcagcacggacggaatgtgtgtgcagctcagccttcagagcgtgcattccccagccaggaggcgaccactcagaggaactctgggaaacccacttttgtgcaaatgctgtttttaacacaaacacaaaggctagtgaaccgttcagtcatctgctttctgtttctggatgtgccttttcatacatgtgtcctcttgtccctgg

SEQ ID NO: 8105 - DNA, 1542 bp, Artificial sequence
  DNA replication origin
gagaggggtgttgctggccactccctttcttcctgtttgcagccgggggtgaggatgtggtggctggagcctcagtttccattgggttctgtgaggctgaggcccgtccaggcctgatgcagcacagagagccaggagctgggtctccaaggactcagtgaaggtctcaaaactgcccagggctgccacggccagaattccctcacaaagagaaagtaaacagtctcctttcaactctcttcattcaggttttctcttacacgcagccaaacccaggcctgacccacacagcaatggaccacagcaccatcggctggtgggggtggggaggtggcctcaatgggaggccccttaccgtctgggctcagcggtccctgggcaggagacgggagcccagggcgtgagagcaaacgccgcccttgtctgggctcatgctcgcttgacaagaggccccttctgtgcctggctttgcagcaacgacatgtgtgtggttctgggaacttggggcaggtgtggtccagggcaagatgggtcctgagccctaggaggagggtccatggaagagtgccctcagatcctgaggttgagaccttccctcacggccctgacaccaaagtgggggacacgttgagacccctaacaaggctcccgctcacctctgcctgcagcacaggcccagggagctgaaactgagtcaggcacaggcagcctagactggaaatggcgggcaggggaggcccaaacctggtggaaatgggggtggtggggcagcccgagggctccctgggaggcaggcaagggaatggctccccaactctcccagggagactgggggcctggggacccagtaggagtgtgggctaaaaagtggaggctccttcaggagggagcagggcacccactggcaccagagctggcactgcccccagcaagccccatgactgccgggcctcagtttcccacatgtgactctcagcaaagcacagtgggaggctcaggtggctttgcacgcagtccgactccgacgagggtccgctgcagagtgactgtgaatcagagactggaggaaatgccccccatgcctgcagcatgaggctgtgggctgtccagggagcttagagaaggggtggtgcaaggaggggggtattgcttcccagacctcacagcccccggcccataccctccatcccatcctgcagcccaggggcactgctagagggccctccggtgtggctctgtgtttctggctgaggcttgaggggaggagacagaggaggccagggtgggggcatgtggaagctggagggacggggagccaggatctaagctccatgggagggctgcacacagcggtctggcccggctctgagtgggtctgaatctggcctgcaccgtcgcagccaccttctatcatctccctgtggggctgtgagctcctggaatgttccagcaagctcagcaaaggggaaggcccttgcagcacagacctgggttcctcctggccacgcagcagctgctttcccactcagcagccccagtgcc

SEQ ID NO: 8106 - DNA, 1499 bp, Artificial sequence
  DNA replication origin
tcctggaatgttccagcaagctcagcaaaggggaaggcccttgcagcacagacctgggttcctcctggccacgcagcagctgctttcccactcagcagccccagtgcccagcttaggccaagcccgctgcactggcttcagctgtgagtcgaccctctggctacacttggccacctgcaggtggctcgccttccctcatggacccccaccgagcaagtctgagctctgccagcggagggaggagggaggagggaggagggaggagggagaggctgccctgcccccgggctggtgagcctcaggacgcttgctgcaggcaggtgacttcacctatgcggacccagaaagggagcagagagcaactgggagtcaggccggcccttggctggaggaaccaaggcctgcctggggcttggggtgtgggggcagcaaacacacagggtgatcccagccgcccctgcgccccgccccctcaacctgcccgatggccggtgctgctctgggcctgctctctgtccacaggtgctggccaggccagtgggcagcagtgtctcccatcttgcctgtggcactgggtattcactgccgccacctgcccccagccctcccccagtggttgctgtcaggttgacagcccagagatgagctcagcccactcacggaaaatggacaggacaccaggagactgggcccagtcagggcacagccgccaggcagagccaagctccctctgtgaggcaggactcaggactcccgccagtggcagaagaggggcagcacctgcccggctgtggccagtgtctcatgccgcctccccaccctttctggggctctgaaccctcctcccgtcgcccttccccgcttccaagcaccagcttttgcatccacactgccgcccagcccaagcgcctctgcctctcacctccctgagcccagctcaggcgaacaccaaacccacaggactccgagagcctgtgaggggatgtagggactgtttccagcgtcgttggaggagaggtggcagctccaagagggagcactcgacccgacttttgggggcctgggtctgaatgggctgggacgctcttgggcaggtagctgagcccaggcagccccttctccccggggaaaacaggcaggcgcttcttcctccaggcagtagccgaagctgacaccgcccccaagctgacacgcctagcccggtgctcccttgcggggctgtggggcaggggagtgggaccggagcaggctgcaggggtggggagcaggaggcggaaaatgccgcggccccaccagctccatggctaagaggagaggcgaagaggaagcagctggtcactttccgagacctgtgatcttttttgggacggggagggggcggtcagggaggtgacgctgggacctgagcctcagccagcttggcgggtgagcccctgcgctcagcccctgcgcccacgacgacgggcaggcaccagcagagtggcctgaattccggccgg

SEQ ID NO: 8107 - DNA, 1010 bp, Artificial sequence
  DNA replication origin
gcgcccgcggcgcccggtccgcgcatttatggcagccccgccggaggcgcccacgcgcccacacgccgaacacacgtgcgcccgcaggcggccgcggggctccgccgccctcgttagcgcgcgcgcctaattggctgcgaacggtcccgggccgaggaggcggaccccgcacaggacacacggacggagccgccgggcgggacgaacagacacgcagcccggagcccagagcggtccgcaggcggctgtggtggtcagcggcgcgtcgctgcgcctccgctcgtccggaaacggcgcgccagcctccttggctaagggggaggagacagccccggcttttaaataattgcgggatcaatctgcggcggggccgcagcgaccccagggcgcgcgggccagcgagcgccaagagttggctgggacatcccggcgcaggatgcggtgactggcctggcctctcctccgggcccccagcgcgcagggccctgagctccgaaggctcccacagctctggcgcccctcggcagttggggtggggatggggggagaggttctcacgcgcgattctccgagtctccgccgggtctgcagccccctcccgcgcgttccgtgggtctcggtcccgcctctctcacttgctcccgcttggggtctccttttgcgtctccagggtctctcttgctcagggtctgtgcccctccatcccttcccacgcccgcccctttcacgtcgtcaaattagggcccgacctggagtgccagcagaggggcggagccggcggtccccgggccgctcattagaagtggaatcgaaaatgagagactgcttgtccctcttaacccgcccccaaaagggggaccgacaaattgcacacacagcaggcggcctacataaaatcgatcctcttcaagtaaggagaaaatgtgtgtttcttccaaaaagaatacgacaaatgcccccttctccacatctggataaataggaagccccgcggcctgagtctttatttg

SEQ ID NO: 8108 - DNA, 1404 bp, Artificial sequence
  DNA replication origin
aagaccagcttcagcgtggctggaagtgtttgttccccagaggaaggccatggattgcggagagggtaaagggaggagaattgtgggtaaattctcccatgggtcacactgctgattcaattaacgcttccccagttggatggggctgcaatgagggaagacgggccctactgtgaatgcacaccacacatcctggctcctgatttgagctggagccaagctccacagcatggcagggatgaccactccccctgtgcaggggactccccaggtctctgtttccatcctcttcctgcaccgcctctggggaagacaaagccgagccagaggcagggattcagatgtgttcagatgcccgggacttaccaaaggcagggatatcaagagggagtccaggaaagacagagccagaactggacaaaaatacctctctgtaaagtcccccgtggcctgatccgagggcagctcgggggtgtaaatcccaccagccgctcagccatggaggagggggtagtgtgctcccaggtgtctctgggggcccagggaagttcctccaagttaagccatgacacagcagcccagagcaggggtccaccagcccacacggagaaaatggatcagtgccagaccacactgttcgtggaggacagagtcaaggtggccagagccgtttccctgcccaggggctagacagatggaccaggatgtcagacaactaaaagggtggaggtggggtgcacaggctgaaacactgccccacctgccagcattgggcccttcactcttccctgtcccagaatgcttttgccttttgcatcctgcctctacagtctcgggggcacgggggcgggggggggatccgccagtgaacagataaaggtcacgtgacgtgttaaggcagaactgtgaaagcttgggttggaggggtgcacaggatggcacctgccttacttgaggaaatcagggtggcctccaggtggtgctgccacgaaggggagcagggatgatgcatgtgcactagtgagtggctaagggcaccgagaggacatggcagctcggccatccaggcacagggaggggctcggagtaaccaccagcagagaggacatggcagctcagccatccaggcacagggaggggctcggagtaaccaccagcagagaggacatggcggctcggccatccaggcacagggaggggctcagagtaaccaccagcagagaggacagctcggccatccaggcacagggaggggcttggagtaccgggtacaggcctagggagcatacaggatagctggaaggatccagccaggaatggcccctgataccaggctgcagagcctagacatggtccctggcacttctggaaggggaggagtactattcaatttacattttagaa

SEQ ID NO: 8109 - DNA, 1062 bp, Artificial sequence
  DNA replication origin
gcctctcagtcctcctggcccgctgagggccccacctcaagcaaccctgcctgacgtgcccactggctgcgtccgaggaagctgggccatgctgggcctgctggtggggacgaggccagcgaggcgggcagcagtatcccaggccttcgcagcacctgtccccagattagatttcccctttctcattaccaccgtaatgggtccttcagacctcattccagccctagatattatctgacccgtataattaattaattatagcccaaatattatagattattaaaaatagcataactaatagtgtaatatctcaagctgtcgactttaatagtcaacattgtcttggcggagcttatcagcccgggacacccggtgagaatattgattccgggtaattttagccgtcatctgccatcctgacggggaattgtcaggtcctcacccgagccgggcctcatttgaaatcgttaaacctccgcgcagctcacagtggatcttaatgtttcctttttctccccttcaatatgtttcggcaacagagaggaaaataaatggagaattgaagtgctggaagtgggataggaggatccgttcaagaggagggggtgactgacttgtctcttgccttggggacgctggactctacatccctcgtcttttctggggggctccttttggccaagcccacgaggctgtgagggggaggggccaaaggacagggccgagggactgagtcgcacacagacaccgcacatggcactgcagcccggccggagaccagggggcccactccaggggccccgccacaggcccacgacagaggccccggacacgctcaagccaggagcagaaacacacgcatccacgcgcacaaacccacggacgcccggacgctcacacaggccgtggttggcatgcaccgtgcggtcacacacggacacggacacgcgtggatgccccgcaatgcacacgatcgtagggacacgtggatgcggacactcggacacaccgcgcggtctcaggcgcacgcacccactcggagatcacaggtcggacgcgcgg

SEQ ID NO: 8110 - DNA, 982 bp, Artificial sequence
  DNA replication origin
gttggggtcctggtggcccagccctgcatgagcccctcctgtgggaaggacaatgtggctcattgttaggggaggataggctgctcagccaggcccccccagtcactcaccaccccccagagcgctgccaggagaggatgtttagtcccctgtgatggaggagaagtcagacaccactggggaaggctctcctgccaggcagggagctgaggcttaaaggccccagagcccccacactttcctccaagcccccttctactgggccacctggactcagggaggggttctgccttacactccatgacttcccagggaccctgacctcactggacaggaccctggggccaccctatgggcagagcgggccactgtgcacccagctggatgaaatgaaaggaacagccacagggactccctggggtgggggccctggtctaggccatggggggctgagctggagagggagaggaaacaagcaaagtcacccagaggagccgagatgggagacctcttgagtaggatctaggaagtgtcagggagaaagaggaggactggtcttacagggccgggtgggatttgcatagcacagggcaagcatggaagctgaaccagacacagggaacagagggaacaaacacggaacagagatgacaaatacacagctgagagggcaaacagggaacagagagggcaaacagggaacagagagagcaaacacagaacagagagtgcaaacacggaccagcgaggacaaacagggaacagagagagcaaactgggaacagaaagggcaaacacagaacagagagggcaaacacagaacagagaggaccaacagggaccagagaggacagacagagaccagagagaacaaacagggaccagagaagacaaacagagaccagagaggacaaacagggaacagagaggacaaacatggaccagagaggacaaaccacagaacagagaggacaaacatgga

SEQ ID NO: 8111 - DNA, 1527 bp, Artificial sequence
  DNA replication origin
taataaggccaaaacgctgctcggggctgagggccttttttttttaaagcaataacctcactgccccaccccctcacgcccctcttcagcaggcttgaacaaccaggagcaattacatgctgtcgatattaattcaattaaatccaggttatttattgggtattatggaaaaggattctctggccttacagagatggggcatgactgagggagtgagcaggatacagaagcctcaagcagaattgactgtgggcatgggccagaaaatcagcacatctccaggaggaaggtagagagcgtagggcactgtgggggctgcttgcgtggcatttcttctgggactggtacagaagaagatcagaaggtgtttgagtgtttgaacccttctaaaaagtggccttgtagaagaccgagtggccttcagcaagtcattcagtgcttctctttacctttgactttgcagctgaaaattggttttggatgatgatgatgatgatgatgatgatgatgacagtcatggtggtgataaaggagataacgaaagggttgatggcagtgacaataatggtgatgatgatggatgattgtgaagataatgaagaagatcatcattgggttgacaatagtgacaatggtgatggtgataatggtgttgattgtgatgatggtggtgatgatggtgattatggtgatggtgatgatgatggtggtagtgatgatggtggtgatggtgatgatgatagtgatgatgatggtggtgatggtggtgatgatagtgatgatggtggtgatggtgatggtggtggtggtgatgatagtgatgatggtggtgatggtggtgatgatggtgatgatggtggtgatggtggtgattatggtgatgatgatggtggtagtgatgatggtgaagatgatggtgatggtaatgatggtggtgatggtgatgatgatggtggtgatggtggtgattatgatgatggtgatggtggtgaccatggtgatgacgatgatggtagggatgatggtgatagtaatggtgatgctgctgctgatggtgatggtgatggtgatgatgatggtgaagatgatggtgatggtgatgatgatggtgactgtgatgatgatgatggtgatggtgatgatgatggtgactgtgatgatgatgatggtgatggtgataatgatggtggtggtgatcgtggtgaccatggtgatgacaatggtggtgatgattgtgatgatggtagggataatgatgatgatagtgatggtgatggtgatggtgatgctactgatgatggtgatgatgatgatgatggtgacgttgatgataatggcgatgttgatgataatggtgatgattatgttaatgctgacagtgatgatgcgatgctgctgctgatggtggtgatggtggtgataatgttggtggggatggtgtgaatgatgataataatgatggtgatagtgatgatggggatgatgataatggtgatgattatggtggtgatgatgggtgaatatgag

SEQ ID NO: 8112 - DNA, 876 bp, Artificial sequence
  DNA replication origin
gagtcagacagctgggtggggacactgggagctgccctcctggggaacctccccaggatttccctgtcccctgctcatgagggaccccacaagagggccccttcaccacccctcctcctagccagattggcccctgttttaaagtcagagttaaagccccttcctccttggggccttctcaggcctcactcccctgacttccagcgccatcttaacccctgtgcctcactctcctgccctgttgggcggtgccctcgggtcctctacccatggtcagcattggtcccagcagatgccctgacccactcccacaaaccctcccaggcctcggcccctcctgcttcctagacacatccccacctggccagctagagctgcctgtgagggcagtagggctgggctggccgggtctccgggggaaggagaagcactggcctggagcctgggcagagctgggcccacgccagggcctggggtctgagaaggagctctcggcgaggggttcctggaggaggagacagagcctgagagggattcgcagggacaagggtgctaggagggctggttacagcattggggtcaggatggagcaggtccaggggaggagcagtgtgggggacttggggccgatttttgaaggacccagagaagttgcattggcgtcagctcagctggacatgtccttgatggcttttgccttttcttacaaagttgaagcctgtaggaaacacctggtttgctttgggtgaagcctgcctgcctgcttgttctctcccctgagcagccgtgaaattgatatttaaaactaattgtacagcaccctcggggcagcagtgccaggcagtggctggacagtggccatattcattccatctt

SEQ ID NO: 8113 - DNA, 1165 bp, Artificial sequence
  DNA replication origin
ctggcactgctgccccgagggtgctgtacaattagttttaaatatcaatttcacggctgctcaggggagagaacaagcaggcaggcaggcttcacccaaagcaaaccaggtgtttcctacaggcttcaactttgtaagaaaaggcaaaagccatcaaggacatgtccagctgagctgacgccaatgcaacttctctgggtccttcaaaaatcggccccaagtcccccacactgctcctcccctggacctgctccatcctgaccccaatgctgtaaccagccctcctagcacccttgtccctgcgaatccctctcaggctctgtctcctcctccaggaacccctcgccgagagctccttctcagaccccaggccctggcgtgggcccagctctgcccaggctccaggccagtgcttctccttcccccggagacccggccagcccagccctactgccctcacaggcagctctagctggccaggtggggatgtgtctaggaagcaggaggggccgaggcctgggagggtttgtgggagtgggtcagggcatctgctgggaccaatgctgaccatgggtagaggacccgagggcaccgcccaacagggcaggagagtgaggcacaggggttaagatggcgctggaagtcaggggagtgaggcctgagaaggccccaaggaggaaggggctttaactctgactttaaaacaggggccaatctggctaggaggaggggtggtgaaggggccctcttgtggggtccctcatgagcaggggacagggaaatcctggggaggttccccaggagggcagctcccagtgtccccacccagctgtctgactccacatggccagcgtcacccatcacaccccggccagacctggggctggctgagctgtcagggcgcagagggtgggtgtagtcccaagtggacgtcactgctgagcttggcagggcgcatgtggttcccagagggactcactattgggcctggcagagtgggcgtggtcctgagtggggctcactgctgagcctggccagccccttctggaaccaggtggctgatccctgcaggagctcatcgcacacagccagtgcctgcacctcgggcgctctagaggggtttattgaagaaaggaacttgcacgcatcaggcattcgccctctc

SEQ ID NO: 8114 - DNA, 1680 bp, Artificial sequence
  DNA replication origin
ccctccatcaccagggcaccatttcatggtgaacagctctcccatctgcacaccctgggccaggcctaaaccaatgaaggggcctctgcatggcctctcactgtcccacctgcttccaccccacagccagagcagcctcagcaaaggccactttgggcatgttcttctctgtgtggatgctacccttcccatcctctccatggcccagcctcatgccccccagggcctctcatcttccctgctcagcccagcagcctccagagcccctcagccccgtggctgccccaccacctactgctggtgcccgcagtgccctctgcccggggcaccttttcctcccacccgcccggagccctgcactgctagctttctgccccttctcctcagcgctggtcaccgtgtgctgccacccagggctcacaggcagggacagggcctttttgctgctcccgaggcaaccccagtagcagaattcaatgaatatcactgaacaaatgaatgaacgaatggacgggagtcagtagtacacctcagctgcatggttcccatgctcactatttttaaataataggacaaaatgcagctatgctttgaggtcccacgggagtggattctgtggtgccagggaaggtgggcacttggccatatggagctgctgggctgagagttccagccttgtcggtcaggcctgtgctcctgggtcagggctggaggtcccctgatgctccccctgtcctgctgcctgtggctggctcccgcccagaggagacagggaggaaggccggggcggtgcgggagcactggggaggccctgctgtcatcggggtggcagagttgccagcagcaggtgctgctgttccagggtgagggtagggtgggtccagaatcctgagcagtccactttactggccagtgcgcaagagggtgcccccaccaactcttgaccttctgacctccccctacccacccagtcctccaccctagtggctgcctcctcctggcccttcttctccacccactgcaggccaggctgtcatctcctttgcaccccgcccaccctggcctggcagccatcccatttccaggtggcagggtgggcaggtggggggtgggcaggtggggatgtggcaggtagggagtgggcaggtgggaggtgggcaggtggggagtgggcaggtggggtgcgtggcaggtgggggtgtggcaggtgggagtgtgacaggtgggggtgtgcagatcttcctagcacctgcctgccctcttgctccaggagctggggcctcccctatctagtaggagacagagggatgacagatcccatgggcatgtcagtggctgctgggaacaaacgcaagcaaaggaggggacagagacggattggggggagggggccaagagtttaatccagaggtcaggagaggcctcctcgcccaggtgacagcgagagcctgacggggatcccggcgtggccacctgaggaggagccttcccggtccaaaagaggaggtggaggagcagccgggcagggtgggcttgaccagagggctcggaggccttgcaggcaccgcagggaagaggcgaggctgaccagactcgctgaccagactggcgtcttggtggagaacagcgaatggaggtcagggtgaggggttgcgggtcttgacaggcgcagccagacag

SEQ ID NO: 8115 - DNA, 1061 bp, Artificial sequence
  DNA replication origin
ggagccagccacaggcagcaggacagggggagcatcaggggacctccagccctgacccaggagcacaggcctgaccgacaaggctggaactctcagcccagcagctccatatggccaagtgcccaccttccctggcaccacagaatccactcccgtgggacctcaaagcatagctgcattttgtcctattatttaaaaatagtgagcatgggaaccatgcagctgaggtgtactactgactcccgtccattcgttcattcatttgttcagtgatattcattgaattctgctactggggttgcctcgggagcagcaaaaaggccctgtccctgcctgtgagccctgggtggcagcacacggtgaccagcgctgaggagaaggggcagaaagctagcagtgcagggctccgggcgggtgggaggaaaaggtgccccgggcagagggcactgcgggcaccagcagtaggtggtggggcagccacggggctgaggggctctggaggctgctgggctgagcagggaagatgagaggccctggggggcatgaggctgggccatggagaggatgggaagggtagcatccacacagagaagaacatgcccaaagtggcctttgctgaggctgctctggctgtggggtggaagcaggtgggacagtgagaggccatgcagaggccccttcattggtttaggcctggcccagggtgtgcagatgggagagctgttcaccatgaaatggtgccctggtgatggaggggtgagggacgggggaggactcttaactgctggcctgagtgcaggagcttggggagtactttgccaggattggggcaagtgagggggaagggcaggcatccaggcctgggcatattccactgggcaggcgtgggcaggaccgtctcatcccccagtgtccctagaggtgcaggagggacccaccaggggagccaggcatgtgctcttcacctggctgggcaccagcagggaaggcaggaggtaccagagcaagaagccagatctgcagggtacaggacagccccagaggactaccttcacggatgg

SEQ ID NO: 8116 - DNA, 964 bp, Artificial sequence
  DNA replication origin
ggagagctgttcaccatgaaatggtgccctggtgatggaggggtgagggacgggggaggactcttaactgctggcctgagtgcaggagcttggggagtactttgccaggattggggcaagtgagggggaagggcaggcatccaggcctgggcatattccactgggcaggcgtgggcaggaccgtctcatcccccagtgtccctagaggtgcaggagggacccaccaggggagccaggcatgtgctcttcacctggctgggcaccagcagggaaggcaggaggtaccagagcaagaagccagatctgcagggtacaggacagccccagaggactaccttcacggatggagggagggcagagcttccccaggtgggcccagcagagcgggtgggccatggcctgaatgcacccggccgctgctcacagtcaagatgcctggcacttgcagatacccccagccctgcccaggggtccagagagggcttcctgggggaggatgcctgtgaaggagagggagctcaccagagtaagaactggggaaaggatgtctaggggcaaggacaggaaggtcaaaggcaaggaaggacgaaagcaacacgctggcatgactgctattggagggcgagggcacacagggtgcggaggtggtgcaggagctgttggggcttcagcctgtgctgaaggctgagctttaccgtgaagtgacaggagccactgagggcatcaagcagggtgactggtcacatccgtggcttaggaccccctgctggtgtgtgtcaggagagaaggtgggggcagcctcatggggaggtcacataaagccagattcacaccttgttgctccttggctctcagtttctgatgcctcttgtgttacccagggaagggatcaagaccttctatggtcctgagaccatgtcccgtgctcacccccccagtcacctggcccccgggctgcttctct

SEQ ID NO: 8117 - DNA, 836 bp, Artificial sequence
  DNA replication origin
tgataagtaaatagatggatggataggtggtggctgggtggatgaatagatgggtggatgatggatgggtgggtggatggatgatagatgagtggatagatgggtgggtggatagatagatggatgggtggtgggtgggagagtggatggataatagatatatgagtggctggtgagtagatggatatatagatgatggatgaatgatgatggatggattgataggtaaattggtggatggatggatggatggatggatggatggatggatggttgggtgggtgagtgggtcagtggatggattggtggtgggtggctgggtgggtagatggctgaatgaatgatggatgggtagatggatggatggtggacagatgacacatggatggatggatgggtgggtgggcggatgacgcatgggtgctgaatagttgggtgggttggtgggcagatggatgagtgaatgatgggtgggtgggtggatagattgatgggtgggttggtggctgggtgggtgagtggatgggtagatggatgagtggatggatggatgtatgggtgaatgataaatgggtgggtggatggttgggtgggttggtgggtgagtgggtgggtagatggatgatggatgtgtgctggatggttgggtggattagggggtgaatggatgggtaggtgaatgggtcactgggtgagtggatggatgaatggatgggaagatggatggatggttgagtggatgacggatgggtgggtggatggatggttgcatgtgtggatgggtgggtggggaggtatctattcccagtttccctgaaaggttctcagggcccatc

SEQ ID NO: 8118 - DNA, 1165 bp, Artificial sequence
  DNA replication origin
cagaggcaccgtgggagcctgccctcccaccctcaggcgtcaggtgctgatgtagcccacctccaacctcggtggcccactgagctccaggatgggtgcctgactgagctgagaccaccacgttcctgctcctggggtgcagccgcacacagctgagaggcaggcagggtgggagccaggaaggccagtttgggagctggtatgcctcaggaggagggtgtgccaccagctcacaaagggagagcatgtggctccagagggagacagaggcactgccaggcccctgtgctgctggtaacaggagcccgcactcacaaagcatcacgggcaactgcctgctcacacagccaagtgggctgtgacctgcctgcttcaggcatggttggatccagcatctcaaagcagagaccaggctgcttctgcctgtcggggtggctcagaggcctttctggggggcagaggcagtgagacccagtcccagcttgcaccccaggctgctggatactcaggtgggccctggaggggagcaggggagcgggaggagagggctccatctaggttgtgctggaccctgggaacagatggcagctgagatgggcactgtcccccaggaggacagccggtcaagggggtgcagaggcccgagggagacaccgttgtgccccaggaggacggcggtcagggggacgcagaggcccgagggagacaccctgatggtggcacagctgagtctcccatgctcagcatgtatgccgtgaagccccactccttccccaggtggaagaggaggggctgccccagctgtgaccacagcttgcaggaggcctcaggtgagggggtgaggatggcccctctctgcaggcaggggtcagtgtgggggtggacacccctgagtcggcttgacactggtgccctggggctgcttagcctctgtgagcctcagtttttccatctgtgtgggaatgcgcccgtccagtgtgataaggcgtcacatgtgagctcccggggggctattcgggctctgaaggagcatcggaggtgaggaggtgaggtccagcactgcagctgcactcgggggtcctcggctgggcacgcactggccctgggggggaagattctgccagggccctcagcacgccgggaagggcccagtctgtcacccagg

SEQ ID NO: 8119 - DNA, 1150 bp, Artificial sequence
  DNA replication origin
tgaggtcttccagggaaggcgtgggaaggccctgccatccttagccatcgtgcggggccagctcaggggcgggaggtcttccttggctgcatgtcctgagttctgcctcctcacccccaatgtccctcgtggtgaggcccctgatgaaaagctcagcccagcctgggtgctggaggctggctggggctcaaggcttttccttctgaggagccacagcctctgtgggtccagagacagctcagccactgctagaggggcttcgggctcccgcttcccccccagctccaccccaccgcagggcagagggagtccggagacacatggggaacacgaactgcttccatgtggccttgctttattgtagcttacagaacatatgggccttgcagcccagcccccagggagccaaacctggcctggaagggtgggagacaacaaaaggggcagtgagtgggaagaaggaaagggacctgcccacagcccagacccagctcgacaggcagcccgggacaccattcctgaactgagtggtctaagatacagtccaggatgtgggggaatggtggagagctggtgctcagcctctagcaaccacagagacacaaagagtgctgcgcatcatgaccacagtgtcaccctccacatttactcacttgtaccctctgttcacctgggactttaatcctcttccagggcaggaacagtgtcctgtccttcataccattccctagaatggaggaggggtgagatatgtgtgatggatggaagagcagatggatgaatgagtggatggatgggtggatggaaggatggatagacggatgaatggagagctgaatggacagatgtatggatggataggtagaggatggatggatggatggataatggatggatggatgagagataaatgaatagacagatgtatggatggatgtgtaaatgatgggtggatggatggatggaagaaatgggtgtatggatagatgctggatggataatgggtggatggagagataaatgaatggacagatgtatggatggatgtgtagatgatggatggatggatggatggagagataaatgaatggacagatgtgtggatggatgtgtaaatgatgggtggatggatggatggaagaaatgggtg

SEQ ID NO: 8120 - DNA, 1600 bp, Artificial sequence
  DNA replication origin
gctgcacgaggacccttcagcccactcaggcccggaccactccaaggctggccaaggaacaggggaatagggtgctgcccgaggccaactgagggacttccaggggccctccaggagaagctggctggtgggctacgtgcccagcctctggagggcgaggggatggagagctcgtggcctccgaccccctgtcctcaccccaggaccaggccacaggatgcagtgagtcagaggatcccggaggcagtgcctggctccccacctccctggccgacccccaccctgttcccccacctgctgccccagcccaataagaagttggccacaggcacccccagcccagtgcctgtgaacagctccatggcagacatggtggctccagaggtgtccctgctccctgggagccagctgcaggagctgggggcacggcaggcgcgccggggggctctgtggcacgcagcgaaggctatttaaatgctccgttggagagggattaaagtttacgcaaggtcactgaggatgtgataattataatcacaggtttttggctccacaatgacagccatttgttatttccgctcgggcggctcccgcggcccagagctggtgacaagcgtggactgatttagtggccagagcccatgcccctcccctcccactgcagtcccagcagcccccactcctgggggctaccaagggctccacccccaggggaccaagagagtctcatgatgagatgggaggggggagtggtgacggagagggatggtggcagaggcaggggatgggtggggacagggccaggggcgtccccacctgggggtggagggaccgttgatgtacaggctgcccatcagggtgtgagcctgcctggcccaggcctcagtttctccatttatgggtctccatgcaccgcctgtgccccgaggatcctggctccgcctccggctacgttcagtcttgtctctattgcccacattcgcaagtccacggcggccaacgcacctgacaggaaaaggtctgtccactccccaccgtctccgactacaatcgctgctctgtatttcaacatttccctggaattgggtccgtttctccaggtgaaagagtctgccctgggtccatcacaactatgccgtttccccatcctaacacggaggccacggggccccagctccctggaaaggaaagccagaaccaggccccgccttgagtgaggtagggggctccctgaactgggggtccctaagccccagaccacctgtgcctaggcagtctcagcaggcagtacctgctgggacagggtggccgtgatgggttcggagatctgtcaggaagtggtgccaggccgccgtgtcttcttgaactcttgctggctacaggccaagccctctgtgccttgtgtcctctgcaccgcgatggcttcgctgggggagggagtggggagagctggcctgcccacggggcatcgctgcacgtggtagggggtgacctgggccgaaggaggataccgggcctctgctagggcagggaggccaagggagtttgggccggaggggacaccctgagcgccccacctgcctcccgactgttgccggcc

SEQ ID NO: 8121 - DNA, 1134 bp, Artificial sequence
  DNA replication origin
cgtggggggccccggggcagccgcgctcctccccgggcagggcggggaccaccctcagcggctgcccccagccccacaccctcacccaaaccgctgcctgcaagcctgcggcccctgcacgccaggacccacccgcgggtgaccggccccgaaagtcccctaaggccccggcagccccaggactcgatcacccggacaccccgggctcccccggctccccggggtcctcctgttcgcccctcggccggcgccctcctcccacagcccactcgcacgggcccgaggggctgctgcgcttctgcaggagcccaggctggcctgagaggcaccaggaatgagggcacagggtccctgggccggcccagtcccgtcgccctcgaaggcctcagtgccagtgtccagcctggggcagctgcatcctccaccctcggcctcaccacggcctgccctcatctgattggatgggccgaggtcaggtgtgcctcagccaatcctcagagctggggccatgcaccgcctctgatttgagccaatcacggctcacttggtgggcagggacttctgcagctcagcgggtgggaggggcctccaccagggtcaccttgacctctagctgacctctgcctgacttctggttgacctctgccctccccccaggaagaatgccccagggtgaagacaaggtggctgccaggctgtgctgtccatgtggccacaggaggcctggacctggagctgggacctggaggctcctggggtccttggggtggggtcactgggcagtggacactgcgggcattgggatgggggcacaggggagctccagaaggtgggatctggggaacatggggaaggggcacaggagggtgggcgctggcgccatgaggtggaggcactggagtgggaagaggagtgggcacgctggtcgctgtgaggtgaccactgggggtgctggggccattgcagggggtggggggggaattggtgatgcaggacgggcaagccccaaagtcgaggccataacttgggagggttcttggcttcccccaggaaagaatccaagggcaggggtcacagcagaggcagaggcgcccctcctcgcagaccagggcttcgcatgggcagtgcatccag

SEQ ID NO: 8122 - DNA, 963 bp, Artificial sequence
  DNA replication origin
acaggaggcctggacctggagctgggacctggaggctcctggggtccttggggtggggtcactgggcagtggacactgcgggcattgggatgggggcacaggggagctccagaaggtgggatctggggaacatggggaaggggcacaggagggtgggcgctggcgccatgaggtggaggcactggagtgggaagaggagtgggcacgctggtcgctgtgaggtgaccactgggggtgctggggccattgcagggggtggggggggaattggtgatgcaggacgggcaagccccaaagtcgaggccataacttgggagggttcttggcttcccccaggaaagaatccaagggcaggggtcacagcagaggcagaggcgcccctcctcgcagaccagggcttcgcatgggcagtgcatccagagtggcggctcagatgcagctctgtgctcattatgcccacttttaatgatatgcaaattaaggggtggtttatgcagaattctccagaatgagggcggtgacatctgggctgtcagtggttgccatggaaaggggcggtaacttctggtccttgccatggcagtggtgactgacatgacacactggtgagtgtgtcttattgggagatgcttctgccccagatctgttgtggctagtcctcgatttggtccagtgtccaagccccacctctggagttgagttctgcctcctagctcactgagaaagtgggcactggtgtcactgtgggggcactagagtcactggggggtgggtactgaaggagtggagagtgggcactggggttgctgtagagtggcctctggggccactggcacgtgggtactgggagtactggggtgctggagaggggcactagagtgggcagcacacacccgaaggtgaagtcacaggccacagggcaattggagcagggaggccccgggtccgcaggccccccagttt

SEQ ID NO: 8123 - DNA, 1207 bp, Artificial sequence
  DNA replication origin
tcagatggggagcgcccctggtctgagtgtgtgccccgaactgcaattccttcctctcaaataaaacacacgaaacatagagattcatctacgttttattttgacttcgacaaagaggaagccctgttcccattccgcagtcgctgcctgctctccgccccagtccctgccaccaggagtctgcactgggcctccggagaccacagccacttgggaaccggaaaggaagggggacagaacaggaatggccatcccggagctgggactggctgtcgctgggcccgaggttttcaagggttccggagcgcggcctccgtggctgggcctcagagactaacagactcaggctgcccgcgccccagctcagcgcccagggtcccacgaccgccatcaaggcagctggggcggcctcgacccctgccccattggatgctgtggctcccgccccagagcggtcccccagccccgtcaggagggccgccaatcacagtgccccatctctcccaccgcagggattggtctagggccaggcacatggcctaagctgtccaatcacagtaccccatctttacgaccacagtgattggtccaggagtgggcacatggcccaggccatccaatcatagtgctccatatgtctaaccacagtgattggtccagggacagacacatggcctaggctgtccaatcatggtgccccatctgtctaactatagtaattggtccacacatgggcacatggcctaggctgtccaatcatagctccatagggaggaggaacagagcgggcatagggaggaagggagtaggggaggagagggaaggcgaaggagagagggaggagaggaagggtggggggtggatgggggaggtgagagggaatgagggaggaagggcagggtagcgggacaggggagggtgggtgctttgcaatttaatagggtgccagcacccaaggcctcccgaaactctcctttccagggcagagaccgtggctccagcccacacaggccccgagggagttctgggcgcagccctcccatccacgcccctgcagggcagccagccacctgccaaagtggggcttcgcccaccctcagggcctgatttataaggtgtcttgctgctggtcatttgctttctccaaagcctacagaaatctaattgctgtttgaagaaaaaaaaaatgccctaaataaagcagtta

SEQ ID NO: 8124 - DNA, 2332 bp, Artificial sequence
  DNA replication origin
cgcgctggcagccccagcccgactgccgaccgccgctgccgtagaaactgggcccatccgcggtgccggtgcaaggtgcggccgtggggaggcggcggggccgggccgccgggagctgggagccgcggccacatcggtggagcagggcgaggcgccacctggcggcgggccctcccctcccgtgcgcggcgccggagccgctggggccccttcccgctgccgcagcccgcctggaggtccccgccctccaagtccctgcccgccagcctcttctcccatcatggcgccgtcgcctgcagcctctctggacactgaacgtcatgttcagcctggacactcacaaatggtctggctccccacaccccaggctgcccacacaggcacccctgctgaccccggcagggcccgggcttccggccttctttataggaccagaacagcgagggggactgaggagtgagggctgcctgagcccggccttctttataggaccagaacatggagggggtctggggagtgagggctgcctgagccgggtctctggaaagcagtccttgaggctcaagggtgaggctgggaggaagctcttccctcatcaccccacccttcctacctctctttgctggtcccagctgggtggccatactcttccatcttggactaaagagccctccagggaacatgggccagcacacgcctgtcctgagccttggagcagctggagttcgacagacttggcctcagctcggtttttgccatgtctgctgggtggccgtaaggaagttgctccagctctgagtcccagtttcctcctcttgcatgactgttctgattattaagagaccagatgtgaaaagagctgtggaccaggaagaaaggagatgatgattatggcaatggctatggtggaggtgatgaggatgatggtggtggtgatggtgatgatggtgatgctggtggtgatgatgatggttgatgatgatggtgatggtgatgatggttatggctgatggtgatggtcatgatggtgatggtggtgatggtgatgatggtgatatggtaatggtcatgatggttatggtggtgatgatggtgatagtgacaatgatgatggaggtgacgttggtaatgatggtggtagtgatggtagtgatgatggtgatggtggttgatggtgatggcagttgatggtgatggtcatgatggtgatggtggtgatggtgatgatggtgatatggtaatggtcatgacggttatggtggtgatgatagtgatagtgacaatgatgatggaggtgatgttggtaatgatggtggtagtgatggtagtgatggtggtggtggttggtggtgatagtggtgatggtgatgatggtgatggtggtgacactgaggtgatggtggtggtagtggtcatgatggtggtggtgatggtggtgatgatggtaatggtagtcatggtgatggtgatggtgatggtggtgatgataaaggtagtggtgatggtggtggtgatgacaatgatggtgatggtgatgatagtggtgatggtggtaatagtgatgacgatggtggtggtgatgatggtaacaatggtgatggtggagatggtgatggtggtgatggggatgatagtggtagtgacgatggtggtggtgatgatgatggtgatgatgatagtgacagtgatgatggtgatggtattggtgatggtgatgatggtgatagtgatggtggtgatagtgatggtggtggtggagatatgatggtgatggtgatggcggtgatgttattgatggtgatggtgacaaagatgacactggtgatggtggtgatgacggtgatgattatactgatgtgatgatgtgatattgatggtagtgacgatcatggtggtggagatgatggtgatggcggtgatgatggtgatggatggtggtggtggtgatggtgatgatggtgatggtggagatgatggtgatggtgatggtaataatgacagtggtgatggtggtgacaatggtggtgattgtgatggtggtggtggtggtggagatgatggtgctggtgataataatgacagtggtgatggtggtgatgatggtgatgactgtgatggtgatgatggtgatgattgtgatggtgatgatgatgatgattgtgatggtggtgatggtgatgattgtgatggtgatggtgatgatggtgatgactgtgatagtgatggtgatgattgtgatggtgatggttgtgatggtggtgatgatggtgatggtgatgatggtcatgatgattatggtggttagttgtattacttatctattgctgtataa

SEQ ID NO: 8125 - DNA, 857 bp, Artificial sequence
  DNA replication origin
ggggcggcctcggaggggctggaggggggagaggcgtccccggggcggcctcggaggggctggaggggggagaggcgtccccggggcgacctgggcggggctggaggggggagaggcgtccccggggcggcctcggaggggctggaggggggagaggcgtccccggggcggcctcggaggggctggaggggggagaggcgtccccggggcggcctgggcggggctggaggggggagaggcgtccccggggcggcctgggcggggctggaggggggagaggcgtccccggggcggcctcggaggggctggaggggggagaggcgtccccggggcggcctgggcggggctggaggggggagaggcgtccccggggcggcctcggaggggctggaggggggagaggcgtccccggggcggcctcggaggggctggaggagggagaggcgtccccggggtcgccgccgcgtagggaggggtccgcgcaccctggacaggccggggctggtgtcccggggtcgctcgggtctttgcagagtgacgacggctgggaaggaccccgctcctgaagccagacccagagcggctgagacctttccagaagctgcttccgtgctgagtgcagggagcctttccagggagcctttccgccctgcctttccagccgttccctccccgagcctggcttccgcccttctgggctcagcaggctttggacgctggttcgatccccgcccctggaaaccatccccgtggcttgtgggtgccggggccgtggcgcagccccacgctgactgcagaggagcccttgagccctcgccgagcccacgcactcctaccctgtgctggcaacctggcca

SEQ ID NO: 8126 - DNA, 921 bp, Artificial sequence
  DNA replication origin
ggctgcccctgccacacctggactctcccagctgctggacttgcatgtcccagcacaaagcttgcctcctgccccttcactgcctctgaggaccagtggctcctcctcaccagccataggcacacagcgggcctgatgctacctggggcccctggttctagatgctgcttccctgtggcacaaggcagtgggtgggccctggcgccgccgcccttggctcaaagggtcccactgtcccgtcagagactgccgaccccctacccaggggtctgcacccagtgtctcagcccagtgtggcccaggaggcagccccaccctgctgtgaccctggccctccaccgccccatctgtgaagggaaggctcaggtccttgctatgctgggttgggctggtctgggcctcacaaaagactgcagaccccacgtgagcctcaggagcggacggggagccaaacagatactggggacccgggctggatgtaggacctgggtgtggagtgggggcatcaatgggcttggacccctccgaccgaaccctaaccacagcagcctctcagcgtgggtgcgagggagccgtgggcctgcgtgtacgtggcgtgtgcatgagcgtgggtgtgagggagccgtgggcctgtgtgtgtgtgtgtggcgtgtgcgtgagcgtgggtgcgaggcgtcgccatgggcctgtgtgtgtgtatgtgcggcgtgtgcgtgagcgtgggtgcgaggcatcgctgtgagcctgtgtgtgtccgcgcatgtgccttgtgcctttcgttgccgccctcccaagcaagatgtaacaggaaggctgcagggatgggtctggggtcctgggctgtttggggagtgtgaggatccctgccggtcttgatgtggcctctttctgctttcggccgcattggacattagcaccctg

SEQ ID NO: 8127 - DNA, 746 bp, Artificial sequence
  DNA replication origin
catgcccctgacccccacccctggcagtcctcctgggtcctgggaggtgctcattggtgctatacctgtgacctgggactggttggatgacaaggtcgagtgggaagggctggggatggggctgggtccacccctgtagcccttggcccctggcctccgctctgaggttggagtggatccaagagtcgtctgacccagaagccccagaaacacccagcctcccctccccccagcctcaccagtgccgggaaaggaggggctgctgaccgggacccacggacacgcggaagtgctaacaggtgcccgggctagagggagggttccagcagtgggagggcagtggtgggaggggagaggtgggaggggaggggtgggagggcagaggtggggggaggggtgggagggcaggggtgggagggcagaggtgaggggaggagtgggagggtagaggtgggagggcaggggtcggggggcagaggtgggagggcaggggtgggaggagaggggtgggagggcagaggtgggagggtgcaggaacatcccccttgcattccgggaccaaaccgagggtcaggctgctatttctcgtggcccaataacgagatgcagatgaactggggaggaagagaggttttatttctgcaactggttacaaggagaaggctgggaaattatcaccagaccaactcaaaattacagttttccagagcttatctaccttctaagctctatgtctacgtgtaagt

SEQ ID NO: 8128 - DNA, 807 bp, Artificial sequence
  DNA replication origin
aaatgggtcctgtgaagaattccttcatcgtcttgtcgctttaaggcccaggcaaaactctgggcctgggcaagagttttgggccaggcaaaacaaaaggcctgggcaaaactctgggtgggcttttgttacactccagcgtttgtatcagggcactggcttttaatatttaacttcactgcacagtcagtgctgaaacaggtgttgtggaggcctgcgttagtgagacctggcctgccgcacttggagtcctagcgtagctcccaaagtcagggagggacgggacccacagacatgtggccgcagggagaggccccatggggcgtgaggcctggtgaccccacacggcccggggaccaggacagctgcagcctgacctggagaggtgccagtcccaggaggccccggcactgggtgggagcacagccccaggccccaccttggctcccaggggcctggagcccccccagctgccgtcttcagtgatttggaagtgtagaaaatgggattatccaggaacagatgtgcacagagtgggtgaaatggaaagcctgcccgctgcgcctgcctttgattacctctgacggccacgctgtccacgcccccccagcacccagctaaattcagccccagccccgccagccagcgcctcattgaaattgaattgatactttgtgaacttcatttgtgaataatgtgatctgacagggacaaatgtgacggggaattgttttcaaacctcctccaaatggaacttattattgggtaaatacagattcctttgtctccttccaccctggcgtcctc

SEQ ID NO: 8129 - DNA, 1172 bp, Artificial sequence
  DNA replication origin
cccctgcccagaggaatgagtaagaaggcggagcgtccacaccaggaaaaatggggagtgtccacactggggaggatgcgcagtgtccacgccaggggagggtgcagagtgtccatgccgggaagaatgcggagtgtccacaccaggaaaaatggggagcgtccacgccgggggagggtgcggagcatccacgccgggaagaatgcggaatgtccacaacagggaaaatgcagtgtgaatattccgcactcataagggaaaacccttaaaaaggaaggatgtgctgacgccactgtgtagacaaacctggggaccctgtgctcagccctgaaataaggccaaatgacttgtccagaacgacagattcccagacagaaagcagaatggggggtgtcgggctgggaggaggtgggggcgtggcccctgaaggcagggggaggtgggggaggcagttggggaggagagtggggcggggctcctgaaggcggcggtttctgactgcggtgaggatgagaacctgggatggcaccgctggagttgggtgggtgccattgcaaacatccgagtacacagacatgtgccgtgtaagatggctaattttaggttatgtgaattttgcttccagtaaaaactaaaataaaaaggtacagtgaccacgtcagtggggccaggaggaagtgaggtgatggagggagggatcctccagggtcctctggaggctgcagaaccttgtctggggcctgcagatttgcagggaggcatgggccggaggctacagaacctcgtatggagcccgtggatttgccggaggtgtgggccaaggcgggcagcctggggtgtgtcctggtctcagggcatctcaccagggaaaagggccccgagctgggcaggcctgggctgcctccttgactctgcctgtgcctgtacccacttggggtccggagcaggtggaaggcggtggtgcctggtgtggcccctgctctgtctgctgctctctcctcctgggggctgagggagacgtgtgggatgtgagctggaacagcacaatcagagtccctgagccacgagctgagtcgggagtccctggcctccgaagcacaagcctagagacctccagtgtccctggggatggacctgcagcatttctgagaacacagatgctgactccacga

SEQ ID NO: 8130 - DNA, 1249 bp, Artificial sequence
  DNA replication origin
cgggacgggcaggtcgaggctggtgggggccgtggctgcacaggcagaaggcggtctgggggtggacagacatgctctggttgaatagatggacgcacgggtggctgggtttgggatttagtgggcaggtgggtgcataggtgggtgggggaggaattgggcgggtggagacagtagtgagggggtgtgtttgggagcccatgggtgggtgggtgcatgagcaggtgggtttctgggcagtggtaggtgggctggtgcctggcgggggcctgggtacggcccgaggggcttgcccactgggcttctcctggcctcccctgttggtggaagcctcagagccgcgggacccgggagtggcgcttttgtctgttgcttggaaataaacaaaccaaaagagagacgccggctgccccctgagggcacctggaaaccacataccgaggtgatggggagacagaccggggggctggtgaggaggggtccccgtcagacaggtcagacagagggtgaggggtggttgctggggtcggggcgaggcagcctcataggcattgagtcccaattgcgcatgggatgtcaggggcctgtggggtctgggccagggagagacctggcagccggggagggagtggcctggcagccggggagggggtgggagctggctctgaggggggcaactgagtgggctccctggaggaggagtgcctgcaggccagggggctgtgggtcatgggggctcaggggagagcgatagctatgtctgaacaaaagggtggaggcggcacagaccggagatctcagaggaggcatggcgtcccacagctgcggaggtgcagggctgagaccccggcaggcctcgtcgggcggctgcccattctctccaggagccccgtggtgggtgcgtcgtccaggccatcctgctcagcttcgtggacgttgcacgccatgcttgcaccagctggcggggctgcccctctagcattctttcccaggcatctgggctggggggcggtgatgtggagaaggcatcattgaagatgttgtcgggcctgtgggtttcttccctgcatcccccgggcaggcagctcacgccatcaccccaagccgtgctgtggaggagaggagccatgggtgcctgtgaaggggttgttattacaccgcccttgaaaacagtcccgttatcaactcttccactcaatggttatgccagcagcatttatgtgcgctggtgacgggggcctcgaggctc

SEQ ID NO: 8131 - DNA, 822 bp, Artificial sequence
  DNA replication origin
ctttgtcaccatcccagggtctcagtccctgggcagagaggcccctcccccaccaaactcagtttccagcggcggctgctgtgtgacggtggggcctttacttggtatccgtgtgctcgtttgatatccgattctgtcctggaacgccagctcacagggcaggggcggcgtgtgcttctccctcagctcggagcccgcaggcggtccacgcttgttgactctgtggcaggtctagttctgagcgtcattgtcacctgcacacagcagggtgcttggatcagcgcctggcccatggttggcacctgtgggcattgcattagctgccagtattattctctcatttaatcttcgcaagctcacaagggtttgctgagtggatcaagggtcagagtggggagtgggggtgctaactggactaccccagaactagcagagcaaggctgggccggggctggtgaggatggcggctgcctgggccatgccaggcaggctccatgccgcagaccctatgctgggacccacagagttgttattcagccgcaggcatcggcaagcggggcataaataaatggatgacgggacgggcaggtcgaggctggtgggggccgtggctgcacaggcagaaggcggtctgggggtggacagacatgctctggttgaatagatggacgcacgggtggctgggtttgggatttagtgggcaggtgggtgcataggtgggtgggggaggaattgggcgggtggagacagtagtgagggggtgtgtttgggagcccatgggtgggtgggtgcatgagcaggtgggtttctgggcagtggtag

SEQ ID NO: 8132 - DNA, 668 bp, Artificial sequence
  DNA replication origin
gctttctcattagcgagaggccattaatgaagctttatcagcagctggaggcctggcccttccccatctccgcctcccggccaccctcagggctgcacccccagcccctacggtggaggcaggagtgacctgtgtggcaccctctgcccccactctccccagcacctagcacatccaggcccagaacttggggtgacttagccccagggaggatggtcccggcggccccagccctggggtgcccctggtcactgcactaggcttaagggcacccaccctgtgccctgcaccaccgttggcactggagtgagggctggaaggctaactggttgcctgtgggacccagggacacaaagcagaatggttgagggggaacaggcgcacacctgagggtcagcaggcttctggagcacagggttgccagtggggatctgagcaggggaggggcaggaccccagaggctatgtggcctcaggcagcaaccctgagaaggcggagcgggcggcgggacaggtgtgtgtgggaatgacacaagaggagcagggaggggaccaggaagaggctgtgagaagacggctgatggagaggcagagctatgggagctgtgcggtgtctgcaggaggaaggagacgtcagctaggccagataacgttgcgggtgggggcgta

SEQ ID NO: 8133 - DNA, 871 bp, Artificial sequence
  DNA replication origin
gccccacctgcagagggggaggctcggcggatcccaggggtagtctgtgtttgtgtctcgtgggcatcagacacagatgctgtctgtgctggagcccgccaagaaaagggtggcaccaaccacagggctgccagcgcttcctgagctgacatggaggcggcaccaagcgggccccgcagagccaccgctaaagacgcagtgctgccgatgcggagatgagaatgccacggtgcccaggagcaccaggggaggctcccaggcgtccactctcccgggagaggtgagggaaggtgtagatgaatgctgggagctggtaaatccagactccccaggaccatgatcagaggaaagctgcagggcaggcagaggggcaaggctcccaccaacagcattcccggtggactgggctctgggtggggcggggctccaggtgggcgggaatatggctggagtcacaggtgggtgtggttccaggtgggtggggctcgggtgggtgtggctttggcgggagtcacaggttgggtgtagctccaggtgagcgggaatatgggttgagtcacaggtgggtgtggttctgggtgggtgtggctccgggtgggtgtggcttcaggtgggtgtggctttggcgggagtcacaggttgggtgtagctccaggtgagcgggaatatgggttgagtcacaggtgggtgtggttctgggtgggtgtggctccgggtgggtgtggcttcaggtgggtgtggctttggcgggagtcacaggttgggtgtagctccaggtgagcggggctccctttgggtggagtcacagaggggggctcctggggaggtccagccccaggtctctcttcttctccacagggaaggcctgtaa

SEQ ID NO: 8134 - DNA, 922 bp, Artificial sequence
  DNA replication origin
ctgccgtccatgttccggctgcgtgctgcggcccacagcccccatggggctcctgggaaagcctgccccggtggctccacggctctcccagcctctggaggacccgagggcctggcgtttctcatgcccctcagagctgggtgcgccgtgggcgttgtcaggcagctggaaaattgaagggctcgcggggcgccctgggaagtgcgtggccgctcccttctctttcgtccatttcccctcaaacaacttcccgggaaatggacgcggatgcttctgacagtggatgatggatggtgccgcagagcctgcccaggagagcgccgcggggctgcgggtcggaggcggcgcgggtgggaggcggcgcgggtggagtggggtgggaggtggcgcgggtggggtggggtgggaggcggtgcgggtggggtgggtgggaggcggcgcgggtggggtgggtgggaggcggcgcgggtggggtggggtgggcgggccgccccaggctgtctgtgggctgcatgggagagggtggagttgggatgggggcgctgctggaggaaggacccgcagaatgaactgtgcagtcgtggggagtgggccctccggacactcgctgtggggacatccctggctggcttggaccctgccccattctccagctgagacccagcccgcccatcacctcgccgggcctcggcttcctcatctgtaaaatgggcctgtgcttgccctgcaccgtggcggcgtgagctccaggaggtgctgctgggccggagcctggtgcacagaagggagctcccgcgggtggtgtgctggtcgctgggaggcctcagggtgtgcgggcccggcctgccccggctgggagacttccaccttaaggtgtgaggagccctccgtggccgagttctcctccgcccccgccgccctg

SEQ ID NO: 8135 - DNA, 1835 bp, Artificial sequence
  DNA replication origin
cacccgcaccgcctcccaccccaccccacccgcgccacctcccaccccactccacccgcgccgcctcccacccgcgccgcctccgacccgcagccccgcggcgctctcctgggcaggctctgcggcaccatccatcatccactgtcagaagcatccgcgtccatttcccgggaagttgtttgaggggaaatggacgaaagagaagggagcggccacgcacttcccagggcgccccgcgagcccttcaattttccagctgcctgacaacgcccacggcgcacccagctctgaggggcatgagaaacgccaggccctcgggtcctccagaggctgggagagccgtggagccaccggggcaggctttcccaggagccccatgggggctgtgggccgcagcacgcagccggaacatggacggcagtcccgggcagaccctcccggcacaggcccggcaagctgctgtcccggcttcgaggtctctggtaggctgagctggttggtcctggggctcctgtgtggccgtgggtctgtaggcagccaagggcagtatgtcctggggagcctgcagggcaccgggcagggcccagctccccacagcccgcctggtctctccggcctctggctctgagtctgcaggatgtggagtgggctgcagcaggctgctctctgtgcttctgagaggctgggcagccctctggggagctcaggggagtttggggtgccgtggtccaggacgacctggatgaccttggatgacctcgaaggccttttggctcagacgaccctggatcccaggggtgtgtgggcaaaggcaagagaaggcccatgaagagaggctgggcctgttgtgcaaggagagcaaggccagaaccagcggcagggccagacggcagcactgagcactccgcctgtgcagggtgacccctcttgccctgtccttgcctgtgggggaggaagggtggggcagcagaataccgaggtgggagccctttgtggagccgaaaccatggcagccgggaggccagattcacccaccccaaggacccccagacccccggcttcatacagcagcgcaatggcattagtaacacgcttttcttggggagactttggggcagaaatgaagttgcaggcaacatgccatgggggaggcagaaccctggacacagcccagctccagggcgttgtctggggctcacgccacctctgagacacccgcgtagggggcgcatggctggcttgtggctggcagatgccggtagatgcacctggctgaggaatccgctcagatcctcagcagatctgcctggtgctcacaaccccactccaggggctcctgacactgagaggcggggatgttagctcctggcttatctagcggggttccttaggccacagaactttgggttctggacacctgtggggctgtgaggggggttgaccctgggtaggaagagggtgcaagggcacggaattcctaactcacgcctggaagtgtgcggacagtgtttagccagaggggtggctcagtcctcagacatcacacagagtgggtcattcagccactcaacaaacacagggatccagaggggacaaaggaagtggcccggccagggtgggctgagcaccctccatgtgcctggcattgggctcggtgccggccgtgcagtgaaggccagggccctgtgcctagcaacagagcagctgggtcctcgtctggcacccccacgaggtggcttatccatctacacgggttggctctgacaccatccacgtgtgccaggtgaggacagtgagacgcgctcagggacctgcctccctctcacactgctcgg

SEQ ID NO: 8136 - DNA, 2082 bp, Artificial sequence
  DNA replication origin
cctgcacctgtccaggcctcgcctgtctcaggggtgcccgtgtgtgcaaggccccacaggaggggctgggacagagtggggctgggggtcccttgaaatgatcccttggctgagggccacagaggaagagaggcgtgggggcaccagagaccatctgtgttttaaaagaatgtcttccaatcttcctcacagaggaatctgaagaaacgtgctggatgtccccagagaaggagctgaaccatttgagtgggggcttcactgactctccccacacacagggcaccgggggagagcagtcacatgaccggcaggcgggggttttgaccctggtgggaggggatgaggagggcaccagtccggccctgagacaacccccaagaccagccctgactgggacactctgcaggatgtcaagcagtgcccccaaaagctgtcaaggccgtcctagaccagcggggcctcaggagatggtgcagagtcctggaccagacaaacggcactgggaaagcaggagcccaaaggaaggctggaattcagggaagagccacgtgccaggctgtgacgaaggcgacaagatgaaacagtaggggggcgggggaggcatccaaactctatgtgctgtctttgcactactctgtaaatctaacattattcggaagtgaaagttaaaaatcactccggctctggtgtgcagtgtggctgctgggaaggaggggaagagttggggatgcaggaagagctgggatgagggaagagctgagggtgagggaggagctggatgagggaggagctgagggtgagggggagctgagatgagggaggagctgagggtgagggaggagctgagggtgagggggaactgagatgagggaggagctgagggtgagggggagctgagatgagggaggagctgagggtgagggaggagctgagggtgagggggagctgagatgagggaggagctgagggtgagggggagctgaggatggggggagctgagggtgaggaggagctgagatgagggaagagctgagggtgagggggagctgaggatgagggggagctgaggatggggggagctgggagggaggagctggggatgaggaggaactgcagtgagggagaagctgggaattggggaggagctgaaatgagggagcagctgggatgagggaggatctgggaagaggaaggagttggaaatgagggaggtgctgggatgagggagaagctggggattggagaggatctggggaagagtgaggacctgagggaggagctgggatgagggaggagctggggaaaaagaggagctgggatgagagagaaaccaggaagagggaggagttgggaatgaagaaggatctaaaatgaaggaagagttgggatgggggagaagctgaaggggtgggaggtgtggagagacattttagaggtgggaggctgtgtgtttgtgtgtttgaatgtgtgagggtgaatgtatgtgagtgaatatgtgaatgtgagtcaatgtgtgtgaatgtgtgtgtgaatgggtgtaaatgtgaatgtgtgtgtgaaggaacgtgagtgaatgtgagtgtgaatgtgagaatgtgggaaagtgaattgtgtgaatgtgggtgtgtgaatgtgtgtgaatgtgaatgtgagaatgaatgtgtgtgaaagtgaattgtgtgaatgtgggtgtgtgaatgtgtgtgaacgtgtgtgtgaatgtgaatgtgggaatgtgaatgactgtgtgtgagtgaatgtgtgtgaatgtgtgtgtgtacatgtgagtatatgtgtgagcagttttgcgagtggacagtgtgtgcatgtgagcataggatgtttggtgtgactgcgtgtgcaggggcctcacctgcctccacagtggcttggccacaccttttcacagctggggaagctgaggcccggcccctctggggcaggagtcaggattggtggtatcatctgcccgtctgctggagcccctcccaccctcatgcgcccaccaacccccacctggcttctgccacaggtggttcgctctttgtgatttttaggcctccagcccccttcccccgacca

SEQ ID NO: 8137 - DNA, 824 bp, Artificial sequence
  DNA replication origin
agtgacaggcctccttcacagaaggtggccacagaagcaacctgcacatctaaaggcacgtgacagcagtccagtccccacgcagtgaaggggccccatccgcccaccaagaggacagggtgcagcaagccagctaccccctgagtgcccactgcctgcccatgccctgctgggggaagaggcagctgggggccacccggcagggctgactgcatgggacatacccagctgtgcttgcagtccctgaggagggctggcagccccttcaggagaaagcgcagccacaggatgggatgctgtgtggactcaggtccagggctccaccacaccccaagtctctctggcccccaaccttaccccatcccaccctgtgcccgagttggcatcatccaatctccacttggcatcatccaaggtgcagactggatgcagatcatccagtctgagttttaggagactttgacaggggagatggctgcggtctggcaggggccacaccaggggaaagaaaggcagtgacaggcacaggcagtgcccctgacagaggggtggcctgggaggggggctgtcaagggggttgctgaaggtatggcaggaagacagagaggcaggacggggagcgccttgcccgaagctgagtacaggtggcggctgtccagcagggggagggaggggtctccatgatactgagtggcagaggaaggtgctggacactgcccccacccaggaaatggcctggcacccctggggtcctaaacaagccaatctccctccttgccagagagcaggagctgggggcagaatgaggaggctgctgggtcccc

SEQ ID NO: 8138 - DNA, 930 bp, Artificial sequence
  DNA replication origin
aggcaggacggggagcgccttgcccgaagctgagtacaggtggcggctgtccagcagggggagggaggggtctccatgatactgagtggcagaggaaggtgctggacactgcccccacccaggaaatggcctggcacccctggggtcctaaacaagccaatctccctccttgccagagagcaggagctgggggcagaatgaggaggctgctgggtccccagcatgggttgggagagccatcattcttggaggcctgataaggggtgggaagggagagggccaccctgagacccaggcatacaggacagtccactgagcctggggtcaccaggggcacctcacccccgggaccccctgcaagccacccggggtgaagtggccccagggcagtgtgagaattccacaccccccacctgcccggctgtgggctgcagcctccctcctggccatcccagcagcatctgcagctgggcctatgcggtgagtccaccttaagtgggtttgatcggcccgtgcactggtgagagcatgctaatattggctccaataaagagcaaatcagggccctagtcgacgcgtcttatcacacagtcagaactgatggctgcagaagtcataaagatcccatttaatctcgcgcctatctatcacgcggctgccttcatcctctttgtgccggggtaatatgtgctcattacaaaagcaaaacagatctggcatgaataaacgcaggatgaagtgctcactcggaaagtgacagcatgatcagtggcggcagtaatcgcagagaatcgcgggctaaattattccataaccgtgatttgaggggacagcccagagcaccccacagctgcctgcagcacagcgacgtgtcctgataaaacatccttcccaatttacggggccgcgcttgactaatctgcctccgcg

SEQ ID NO: 8139 - DNA, 1008 bp, Artificial sequence
  DNA replication origin
acagcatgatcagtggcggcagtaatcgcagagaatcgcgggctaaattattccataaccgtgatttgaggggacagcccagagcaccccacagctgcctgcagcacagcgacgtgtcctgataaaacatccttcccaatttacggggccgcgcttgactaatctgcctccgcgcgcacactgtctaatcatgccatcagcaccgcgagaaggggctcaattgggactccaatgaaaggagattggaaaactaccctcaattgaaattacatttgtaaatgaggcagagttttctgttcagagtgtgaacgttacggtaaatctgctccagaaagtcgaagaggcggcagcggtgggcaggccggggacgccgcaggggcgactgggactgtgccccggctggggccagggtccacattctggagaggtgcccggcaccatgctggcccctggggacagccccaggagaggagaggggctgtggcggaagcccggagagttgggcctagtttgtcagacatcagacttcacttcccactctgtaaaatggggcgcagggcggcctccttgagggagggggtaagacagaacgaggggtgagtcagagcttagttggtctcctctctgccttccaagggtgcccccgcccctccctcccacactgcacactgttcccggcccctccctccctccagccctctgtgcatctggtagtgttccgggtcctctctgaggcaactgagcgggtacggtggggacaggggcacttcccgcaccagggtgttgggtctgaggctgtcctcgtggtaggggagggctggacccagatcacctgcctgaccacgtgcccaggacattggccaggcacactcactgggacactgcaggaggggagcacacagggagagcagaggggaccatgtgccagacgaatggacctgccccctccaggacagtggcgaacccaggggaaggtggccttgggccctggaggtcctctcccagaca

SEQ ID NO: 8140 - DNA, 936 bp, Artificial sequence
  DNA replication origin
gagtgggaagcggggccctgagtggaggcgggacctgggtgagaggcggtgcctgggtgggaggcggggccctgagtgggagccgtggcccaggttagagggggggcctgggtgggaggcggggccctgagtggaggcggggcctgggtgagaggcggtgcctgggtgggaggcggggccctgagtgggagccgtggcccaggttagagggggggcctgggtgggaggcggggccctgagtggaggcggggcctgggtgagaggcggtgcctgggtgggaggcggggccctgagtgggagccgtggcccaggttagagggggggcctgggtgggaggcggggccctgagtggaggcggggcctgggtgagaggcggtgcctgggtgggaggcggggccctgagtgggagccgtggcccaggttagagggggggacctgggtgggaggcggggccttgagtgggaggcggggcctgggtgggaggcggggccttgagtgggaggcggggacctggacgggaggcaggacctgggagggagggagggctcgggcaggaggcgggtccctgagcgggaggcagggtcctcagtgggaggcgtggcctgggcgggaggcggggccctgagttgggggcagggcctgggcaggaggcagggcctaggcgggaggtggggcccgaggtaggaggcggggcctagggcgggaggtggggcccggctccctgagtggaggcggggtccgggcgggaggcgggtggggtctggggctccgtgcaccccgcgccggggatgctttctccctagcttgttgcgccgtccggttctgccccagccttagatctcagctctgagctgccctcacatccctgcagatcttttctggccacactggtggcccgcggggtatggctgcttccgtctcgcggcgttggcctcc

SEQ ID NO: 8141 - DNA, 1059 bp, Artificial sequence
  DNA replication origin
gggccgctcacaccctgcccggctagcctatggcaacggaaccggccctgattcgggcagctgctgccccatcccagcccagctgggtcactttctccccagtgcccagggccgagggcccatgcggagcacgagcgggcgcagcagagggtcgggctttctccgccggcggggacacaggcgtcctgtgcgggagccggtggcggccagagaggcaccaggtcctgggtcgggggccgggggcatctgagccttcccgacaccggcctcgcgggtccagggcttggcccaggcgcctggtctgcaacccagacgtttggagtcagcagaggcacccacgtccccgcgcgcccgcaggagggaagccggcgcggcaggtgcgctcagcccaggccaggggaggctggaccgcggcccggagccacgccagggcccctccgagtagggtgagctcaggcccagggccgcccctgacagtcgccccgcgccccacgccccaacccggctcccccctcggtagatcaatagctttggaaatctgaaaagagcccaaacaaagaagtgggcttgtaagtatccagcttgtatcagctgataaatggtcccctctttaagggacttatctctttagggcttgcgggatgagggatggcgtcatttgtcctggacgctcgtctggaccagccaggccggatctatttaaaagatagcgcgatactgtcgacagcaatagacagggtaattgcagagcggctgccggggtataaattacacggctctaagtggtggagtggccgcgggagactggagaaattcctgacaattcacttgtccctctgccctgccgccagcttatcacgggccagcagaagacgcgcgctcgggtgaaaaaattaagtattgatcaaattaacagtttttactgatctttttaagggagaaaaggagtgcaacaattaaatttagaacacaaaggacggggcagggtaactcttgaccctgcgtggcaaagtctgtgacaccaacaagcacgaaatacggtctagggcagggcggcgt

SEQ ID NO: 8142 - DNA, 1120 bp, Artificial sequence
  DNA replication origin
tggaaagtctgcagaacaggctgcgccccatttgccatgcgccccatctgccatgcgccccatctgccatgcgccccatctgccatgcaccccatctgccatgcccaaccctcaaggcctgccaggatcacccattccccaggagcaacatttgtctctcctgccctcccctggcaccccctgcccctgggctgtgagctccttggggagaggatgtgtccctcctgggggccctaagctatggcagggcctggcacgtgggctgcctgacccaaagtgcccgatggggactaggtgccaaactagacgggtggccaatccagctagagcgaggctgggggaggggggatgggcggccagtccagcttgtgtggggcctggggaggtgggccaggggaggtgggacggtggaggtgggccgggggagatgggatgggggaggtgggacagtggaggtgggccgggggaggtaggacgggggaggtgggatggtggaggtgggccgggggagatgggacggtgggtgtcaccttggcgtgccagggcaccagggctggttcatggtggtgccggcggctacacccaggactaggcctgcctcatgcatggctgatggtgtcatccacacagtggctgggcagagatgcaggggggcctggcataattggataattccattttaagagatctggggcaagaagccctgccgggggagctgggcccccacctcccaaattgcctccaaatgaaagtctgtttaggtggctgcaggggcaggggaggggcagtgggtgcaacacacaggcagaggtgccggtcttgccgtcaattccctggccaggaaggtggcgacaggctggggtctctggcccacacaaaggctgcggcaaatgaaatggtgtctgcctgcttatgtgaagagtgatgaaactttaaatgaatcgctgacctttctggaatgacaggtgacccgagagatatctgaggtgggtatcggcagcggcctcgaaaattgctgctgctgcccgaaaataaacaataagagagcaaatgtggtttgaaaaattgactcgcttcaaagctggggggagagaaagtgaattatttcaggtctgggtgg

SEQ ID NO: 8143 - DNA, 1143 bp, Artificial sequence
  DNA replication origin
cagaacacgcttttcaaaagtggttgcgcgtcgtcccctccctcacgctcatcttgctctgggcctctcacaaccacactccgagtcaggctccacgcccagcccctggaagctgggtgcagggtcctttggtgggggcggaatgggcgactccaggctgggtcaccggcacggctgtctcctgggttctcctgagcacttgctcctgggacctggagctgggctgtgaggaagccccagccacatggggaggatggggaggctgcgctgggagttccgactccagtcccagctgaggccgcgctgagagcacccagccaatgcctccgacgttgtggagcggaaacaaccccacccccaccgcctactctgaattctgggcctggaggccgtgggcatcgtgaaattgcccggtggaagccgctcagctttggagtggttggtgctgccacagcacaccctgcacacccgagactcagcagccaggtggagcccggtgtctgcaggtggcgggagcagggtctggctcagatgccagcaggcaggtgtcccagagagaggggcaggttcctgccaagcaggagatgtggaggccccacgtgcgtgttgagagggggcaggaggggggcagggccagagccttggggagttgaggtcctgggagcagctggcagacagcactgcgggagcggggcagagcactgggggagccgccgcagggtgggggtggtgctcggtctgggttttctttgctttaggctggggatgctttttctggagtggggcgggggctgcagcggatgctctggggaagcaggaggaggcgggagggcgtgggagcaatgttagtcccgggaagggccccagaggatggccgtgtccgtcggaggaagtgggcagtgcagtccctgtgctgtcctgggggaagtagggtggtcatgcggtcccagcacttgttggagagagggagtgaggggccctgacccgccctgagtctcagttgtgaggccagggcgccgtgcggctttgtgagtggggggctccctggggtctctcggggatgtgctgaccttgggtgtcccccacgccctgcacactgaggccccctcctgcccacggtacgggaccctccacgttcctgtc

SEQ ID NO: 8144 - DNA, 1240 bp, Artificial sequence
  DNA replication origin
ggcggctgagacgcacctcagggtggcccagaggccccgttctgtgcccccattccccagctagggccctgaggatctgccggaggtcaccaggcagggttcaaagccacatggtccagcccacgtccgtgcaaccagcaggtgccagtggcagggctgtgccctggagcagggtgggtgctcagagtgtgggcagcctgagggcctcgggtgtgctgcggacagggctggtccaggggtgagtcgggggcagaaagagggcagccggggcccgggttgggggcaggggccagtgttttgagtgtggccgcagagcctggcagggcagatgggggcgtctggctgccctgccctgtcatggggctgtgcagtgggggagagcctgggaggtgcccctccagccttggcctggggtcacagccacctcagccgcctgcccagctggggtgcccaggcctctgtcccccaccccaggccgccccccacgtcgcggaatccctcccaagcccagatgccctgcctggggactttgcagtctctccaccccaggccacccccactgccctccctgttgtcctccaggccctagtctggccctcccagtgttgggcacctcttgctgctctggccccgaaaacaggggccctgctgggatccccggtcaccatctccacagaccttcgaggcacgtagcccctgcaccacgcctgggcatccgagagcctgctcacttgttcatccctccccttgcccgtctgccccttgggctcccctgcacgggcggtgtcctgaggcgggtggcaggtcttccggcaggcagctggggtccgggggccaggggaggcagctggagtctgggggccaggggaggagaaattcttggtgtgggggcagcgcgttgagtggggtgtagggaggggttggggaagggggacaagctgctgtggacgggcccagtcctgggtgccccctcggcactgagctggcagggggctcagcatccatgatgaggggttataggtgctcacaagcatagggaagtcgcaggggctgagacacccatctcgggggccgccacaaagccctgggttccagggaggccatattagtccattctcatgctgctataaagaactgtgtaatttataaaggaaagaggttatttatttatttattgagacaaagtctctgttgcccagtctggagtgcagtggcgcgatctcggctcactgcagcctct

SEQ ID NO: 8145 - DNA, 942 bp, Artificial sequence
  DNA replication origin
acctgtacctcacctgtacctcaggtcccacgcaaagagggagaggctgggatcacatcagcaggcttcagaaactgatacgaaaacgtcagagaaccccgaagaagaagtgagcaccaaagactcggcgattctcaggaggagggtgccagctggctggtatgctcacgcgaccagcctcacaggagtcagatgaatgcggccagtcacgctgggcacctgccacactcggtgtggagcagcagacactggaggggcatagcacagccaccgccggcaaggacaggaggattggggcctgcaggctgcgcgcagcccatcccagaggccggctgtggggcttgtggaaagggtgtctgcagaccctggggctccacggccccacttcaggccacacagccaaagtcacggggcctgctgaggagcacccaagcatcacccaccggcgaaggggtgagggggatacagagaagtgagggggatgcagagacgtgagggggatgcagagacgtgaggggcatgcagagacgtgagggggatgcagagacgtgagggggatgcagagacatgaggggcatgcagagacgtgagggggatgcagagacgtgagggggacgcagagacgtgagggggatgcagagacgtgagggggatgcagagacacaccagaacaacagaagaggcacagccccagagcagcgtcaccgcagcagcaagaggacggggcgccaggtcagccgtcgctgcccctggggttctgtctaggaagcctctgcacagggagctcctgctcctgggggcagcccaggggaggttcctgccgcctccggtcacaacagctccgtccgccaatcaatacccggccctgctttatgtgtggccctattcacagacaccgcactgagcgtgtatattgatcccttaacatcaagctcacagcca

SEQ ID NO: 8146 - DNA, 1030 bp, Artificial sequence
  DNA replication origin
tgcggcagccacaagctcacctcagtgaacacagcacagaaacacatcaacctgcacccaacccagcaacgctgctccacgctgccaacaagacggggaaggggatgccgcagagcgtccacaggtgagagctgggggtccactgagcccccaccccaaagcagcccacataacggcctgggctctcttcctcctggggtcaaagacaggcaggctctgggcccacgctgctcacccatcctccctgagctccagcaccttctaagtgaagcaggttactaacgagtcactgaactttgcagccacaggctgaggcaggagctgccaggatcccaccttgtggcgagcggccccttaccactgcccggggctgggcaaacacggagctggagagggaacggcacgcactgccagggcggccaacgacccggcctcaccagggcaggcaaggcaggagggcagaggccagggccagctggtggcgcgcatggaggggtatggcaggcatggcctgggctcccttgcccagctcggcgtctctggggttggcccacttcaggactggccggccttcccgccctgttcccagactcatgcacctgtggacatgggcactttcctccaagccgcatctccctcccgcaccaggtgctggcctatctctgggtctataccctgcaatcggcttctcaggtcttcaccccccggcctcccgtgaccacccccgcccttcatctccagcgtctctgactcacgcaccgggcaccggccttgcgctttgtcttttactacagatcccagttctgctgtgcattggagctccatttgtaccactcagggccctggcaggaatgggggttcacggcgtccacacgcaaagccctgtcctgggcatgtcaggtccctttcgcccacactggcacctggatctgcttcacttcatctgccctgcgatcatctaagctgtcctctctcgcctcatggtctccacatttccttatactttattaaaaaacaagtcagccgggcg

SEQ ID NO: 8147 - DNA, 1188 bp, Artificial sequence
  DNA replication origin
ttgcctccatctgtggtttagggagggacacgcgggaggcccaggcaaagcgtgaggttcatgctggccgtgtgcgtgtggcctccccttccccttggtgctgacttatcctgtccctggcaggggcccctcgaggcagagggtggttgcttctggcctcaggcctggtgggggcttcaggagacctttggagggcttggaaatgtggtgcctgagtctgagggaggcagagatggctgcgggcaggatctgactcccagcctgggcccagccaaacagccgctgttcccgacctccctccccgagcgagccagcccagagctccaccgtcccctcacagcccccgccagacccccaaatgggcatgcagggctggagaccctgcccctctgcccctgtttgtgtgtctgaggccatttaaaacgggcacagagggccggctgtactgccagtcacagggcagggctggtggggcggcccctcagcggcagtgccctgggagggaggaggagcccagtggaaggaggtcatgggaggggccgtggggccagggcctggctggaagcctgaggggccacaaaggagtccccagggaaggtgcccaccccagccagatccaccttcagccggggggctcctgctgcagtgactcctagggaagcagccgcctttgttctgcccctgtcgtcacccccacactgggggctgcactctgaccgtcacgctggctggagagtatgagccgaggctggcatcctgatgtgactccgggtcctgcctctctccgtgctgctgctgtaacggcaccgtgtctgggtaactgatcgtgaacaggggtcggcgggctcaagtttctggaggctgggaagtcccagattgcgcagccgcatctggagggtctcttgctgtgtcgtcaggtggcagagggcagaggggaaggaggaaggcgagagagcagatggggtcggaacctgccctttaatatgtgccccgttcccaagacagcagcatcgattcgttcatgaatgcggtgccgtccgacccaaacacttcccatcaggtcccacctccccacaccaccactgtggggatcaggtttccaacacatgagccttgggggacgcattcaccccacagtgggtggggagccccatggccgcagggatattcccccaacacggtgccagg

SEQ ID NO: 8148 - DNA, 1435 bp, Artificial sequence
  DNA replication origin
ggtatgccccagggtcccgggggaggcttggccccatctcctggcctgggggctgtgcccagccgggcacccacttctccccgcccgccagagagggagcccatcaacgccaccctcctcaacttttttctcctccccaattaattaatttaaattgaccattaagtcaggcaagtttttgattgatattttcattagcagccctgtccgacgccccgggaatgtatggtaacgtccgatccgcggcggccgcactcctccgcaggctgagttatggctggcatcgcgcggctcccggggtaatttgaattcagatgagctgccgccgtgttccggagcgggcggccgtctgctgacggatggcacttgggttaccgcaaggtcaccgtgcagccgccacccaccgcaggaggggccggccaggccgccggggaaggcgggcagccctgcagcgggtgaccaagtggactcccgagaactgcccagccggtggccatccggtgaaagcgctggcgagcccgggggcctggtggcctgagaccgtggccaagcctcacagctgccatccctcgggggccggaaacgcaactctgcttgaggctgccacagcctcctctcccggggctgcggtgggggtgggggtggcagcaggagccaggcctcttcctgaggaaggtgctgcccaggacggagcagctgcctttcacgtcgggggagcttgggcccatctcagggtccacctgcagctggacacagtctcctctaccgctgatgtccccgtcctggagcgggcatgccagggccctggccgtggactgctggagggctggacctgccatactttctgctgctcagcgtgggggaccgcatgccgggctggtggccacagtgggaggcacagagcctcaggtgccactgtcagccctgtgaccgtgggggctgcttcagcgcctgtgccttcgtttccccatgggcacaagagcgatcgtaggttgcctccatctgtggtttagggagggacacgcgggaggcccaggcaaagcgtgaggttcatgctggccgtgtgcgtgtggcctccccttccccttggtgctgacttatcctgtccctggcaggggcccctcgaggcagagggtggttgcttctggcctcaggcctggtgggggcttcaggagacctttggagggcttggaaatgtggtgcctgagtctgagggaggcagagatggctgcgggcaggatctgactcccagcctgggcccagccaaacagccgctgttcccgacctccctccccgagcgagccagcccagagctccaccgtcccctcacagcccccgccagacccccaaatgggcatgcagggctggagaccctgcccctctgcccctgtttgtgtgtctgaggccatttaaaacgggcacagagggccggctg

SEQ ID NO: 8149 - DNA, 1024 bp, Artificial sequence
  DNA replication origin
gacgtggggccttctgatcacctggtgtgacccctgaccacgtgggtcgggacgtggggccttctgatcacctggcgtgaccctgaccacgtgggctgggacgtggggccttctgatcacctggtgtgacccctgaccacgtgggccgggacgtggggccttctgatcacctggtgtgacccctgaccacgtgggtcgggacgtgggggcttctgatcacctggcgtgaccctgaccacgtgggccgggacgtggggccttctgatcacctggcgtgaccctgaccacgtgggctgggacgtggggccttctgatcacctggtgtgacccctgaccacgtgggccgggacgtgggggcttctgatcacttggcgtgaccctgaccacgtgggccgggacgtgggggcttctgatcacctggtgtgacccctgaccacgtgggccgggacataggaccttctgatgccttttgggcccttgggtccttgagtggttcttccaggagggcctctgggggagtctggagtgtgcccgcatgtcaggggagagctttgctgtcatctggcgtgaaacacagcatctgggacagaattccaggtgccttctcagccagacccgcagcgtggcggtacctggcgtggtggcggggaggcgggctggcctggctgtgagtcctcacctttggtttgcgcggagggttctgttattgcctttgaggatgtagatgtctccagaggggctgagtgggaatcttcctacaggttttgcctggaatgggggccctggagtccctgcgcagtcacccctgccgtccttctgggccttgttcctttctccgtctcactcctggatgacccgtcagcctccgcactgtcacatttgtggttcggggggtcacggcgctttctgcctcttgaagcaccagtccccctcagagcctcagtttctccactatgaagcagggatacctgtgtctcccttgacacagcgcctgacctgggggcatccctggtgagccctgcgt

SEQ ID NO: 8150 - DNA, 672 bp, Artificial sequence
  DNA replication origin
ctccttgttctcgtgctcgccgccgcatgtgcagctcagccagtgccctggggggaggaggggcagatgctggggccatgggtaacactggaggggcaccttcgctgttccagccctgcagatgggacccccccccagcaagagcaggaatttcagctctcctcctggctggcctttgggtggagggagggaggtctcccttgaggaccctgggccccatgctagccccgtggcctcccgatgcctggtctggcagacgcagacgcggacccctctgtacccgaaaaacccaggtcttgggcaggcacgcactttctcctctgacagaggtggattggccaattcttggctgctgctctagactcaggaggtgagggcatgggatctggggaagtgagttccacccaggacagccagtgtgaaggccctgagggacgagtgagccaggtgcccgaggccgtgggctcaggtggagagcgcaggagtgagtccacgtacagcgggaagcttgaagcgcgaggacggacgggatctcccgtgaacggggcaacaccacaaagttagctgtttcccaaagcaatgcactgccgcaaaacccagccaactgcgaggagaaattcacaacccccgtcctaggcagaggtctcgtaatcctcttggtggttaatcggt

SEQ ID NO: 8151 - DNA, 1136 bp, Artificial sequence
  DNA replication origin
cccgtctgtggggtgtttccttgctctggacgaaggtgatttggggagtttcttgggtcctgtggaattggtgagcttgtgctctaggtcataactttaggtggccgagggtgctgtgtcagtgtggccttgtcatcggcatcatggcgcccctgtgccctgcaggcgtggccagtggcacccacgtgccctcacaagcctgagccacgaggtgaggcgtctgaagccagcgtggtgtggtcgaggaggggagccttgaccctgaggaggcctggaggtgacccggcaggtggggctgggtaggaaggctgctcccagtggcagtggacgagtggcatggacggcgctgggcaccacagacgggggacttgaggcaaggactgggaggtggcggggggtgggggcccgggagtgctgaggggctggtgccctggtcgtggccatggactcgtgccccagctggacacacctgctgggtctcagggccctggagacgcccaagagagcacgcctgggtggatggagactgtttgcagctcagagtgctctggttggggggtgcagcctggggggaccccctattcctaacaggccttgggaagggaggctactgagtgagatatagccggggggcagagtgagaagggggtggtggcggcacctccggagggcagagggagggccggagcctggcactcagggacctgctgtggacaggcctgggcgtggcatgggggtactggaagctactcgcctgggatgagggcgggccttgcccaggggagacccctgtgtgtgcacctgtttgtcgcacgtattttgagatgagaaggatttgcatgtgtttctattagagtaactattaggggaggaggtgcaaggacagagaaggtgggagctgcgtctggtgggcccctgaggacaccgacgaggtggggttccaggggccttatgggggcaggtggaggagagacagagccaccacagggcctcagaggtggctgtgaggtgcttgctgagagcggccctgggtggggctgttgtcagaagtggaggcacaaggcaccctctctggacaggccacctgccaaggacaagactgggataaggctgtcacctgtgagccctgggcatct

SEQ ID NO: 8152 - DNA, 1458 bp, Artificial sequence
  DNA replication origin
caggcccgctgcgtttttggaggtcttgggtttagtgagcagatggtgccttccgcggcctcagtcacgagagcgcaaggcttgtcctccatgggggggcctctgctgcacctgctgagctgttttctctgtgcctcctgggtgaaaattgaaaaaccaaaagctttgagcagctcctggtaccaagaaaaggactgacttagtttgtttttgctgctgtaacaaaatacccccgacgacgtcacttataaataagagaaatgtatttctcaagagttctgggctgggcacagtggctcacgcctgtaatcccagcactttgggaggccgaggtgggcagatcatgaggtcaggagatcgagaccatcctggctaacacagtgaaaccctgtctctactaaaaatacaaaaaattagccggcatggtggcggacgcctgtattcccagctacttgggaggctgaggcaggagaatggcctgaacccgggaggcggaggttgcagtgagccgagaccgcgccactgcactccaacctgggcgacagagcaagactccgtctcaaaaaaaaaaaaagagttctggaggctgggagcccaagacccaggccccagcaagtctggtgtatggtgagagcctgccctctgcttccaagatggcctcttgtggctgtgtcctcacctggcggaggagatagaggacgcggaggactgaggctggttccctccagccctttatgaggctctcgtgtcttgtgcaggcccgcaggacctgatcaactcccaacaccatggtagagatttggaggtatacgttcaaactgtagcagggaccatcaagaacatggaatgtttgagacggcgcagaccgaaaatctggaatttgtagctgctgatttttcttgcttgttttctcagaccttctctccaggagccatgcccagggtggtcagaggtggtgagtgaggtggcagaagcgagtgctgggcagggggcgcactgctgggcactcactccatacctcctgatgggcactggctgtcccatcccccttgggatgaggagccggtgccatcagtggctgcacggtcagggcggagagtcccctccttctgcctctgtgtggagggctggggagacagggaggatctttgttctccagcttcctggctttgtaaggctgtgtgcccctcacagcccgagcaggttgtctgagcagggctcactcagccagttttttcatgtgccgtcggccagctcccctgtctagaatgctccagtccgtactttcctaataaccctctcttctgcagggttgggagggcgctcaccagaggcaacaaggggtctagggtcccggtgcttctcacactggcctcctcgcctgacacacgcacggagcttgctctggccatctctgtccctgcctgtgccatggacatccctgcgccctgtgggcct

SEQ ID NO: 8153 - DNA, 2189 bp, Artificial sequence
  DNA replication origin
gcgggatcagtgtcagcctgtctcctcaatgacctgtggccttggcagccccctgaactctcatccccagccccatcctccgggccacaggcttgcccatgccctgcctctgggggctgtagatgtgggtggagctgtccatagtgtggctgcactgtcttgctcgggtgggctgggcctgggcatcctgtggggacagtgactggagaaggggcacagatggcccaggtcctcctcgacctggccacagcccagagctggagagcagtgtggccggcgtgccaggtgggatcccccagggtcctccaggacgctagtcctaggccacgctgagggcaccgtgagctttgcctcttctgatcagtgggctctccagttgattcttccggggggcttgaggtgagttgaaaacccagacttccctgctatgaaacttttctgcagagagcagggtttagagaaggctctgatcttttgctatgagatgggctgacctggggaagccagtaaatgctggaaagctggtggcaagctttggacatagcacaagcaggctgtccctgcttgccagggcttggggtgtgcatggcgtgggtgtcaggccccacggggaccaggagggatgggagcagaggagggagctgccggctcagcacgttgtggggcggggaatgatggtgccagcgacgtattgatgaccagacaacagtcctaatgtagagcggccctgggtttctcagatgccttgggagacagaccaggtggttgggtgagttggtgatcgaggctgcatggggctcagtgtggacatggggtacccccggtagagtgtgaggtgtgggtagaggcaaggactcgccagacccaggaccagggctcatggacacccgggtgtgtggtgtgttggggagatgggtgggagaagggcagggctgccgtcaaatgctgtgtggtgtgtgtgtggcacacgtgctatgtgctgtgtggtgtgtgtagtgtgtgctctgtgtggtgtatgtggtgtgtgatgtgtatgtgacgtctatgggtggtgtgtggtctatgtgttgtgtgtgtgtagtgtgtgtggtgtgtgatgtgtgtgtgggatgtgtgttgtgtgtatgtggtgtagtgtatgcgtggtctgtgtggtatgtgtgtggtgggggtgtgtgtggtgagtgctgtctggtgtgtagtgtgtggtgtctgtggtatgtgtggtgtttggtgtgtggtgtgtgtgctgtgtggtgtgtagcgtgtggtgtgtggtgggtagtatgtggtgtgtgtgtgacgtgtgtggtgtgtttggtgtgtgctgtgtggtgtgtagtctgtgtgtggtgtgtgtgtgcagtgtgtggtctctggtagtgtgtgtggtgtgtgttctgtgtgtggtgtgtggtctgtggtatgtgtggtgtggtgtatatgtggtgtattggatatgtctggtgggtgtgtctggtgtgtgtgtgtgtggtgagtgatgtgtggtgtgtgtgatgtgtggcctgtgtgtggtgtgtgtgtggtaatgtgtggtgtggcctgtgtgtatggtagagtatatggtgtgtggaatgtgtggtgtgtttgtgacgtgtgtggtatgtgtgatgtgtgtcgtgtgtgtggggtgggtggtgtgtgtgtgatgtgtggtgtgtatgtggcgtgtgtgtgtctggtgtgtgtggtgtgcatgtgatgtgtgttgtgtgtgttgtgcgtgtgacgtgtggtgtgtgtatagcgtgtgtgtatggtgtgtgtgacgtgtgtggtgtttgtgtgtgtgtggcatgtgtgtgtctggtgtatgcggtgtctggcgtgtggtgtgtgtggtgtgtgtgcgactagtgtgtgtggtgtgtgtggcatgtgtggtgtgtgtggcgtgtatggtgtgtgtggcgtgtggggtgtgtgtgtgacgtgtggtgtgtgtggtgtatgaggtgtgtgtggcgtgtgtgtgtctggtgtgtatggtatgtgtgatgtgtgtgtgactggtgtatgtggtgtgtgtgtggcgtgtgtggtgtgtgtgtggcgtgtgtggtgtgtgtgtgacgtgtgtggtgtgtgtgtgaggtgtgcgtgtggtgtgtgcgtgcatggtgtgtgtgtgtgtctgatgcataggtgggtgcctggtttctctctgg

SEQ ID NO: 8154 - DNA, 1755 bp, Artificial sequence
  DNA replication origin
ggcctgggtgcagccagcaccgtggaccccagtgaaagcacaggctcgtccacggccccaccgaccaagcggcattgccggtccttgtcagaacccgaggagcttgtgcgctgccggtccccctggcgccccggcagctccaaggtctggactccagtctccaagaggcggtgcgacagcggcgggagtgccacgcggcagggaagccccggcgccgtcctgccgaggagtgctgtgtggtcgaccggtcccacctcgcccgccacgccccggccgtcctccgccagcggcggcttcgtggacagcagcgagggcagtgcgggctcaggcccgctctggtgttccgcggagtcctgcttgccctccacgaggcgccgcccgtccctctcacaggagcgactcgcgggtgcgggcactcccctgccctgggccagcagcagccccacgtccacgcctgcgctgggcgggcgccgtgggctgctccggtgccgctcacagccttgcgtgctcagtgggaagaggagccggcgcaaacggaggcgtgaggaggacgccaggtggacacgcccatccttggacttcctgaaaatgacccaggtgaggctttcttatttccaggggctcagaggggcgtagatctggacagggcggtgctggggtgaggctggctgattctctggatgtggctgttagcatccggctggtcttctctgggctgggaggaaaggagtgaggagagccatctggagtgcgtgggagcgatcgggggcctgtcctggtgtcagagcacccagctcaccccgcctgctcccgcagaggcagagccccacacacggcccagggtggccggccaggcttgcagtgaggcctgggggaggcagcagaacggagctgtgggtttctggcctggctgagccgccccccgcctcagctgctggggagtcccctgactttttctggtgatggctcaggaagtaacaagctgtcctgggagccccattcgaggcagagcccggggtcctctcttgtgggagctggtgggtgtgcatgttgcagctcagagcccagcagcgcctgtgcgctttgggactgtacaggcacctcctgcagaaactgtctggatgtaggagagagccttcacccacttgaagattctcagtgccacccacctctccacacccccgtcacaggccgtggttggcacagagttaaggaaggaaacaggactgaggaggctttcccaggtcttgctctgtgttactaagggagtgcattcaccagagacctctgggggcccggcagcgctcggggagggagatggcagagccgtgacagagtagggtgggctgtgtgcacactcactgggtcatctgtgtcggggaagctttgggcagtggcagaaattaacaggacttcccgatgccaactgagtaccagccagggccgagtggggctgtggctagggtggggcgggatcagtgtcagcctgtctcctcaatgacctgtggccttggcagccccctgaactctcatccccagccccatcctccgggccacaggcttgcccatgccctgcctctgggggctgtagatgtgggtggagctgtccatagtgtggctgcactgtcttgctcgggtgggctgggcctgggcatcctgtggggacagtgactggagaaggggcacagatggcccaggtcctcctcgacctggccacagcccagagctggagagcagtgtggccggcgtgccagg

SEQ ID NO: 8155 - DNA, 1695 bp, Artificial sequence
  DNA replication origin
acggctcgtgtagggtgcgggcccagccaggtctctccctcctcagctggtggggcccaggggtctgctgcgccctttctggaaggtgcaaggcccaccctgtggccacgaaaagaagaggacggcgtggctggcagggcttgtagcgtcagctggagcgtgccatggcatactgggcggcccacccactgtccgtgcagtggagggtgtggctgtgcctggttcacccgcaggtgggcccttcattgatggagagcaggtgccccgagtatggaggctggctggtgttcacgggccaggtaaccctggggtcccaggtcctcccccagcgaaggtcccaggggcatctccctctgttggccctgcttacctgactgtgacacgcccagcgccctgtgtcacgcagagtgggcccgttaggaggctcaccttgctgagcgccagatgaccaaagtgaaggtgttttaccagattctttcatgagtagatggaagtagcatgtgtgaggccccagctggccagagccccaccccctgccgggcctgtggtgcgatgtcctcacctcagcctcctggggttcatcctgcacacggggtcagaccagccacctccatcctggctcagagccccgcagcgcttcctacactcctcacccagccggccgctctccctgcctacacctccacgtctcctccccacagcccccatctctctcccagtcaccccaaggtcatcccagggcctttccccagaggcaggtctcacagcctccactccaagttcctcagctggacagtgactgcacaagccactgggcagactccatgccaggcccatgcacctggccttgctctccaggcttctccgaaccagcaggcagtgggctggggagcgcgttagacaggcaaccccaggacagttgtgcaggaagtgagacttgggaaggggctccaggcctggacctggtggctctgaggtttgtgaggagtttctggggctcagactctccctgaagaccgtggcagcaggtgtgaccctgtgttgcccatgttactaagggacctgagctgctttaagaaggggccctggagagtcctggccggggtagccgcacatccttgagatgcctggtcacagagggagaggggcattttgaggatgcgggaagaatgttttagcaaagctgtcgggagagcagagccgtgcggttgttctcagggaggcaccggtggggaggctgacacctccttcagacacggtgtcccctttaagaagtgagccgagccccgcagctaacccagcaagggcaggcggggctggtgtccactgtgcgccacggacatcttggagaagcacgcccaggggtggcggcgatggggttgtgcccttgacagctctgccaggctgtttgccgggatggatgtcgcctgccctgtggctcacctgtctcttcccctgcctctttgtgtctttttttgtagaccagagtccctggaaggtcttcagtggaggaccgcccgtcagaagccaggcagccacgggccctgatttctccttcctgccgggcctgtctgctgccgctcacaccatgggtcttcagtggcagccacagtccccgcgcccaggcgcaggcctgggtgcagccagcaccgtggaccccagtgaaagcacaggctcgtccacggccccaccgac

SEQ ID NO: 8156 - DNA, 1178 bp, Artificial sequence
  DNA replication origin
gcctcccaaaatgcagggattacaggtgtgagccatgacacctggccagtaagagttctttatggtttcttcccccgttctgtcattctgtcatctcgagagtggtgtgtaaatggagtgacacagtgcacaagcatttgggttctgcctttccatcagcatgcttccctggagatccgtccggcggttcctctgcgccaccaagaggtgctccgtggcatggaggtgcactctgtgtaaccatgtggaggaatgctgcgtcctaatgcaaatcatgacgtgatttttagggttgtgtcctcatgggggacctacacagacgaccagtaaccacaggcatgaggcggtgggaggggagtgggcacgggtgcctcgctgagctgccggagcagcaaagagggttggaggtgtaatggtggctgagtgctggaagatgggcggggtcttaatgttggggtgggcaaaggccattggggccacagggagggggacgtggatgggtgggtggggccagcatctcactgtgctctggctggggcttccccagagagcccgggacagcagccaggaggcggtagggcctgaaggtcacgtgtgaaggtcattcagcgcgttggggcgtctgtgctgcactggctgtgctgggttagcaatatggtgctcacttcctgcagggaggcgggtgggaagcaggtgactgaggagtcgcgatagtgcatcaggaaaaaagtagagcccaaggggtgctgggagtttacatagggcgccgggctgtgacctccgggtggagctggaaggtgggtgatgagccatatggacatctggggagtcagccaggtggaggttcccatggccgtgggagcctgtgagggtgggagcctgggggcacaggcatctgggatctgactctcaggagtccagagggcagagtagagggccgcggcagccaggaccagagcagcagttcccgggctgaggggcggagagcagggagagctgagaatgtcagggtaggggagagaggaggcggtgtgatggggctgtgctgggggctgtaggcgcagggaagctcactgtgccgctggcctggcgggcacggtatgggtgggtggcgggctgtggtgtcctccagccctgtgcagctgtgcagatacaggctgggattgattggtagagag

SEQ ID NO: 8157 - DNA, 2911 bp, Artificial sequence
  DNA replication origin
ataggtgtgagccaccttgcctttaatttttttaaattgtgaaagatacatgaggtatacagaagagtatagaaaataacataaagcctctgcacacataaccacttttgtgaaatctttgccaagatggcttccagatcctttttgttaattcctgatccttttgttagttttttttttttttttttgagatggaatcttgctctgtcacccaggctagagtgcagtgacaccatctcggctcactgcaacctctgcctcctgggttcaagcgattctcttgcctcagcctctggagtagctgggattacaggcgcccgccactgcgtccggctaattattctatttttagtagagatggggtttcaccatcttggccaggctgatctcgaactcctgacctcatgatccacccgcctcggtctcccaaagtgctgggattacaggtgtgagccaccgcgcctggtcttgttagtttttatggaggtgaaattaatatacaataaaccacttaaagcatacaacgtagtggcattgatacattcataatgttgtgtggccactccctctatctagtttcaaaacattttcatcacctcaaaaggagaccctgtacccagtaggcagttgctccccattccccccagactcgcgcatccacttgttatttgcctattccggacattgcatgtaaacggaatcatccagcatgtgaccttttgtgatagtgtttcttcagtcccagagtcaggcaagggagacttggtcagccctatcctagggtccctgctacccaagccagccccatcccagtggctttggggaacctgcccagaacagccctgcagcaccagaaaggcatgggcaccaggccagccccgcccttcccttcagggcttcatcaacgccagaccaccatggacctgacacaaggcggcttctcctgtatgggagcaggtagcattctcagagggccatcaggagagcaggtggtggcaaagccacagactgtcactatggtgggacaaacccctttgctctgaggctcagcttccttatctgtaaaatggggaggattccaacaccttcccgtgggctagtccacagcaagggctagctacacagcactgtgatgactgaccctcagccacggcaggccaactgccccacagcagcctgaaacacggccctgatctgactcctctcacataagggagaggtctaagccctgagacccagcaaccatctctggccagcaagtgtgtccctgtaatctgccctgtaggagggctttgaaatgcttttcggttttatggagatcatcaaggcaaatgggacattactttaaaggggcacagactcgtatttctgtctttttttttttttttttttttttttgagacggagtttcgctctttcccccaggctggagtgatgtgatttcggctcactgcaacctccgcgctccccaggttcaagcgattctcctgtctcagcctcccaagtggctgggattataggcgcccgccagcacgcccggctaatttttgtatttttagtagagaccgggtttcaccatgttggccaggctgatcttgaactcctgacctcaggtgatccacccgcctcggcctcccaaagtgctaggattacaggcatgagccaccgcatccggctgactctatttcttaatccactaaaagcccttaataattatccaagtaatggctgagaggggtgggtagatataagttaatcagtcacacagctctgacgtttgtgatttgaagtggttgtctccagtccacaggggccaggatggaaacccagctcaggaggggctgccatgggcagagcctcgccccgggcacaggtgccctcatcctcttctggccactttctgctctggtccatgtcacaaagacacttgtctttgggtaacctggccagcacagcctgactgttgcaggtgggggattaccggaccccagcgaagagaatggcctggacgcctgctccagcccttctcccctccccagccccgctgggactcccactcttccagacaggtgaggctgactccagccagtcctggtgtcagctggcctggcttcgcagcctgcaccggactagccttaccaggcccagaacctgttgggaggccccagcctgacccctgggagccccgatgcctcccccagcatccagccccaggggtgctgcatggcctcacccatagcctattcccggaaccagccggcctccatgcatctgtctgcccacagtgtccactgtgggacgtggccaccgagccccacggtggccaggggacacaggtagctctttctcccgtcagaccaccccttctccccacccccaccaaaccctcaggggacgcacatggggaggcactggaccgcagggtccctcaggcccctcccaccccaggggcccctcgccaggggtggggagcattgttctcctgcacctttgagaaatcatctggtctgaaataaatcccgccctacctcagtggaatctccagagtcggcggatatccacacagcccagggccagcacacctggccgtcagaggcccgccctgggtcaggcggctcatctcagccaggacacacccgagccccagcacgggaggctggagagggaggcagggacccccttcctgggaatttgctggagaccccgagagcggggcacggcctccttccgctgcccgccaccctctcctctgcagggtgctcatccctagggaccccccaagagtccggtctccctgggcctgctgtgctcggacggaaccaggccccaaccccgcctatcgccagaaggagccctgcagcacggtccgccctcggcgaccatgagcgagggcctaattcacactgtgcag

SEQ ID NO: 8158 - DNA, 1276 bp, Artificial sequence
  DNA replication origin
cgctgcgcgcccggcccgtgctgccatggcctgccgcccgcgaagcccgccgaggcatcagagccgctgcgacggtgacgccaggtgaggccgggctgcgcggcgggcgagggagcgcgtgccccgtggggcgggggttgtgcggggccggggtgtgggagggcggaggttgtaaggcggtcccgaacctcccgtgcccagccgaccgcgtccctccccgcagcccgccgtcccccgcgcgatggagcctgggacggaagcgcagagccgacggcaggcgctggaggcccgaagacgccgaggaggcagagcaccgcggcgccgagcgcagacccgagaggtgggcgcgggacccgggggtcggggcgcggtggggcccttgacgaggccgcgggctccagggacctcgtcgcgctctcgcggtgccgggatcggtcaggtcggcaccctgcgtccttttatcttggtctccgcgcggcccgtggactggggcggccgcagcaggcctgggaggcgctggaacactccggaagcctcttgccaggatgggagtcagctgaaccggcgtcagcccgagttagccagttcgagtctgtgttgtgctcccgggagaggtcagggtctctgacgagcttctcgtgaacacgtggaagtcagggacacccgagtcccgaggagaagtgagttgacagggcttacctgcttggccattttctgggttaggcagtgtgcagggagggtggagatgcgagcgaaaggagggcttgatggggtgggacggccgaggagggtctggaggaaataagcaggggtgccagtggtcgtagtggcggggcttttcggggctgtggttagagaaaacttctcgaggggctttggggtggctcgtcccgcactgggggcttgttgctcctgagttccctgaaaggcgtggtgacttggccgagatggagcagtgaaggtggagggaaatgcgtggttcgggataggcttctgaaggcaggacctgtgagacttgctgatgggttggggatgggaggcgtgaaaggaaaaaaaaaaatcggacccaacttcactgtgccaaaaggaaaaaattatgctgagcgcggaatcatgcaagaaactacctttgcgttacttttttttttttttttttttttttaaagacagggtctcactctgtctcacaggctggagtgcggtgacgcgatcttggctcactgcagcctccccctcccgggttcaagtgattctcctgcctcagcctccccagcag

SEQ ID NO: 8159 - DNA, 1926 bp, Artificial sequence
  DNA replication origin
tagttatggctggtggaataggggctgggggatcagtcagcatccggtggaactgcaaattggtttttattgttttgagacagggtcttactctgtcgcccaggctggagtgcagtggcgccatctgggctcactgtagccttgacctcccaggttcaaggaatcctcccacttcagcttccgagtagctgggatcacaggcacacaccaccatggccggctaatttttttgatttttagtaaagatgaagtcttgctatgttgcccaggctggtctcgaattcctgagctcaagcgatcctcccacctcagcctcccaaaatgctgggattacaggtgtgagccacagtgcctagcctttttgtttaagttttttgtaaagatagggtctcgctgttacccaggctggtcttaaactctggacctgaagcaatccttttggaggcttcagcctcccaaagtgttgggatcacaggcatgagccatcatctcggccactgcactgttccaatattgcttagctcaaggccagtgcttattgagctactaagaggaaaagaaaagcagtgtggcagtaggaatatagtttaaatgtagggtgtgtgacttaacccttgcctggcatgaccttaggtcctattcataatttggtatcttattgccactggtgtccccttgaccgcaagggggtccattcagttgttgggggcttaggattttaattttttttgagacagagttctgctcttgttgcccaggttggagtacagtggtgcaatcttagcccactgcctcccgggttcaaacaattctcctgcctcagccacccgagtagctgggattacaagcatgcgtcaccatgccaggctaattttgtatttttagtagagacagggtttctccatgttggtcaggctagtctcgaactcccaacctcagatgatcctcccgcctcggcctcccaaagtgttggaattacaggcatgagccaccgcgccctgccaggattttatttttagtttacagtgttgagggttatgggatgcccagggcctggggaggaaggggacaggatgtgtccgtcctagtctgaggatgacttttttgagttcaaaagggggcggtggacgcaccaaggcacagtcctgagggcagcaggtgcaaaagtccggccctcccagaggtgtaaggccttagagggatcccaagcatccctggggctcagcctcctggacctgaccccactgcccactcttttggctggttccactctcccctgcatccctcacgttgtccccaacaggaagctgtgggaacctgttctcaggtgtagtgcacccgttggggttctagttggctggatccgcggggccgtcagctgcaactgtgacggcggggaagcgggacgggatggtgcggatctacaggacctcgcctccaggtggaacctacctgctgagccagggattcttcaggatacaaacccagtcaactccaggcagagggtgggagcgtcatgcaccggcgacacagtggaggacgtcatggacgggcagggaggcagcggcaaccgaaactagcggctcagtcggtggccggtgtgcggtcaacggccagggcagtgggaccggaaagactcagtgtagttgtcaactgttgcgacctaaaaggttactccaaaactttaagcggctcaaaacaatagacggcgcgtacggggcctgcagcggccacgggaccgtgggaagcagtcagtacccgccacaggccgcgccttccgggttccgggttccgggttcccgccagggaggagacacgcccccacctgggcaggaaccaagcagagccgcgctccacccaggccggaaccaatgggagatgcgccacgacccaggccgagaaacgtgccgcttacccttcccccac

SEQ ID NO: 8160 - DNA, 1644 bp, Artificial sequence
  DNA replication origin
tgttcctggagacatttgcctccctggtagaggtcaacccggcctactcagtgcccagcagccaggtggggggcctgggccagggccgggtggatgggtgggtgcccacgggtgtctgcctgggctcctggtgacgctccacctgcccgcaggagctggaggcctgcataggctgcatgcagacacgtgccagcgtgaagctggtgaagacctgccaggaggcagccacaggcgagtgccagcagtgttactgccgccccatgtggtgcctcacctgcatgggcaagtggttcgccagccgccaggaccccctgcgccctgacacctggctggccagccgcgtgccctgccccacctgccgcgcacgcttctgcatcctggatgtgtgcaccgtgcgctgagtgggctggggccttgaggtgactctgtgtctccccccaaagccacagggcagggaagggggtggctgggcctcctggctggcaaagggctctacttaaagcacatgatgtagagcaactcgcctctgccctgggtctgcagaaggctgaggacttttggttaaaagcaatcctcatgaaaacaccccaccctgcttggcagccagggtacaagtcctgggcacctcctctttgcctccctcctgcccctttcctgctggtgggggcagatcctgcacacacagacacagcgtctgcccccgagccattccctggagaccctgggtctaccccaggtggtcgtcatctgggccatttgccttacttctctggagcatacccaccctcagttacgtgccagacctggaccgcattctcctgccctgtcctggagctggcccctggctgcctggaggaccctgggtaggtcctgagggtgggatggagaagagggcactgctgtggtgtgggagcagtcctggggcttcctggtggctgtgaccagttgaggggctgttcctgggtggggtggcaatgggaggacaggtcagagcgccctcatttgtggggctgcccctccgggtttctcatcctgtccttggtgcctttttctgcccaacaagtccagggaaggccgaggtctcagactcctgggtaggggtgggggtttgagttgaggaccaaagtgccatagcgacatccagaacacaagcccaccaggggtccagcccaggctacccactcccctagggtctcccaggctcagaaggggatgcacgccccctgtggtcaagcctctggtgggcgtcttgcccagttcctgatggttcaaggggaggggggatgttggccaggccccagggcacagccctgacacaggtgtggctactggaggggccttcatacctgcggccccaaagcccctgggcttggctgtttgaggcagaggtgatggactccgggggcctgacacttgggatttgggaggcttcctagagcgctcagcaggtgaaggcagcaggggccatggccgggagccaggcctagctttgaactgagtttcaagggctgccaaagaggggcagtgggttggggttgtttttactacaaaataagttacttagttttataaagacaaaccgattgtagccaaatgacaccatatttaataaaatttagtctgaagtgatgtactgtgttttgt

SEQ ID NO: 8161 - DNA, 1686 bp, Artificial sequence
  DNA replication origin
gtcacctcaaggccccagcccactcagcgcacggtgcacacatccaggatgcagaagcgtgcgcggcaggtggggcagggcacgcggctggccagccaggtgtcagggcgcagggggtcctggcggctggcgaaccacttgcccatgcaggtgaggcaccacatggggcggcagtaacactgctggcactcgcctgtggctgcctcctggcaggtcttcaccagcttcacgctggcacgtgtctgcatgcagcctatgcaggcctccagctcctgcgggcaggtggagcgtcaccaggagcccaggcagacacccgtgggcacccacccatccacccggccctggcccaggccccccacctggctgctgggcactgagtaggccgggttgacctctaccagggaggcaaatgtctccaggaacaggtcgcccaggctctggtggatgaccacatgggctgccctgcggatgggtgcccggagcttctcgcagagctccccgtactcagtggagttcagcctgcagggaggagagctgctgggcccctctgcagggcaaagggagcggaagatggaggctacaccccaaggagtgacagggcagctgtcgcaccaggaccaaccaggagagatggccctaaggccagagcccacggacccagtgccagacagcccagcctgggcacgggacggacctaggagcaaggcagctgtccagcctgagggctgcactgtcctgagtgctccccaagaatctgggggaggtggctccagggagtggaaggggaggccaagagtgcagggggacccgagggagggctatgcgggagggctcagtgactggtgtcttgtggacaccttgcctggtgtcacacaagcccaggagtgttggagtccacaccagctacacccagcacctcccaggggtcgtggcaccagagcctggctctggcctgccatgtgccctccgcagccccacaggcaccacactcttaccagatgtcaaaggcctgcacagcagggttggtgctggccacacggatggtgaggagctgcacgggcaagttcgagtctggcgagagctcatgctgccgagactccgtcacagtcaggtgcacgtcctgctgctgggccacgtgcactcggtaggtggttaccttcatcacccacgtgtctgtcacaatcacacgggcacctggtgcaccggtggcaaacttgtcaatccgccggaactcagtgttgacagaggaggcaacagcctgccagccagactgtgggagggcgtagagggccagggtgcgcgccagtgggtggcaggcccaccggtcacgggaccagtagtagatcaggatgcaggcgatggaggggagggtcacggccagcagcaggaagagccgccaggcctcaggggcctggctgagggcgtggagccgcttttctgaagccgcaaggcacatgcccacatagtagcctgcaaaggacagggtgagcctcaggggaaagtgagtggcaggccgctgtccaccccccgacagccctggacctggccctctgcccgggttccagggtcagctcccagggtaattgggctttacccactctgcacttccccagccggccactctctccctgcctgtggcaaaggcaggatatattagcggaaaaggtttttaatttgctgctttag

SEQ ID NO: 8162 - DNA, 1236 bp, Artificial sequence
  DNA replication origin
ccgcgggcggccgggcggcggccgccgcaaccgacaggtccgggactgggcgctgcggcctcgtccgcgcgccggggcgggggcctagctcgacagcttcccggcggctgcgcgatggacagccccgaggtgaccttcactctcgcctatctggtgttcgccgtgtgcttcgtgttcacgcccaacgagttccacgcggcggggctcacggtgcagaacctgctgtcgggctggctgggcagcgaggacgccgccttcgtgcccttccacttgcgccgcacggccgccacgctgttgtgccactcgctgctgccgctcggtgaggctgctcgggccggccggccgcatcctctcctgcgcagggcttgctgggaggtcaggaggaggcctccgccagctccccgaggccccgaaagcgcctgggcgcagctggggagaggcgccggtcctcatccagagggaccgcggcgtgggctgagcgcgcttaggggcgccgccggcactgacttgcaggtgacgggaacccaagttcagaaccttgggcaagggatgctccggcccaccaagtcctgaaccgtcacgtgcctgggggttgcaaggccaagcagcccttgcttgtcgtggttgggggcagtggccaggagaaggcaactgttgattgagtccaacggaaggggtcggaggggctgtgtggagggtggcactgcactaggccttggaaggtgggtgtggagagaacaggcggatttggaggcagttccagtttgggggcgccacaggggcagaggctggggagggcctctgtgcagtgcaggtgggacgctcagagttgtccaggggggtgctgggctgggccccaggtgctagctggggctctggaaggtccctctctcagctgattggatgacggacaggtgggaggtggggtgtgcagtggctggagggggatttcaagggggtacctctggaggacacgggggcagacgcagccctgggaggacagatggccagtggctggccaggtttgccactctggggatacaagaggggtgaccctccacatcctggtttgaggatgcagctgcctgggcccagaagaactggaggcaggtgtcgggtggaggcgcccaggcctgcctcatggagagggtgggctgggggcccacttgagagatggatggggctgagtggggctggggccctgaccaggccactttctagggctactgggtgggt

SEQ ID NO: 8163 - DNA, 1314 bp, Artificial sequence
  DNA replication origin
aagagctaaagggccttcaggctgagatggtgagaaagaaaacccaagcctgcataatctctactgctgtattactatatcaagcagaagtcaagagacggaaaagcccgggccaataagaaacccggatgagccagaggaagccctggtctccccacaggcctctgcgtgtgacgtgaggcaggaccgggcagtagagggcagaaaagcaggacagcggctctggtctgctctctcccaccgggctaggcagcgggacaagaccaggctgagagggtgaaggcccagaggaggagctgggagacgatgcgcaaacaagggaagcccagagctgagcaacaggtgccaaggaacttccacatcagagcctccagtcagtcccaggttccagggctgcccaggtcctcacgccggtcacccacacacttgccaccctttctgtctacagcgttcccagtctagggaatgacgtagggaaaaaggctgccagagagaaccgagtgtcgaccagggcaggaaccccacaggcacctggtggtggagggggacctggggaggctttgatttgaagaagagcaaagttggggagggtcctggagaagagagagggggcagccccggcaggtcggtgctgcagcttgagaagcccactgtggtgctgtgtgtgggtggggaggttaagagcagaagggaagcagggaaaccacaggcttctggagcccaaggagtagatgccagaccagacccgggcctggccactggcacatatgggacttacggacgacgcttaggttttcgccctgaataactgggtacagggcaggggaaggggtgctggatcgctgggggacccgcaagcctcgaactcagggagaaagtgactcggaggaagccttctggcggcctggaggagctcgggagagcagcagacccagccttagtcaggaggggcctttactgactatggaggcccgggaggggctctgggcagagaagggaccggccccaggctggtgctttggtgctactctggtgcacaagagggatgcggtgcggggggaaggtggagcggcgcagcaggtgcggggaagcggtaggggcccaggtgtccgccgcaggcggcctagatggagttggccccaggacggaggccggaagggaccaaagaacaacaggagggtccgcgtgctgggagccaacaaagagccaaggtgggcgaccgagagacaggagagggtcgaggagagcaaagcacctcggggcgcccgctccgccgtcggtcttggcccagctctagccgcccctggccaccat

SEQ ID NO: 8164 - DNA, 1479 bp, Artificial sequence
  DNA replication origin
actggcctgagcccagccgtggccacccccagccgtcaccggggccattgccaggtcaggcatgctgcccccagcccgacaccatggggagttgtgtgtcccagccaccagcttgctcctccccggctgactgcccagccccgtgctcctccccagggggagcctggcacctggagtcctctggacttcaggcactgcttctggcaggtgggaggggacagccagtgaggatctgtcaccagtcctgaggtgggacaggcagctggggagagaaaagtggccatcctgggggcatgtggggaggagggctggcggagccctgagcctaccacccggcacccgggagagcccagccaggctcacagcagaagctgccatctccttgggccatggagctgggccgcgtgtctttactggggccgcttgaggccctgagacctgaagggagacaggggctgtgatggggaagccttggactcaggcacaagacagctgctctcagcagggctctcctgggcgccaccggccacaacagggagaggcctacagacagccctgtgctggggggctgggaaggtggctgctgcctgaggccagggagggggacctgaacactgaaggctaaggcaggggtggaaagctccctggaggaggtattcaggctgagaggcctcagagcaggtgtgggcagcctctaggcagcagacggccaggcagggcacagatgggagagatagctgccgctggctgtcccatgtgtggcctggccctgtcccggacccagcacctgccccacacctgtcagagggctccccagagagcagccaccagttcccaaggctgaggtgtggttttcatcagccactgaagcctgaggcatagcagaggcacttaggctagggcaggggccaggcaggagccagccacagcgttaggtagccctccagggcccccttgaactccaaatctgccctgggccagggtgactgtcagatggatctcagatgggtcttatcggggcattcaccaaggaggcttcctgggggaggtggggcctggaggacagagaagtagaggccacgttggcacagagcagggcggtccacacgagttgggcatgtcctaggaactgggcaagggcaggcgtgggaacaggccgggtgcctcctgggcagctctgggtccaatccttgccccccaccatgtagcaacacccctggaggacacggggcagtgggcgcagcaaagccccacgcactggcccccaccgcctcctctgtgccaccagctttcagggaagccacgaaggcagcctgggcgggggccggacgccctccaagtccacggcccccatgcccaatcagcacgatcctatttcataaccagcctggattctgccccagctgaggaaggagcataaaacccaatatattttaattatatctttgagggccatgagcacaatcgtttccagatggg

SEQ ID NO: 8165 - DNA, 882 bp, Artificial sequence
  DNA replication origin
tggctctttcctgtcaccctcctgccccccacatcacccccgctttcatcagaaggcccatcaccactagctgctgcctggcctgtatttccttctccccggggcagactgggagcttggtgagaatgcagctgcatccccaaatgcctgggacaatgaacgtggccagtaaatgtttactgatggacggacggactgacggacaggaggagtgacagaatggggcggggactgtggtgcaggacttggggctgatgggccgcgtgcctgggggaagggcactcggctggccctggaggatgggggggtcagtggcgggtgggaggggtaccgaggtgacgaggcggtggccggaggcctggaggagtcgagaggtctgtgggtggccgcttggtgtgcagagggcagaatgctcatgctcaaggcaggagaagggggagggctggggtgggggtggggatgaggtaggagtggagacagggtgggggtgggggttgggtggggggatggggggattatgggggcatagaaagggtggacgtatggagctggagggagatgggtggatgggaagtgggtgggcaggtgggaggcgtggacgtggagctgggagttgaaatggaagtcagcatctccctgaatcctgggagctggcactggaaggtgtgtgggcttttctgagcccttccataaatgaaaccccaagggcaggcggccaggtgtgggagggggacccatcaaggggatccactgcatcattgcctgtgccgctggcattagtgatttttggggccccaggggtgcacccacagccagagcccagcctccagggtcctggcacaggcagtgtgctgctgccacctccccctgcctggagcagcc

SEQ ID NO: 8166 - DNA, 1185 bp, Artificial sequence
  DNA replication origin
gaaagaaggacctgcccaggctctcaacagcccacccgggcccttctgggctgggtttccagggcccttgtcccacccttccccagctcccagaatgctggccagatagactgtgaccgtgtgaccaaagcaaagacaaactgtggccgccccgggccctgattagcaacaaatcccaggaagtttccgccccactttccgccccatcctgaaaccccatctccgcagcccgacagctgtaatcccaccagtcacccttcggggccgggcctgggcctccagccccactgcacctcagccttcccagctggagggggtcatgcccccactttagggacgagttgaccgaggggccaggagctgaccccgcccacggaggcctctccacctggcgtttgctctaacatgggtggagactccccacggctcccagcttgggaagcccttctgtggctggggccggagcccacgaacgcctggtggcgcccatgggcctggtggtaggggactgtgagagagcatgtgtttcttgaggccgctcaggtgcccagacagcctcccaactctggtgcccccagggtccccaccaaactggaatcttccctccactcccaggaggtggggcaggcagagccagcccagcagaggcccccggaagcgtcaggaacaacaggaaaggcagccggggcacagggacttcccacactcgtaagcagggtgaccctgcacccaccccagctggctctccttagccctccagctccgggagctcagggtaggagcaggtaggaggggctgcaggcatcagcctcaggcctaggggaagtgagatgacagtcgacagtcggatgcttctccagctaagtggtccctagaacagacgggtacactgaggcaaagtgtcctgggaggggcgagagggtgacaggccctgggaggacattgtgggcatctggtcagtagaggccacagcagggtagagggaggcagataccccgaccatggcggggtggaccgacccctgccgcagggccagggggccaggctgatggcagtagcccaggggtgtgggcaggcaaagctctcacccatggttggttgggctgggtgcatcgggcagatgacttaatcaacaggcgggctttgtccctggacacccgccccctgcccggatcctccgcctgg

SEQ ID NO: 8167 - DNA, 921 bp, Artificial sequence
  DNA replication origin
agaggtaaggaaacggaggtgggcaggaggcccgctgggggcctaggctgcccctgaacatgagggaatgagcaggtggcggggtctggagggtctccgcctcagttctgtggcccccaaggctccaagctccccccacctctgcatggtagatctctgtgaggggcagggtacagatccccactgagcgggcaccctggggctcccacgtggaggagcacagggtcccacactgcagacagctggccaggccggagttcagctcctccaaggtcaggagtcgggaaagttgagagtgcagagggaagtgacggtagatggggtagacagggtgcacggggtggatggggccgatggggtggacggggtgggctgggtggacggggtggacggggtggacggggtgcgccggctgggtggggcgcgcggggtgggcggggtgggcggggtgggcggggtggacggggtggtcggggtgcacggggtagatgaggtggacggggtgcacagggtgcacggggtgggtggggcacacggggcaggcagggcaggcagggcggacagggtggacaaggcgcaccgggttgcatgggcagtgtctagccagcaccctgcccggcacctcacagaggaatgggtgaccggctgcccaggtggagtgccgggggcccggaacacctttgcttgcatctctttggagcaagattttcactttgttcccagtgtctccgggggcagtgacaggagatgggggcgggggaggggcagctgcatggtgggagggggcccggctggaggtcaggtgggcccagtgcaagggaccgacagggttaacgtgccgcctcccctcccaccattatagctcggtcattataactccatctcctgcctgtgtcctggccctcccggggcctcccggag

SEQ ID NO: 8168 - DNA, 2319 bp, Artificial sequence
  DNA replication origin
ccccgcggccagaggccagagacagccattcctgaaggggcctttctccgagccgggtgcggcaggagccctcgcctgcccagcctcgctgccggcgcctctcggccggcggccacagccctgatgttgctttaataaaacaaagtttttctttcgtgcgcggcctccagtggtgaaagggccgatttacagagccagagccccctcccggcgccccgcccgcccgccctgcggtggcgctggcctggccgcgggtaatttatagcctcaacttagcacacttgcccgggccagggcggcatgactggggccctttatcccggccccggggccggggcggctcaaggctccattcacggccaccgcaggctcccgcccggccacgttcctcatgcaggcgtttggaagccccgcggcacccggtgggtgaagacaagctgtgtcgtttgtgccttggcggcggccgctctccaacccccatggcccggcccctccccagcccggccgcccgtccacaggtgaggagaccgaggccgaggcagaggcgctggagtttctctctctgttcagtgggacccaggtttcctccgaggacacgatggcttgagtcagggcccaggaaacatggtgctgtctggggatcccaggtggaggcatgtgcacttcaggccaggcatctctgccctccgaatggcagcttgcgtgctctttgagtggccagtgcgtgtgggacccctgttaaggtcacccccaccctgggacccccaccccgggacccccacccgagggggcgtggggaaggggtgaggtgctccaaccaggaccaggcctcttaggagtgggagagacctccgctagaggatggaggttgggggtcctagtgacccacagctcggggacccggacggcatgtgctatggcctgcagtgacctttcggagaggctgtcgctcctggtgcaggcctcagtgccggcattcctcagaggtccacccgggcagcccctggccccacccactctgtgtgggttttcacaggctcacgggctcccaggcgggcacacacacggctgccctcactcacatgcacacctcgcaccagacacacgcatctcactcactcagtgtctgtgccgccctggctccccttctgccaggtttagacccctgcaggtctcagtgaggcacactgccctctgttccacaccctcctgtctccctggcttgggctcccaagggaaggggcagaggaacagagaagccctgccttctgccctctgccctgactcgtggtaaggggacctcttgtgtcctggagtctgcacctctcctgcgcagtgccgagcctgccggggtcggggggtgcaggcagaggaagcaggtcctgaacaggagcctggaacctcgggggcaagtgcaggagccttctctgggcctccatctctttggcattgaccttgaaggctgctgtgagcttcctggggtgagggctggcactcccccagtctccccagcatggacaggcccagcctgcttgcctcctggtaggggctgttcacctccagaccccggcccttgagtgccatctgtggatggcccaggggctctgactggacccttctacctgcttcttgatttccatactgggcccctgtacctactcctgatttctacactgggtccctggacgtctggcccctccaccaaacaaggctcaatggacccaggggcctgccgaggtcccacgcaagtctgaggtcttgagggagggtgaggggtggagggtcggggggcaggggttctccctcagggtttctttcactcaagatgccacaccctccatcctgtgccacccagctccagacccggggtcaaccacttgtgccaaggagcctgagatcccagcccatgcccagccagtcagaggtaaggaaacggaggtgggcaggaggcccgctgggggcctaggctgcccctgaacatgagggaatgagcaggtggcggggtctggagggtctccgcctcagttctgtggcccccaaggctccaagctccccccacctctgcatggtagatctctgtgaggggcagggtacagatccccactgagcgggcaccctggggctcccacgtggaggagcacagggtcccacactgcagacagctggccaggccggagttcagctcctccaaggtcaggagtcgggaaagttgagagtgcagagggaagtgacggtagatggggtagacagggtgcacggggtggatggggccgatggggtggacggggtgggctgggtggacggggtggacggggtgga

SEQ ID NO: 8169 - DNA, 1406 bp, Artificial sequence
  DNA replication origin
cttgagccgccccggccccggggccgggataaagggccccagtcatgccgccctggcccgggcaagtgtgctaagttgaggctataaattacccgcggccaggccagcgccaccgcagggcgggcgggcggggcgccgggagggggctctggctctgtaaatcggccctttcaccactggaggccgcgcacgaaagaaaaactttgttttattaaagcaacatcagggctgtggccgccggccgagaggcgccggcagcgaggctgggcaggcgagggctcctgccgcacccggctcggagaaaggccccttcaggaatggctgtctctggcctctggccgcggggccgggccgggggctcggtgctgcacccccgacccacaggcccaccctgaccctggccccagagccctctgggcagcctcgcccttgcccccagaccccacagtacgagctggcctgtgctcatccaggaggtcgtggcctggagcgggcgtccgggccatccacctccacagtcaagagccaagtcgtcccttcaggggctgggctgggtgccaggatggttgggggcagaggaggagaaagaagagagacccaggcccagggcttgccccgctgggctcaggccccgctcagcagagcaggcattcggctctgggggactgcaaacacaggccagccctcaggtgcagccctggagaacggcgagtcggaaggaggggcgtgggtctggagctgcctacgacaatatttagacaatttttttttctttgagatggagttttgctcttgttgcccaggctggagtgcaatggcacaatctcagctcaccacaacctccgcctcctgggttcaagtaattctcctgcctcagcctcccaagtagctgggattatgggcatgcgccaccatgcccagctaattttgtatttttagtagagacagcgtttctccatgttaacaggtcagcctggtcttgaactcccaacctcaggtgatccgcccacctcagcctcccaaagtgctgggattataggtgtaagccactgcgcccggccaatatttagacaatttaagtgaaactgaatgaaaaccaggcagctggcgtctgtccctctcatggccataggcgatagggccctgcagaccccaagggcaggtgattgagacctgggggccgagtgtgagcctggctggcctcctgagcctgctcccacccacatcttgcccccacaggggatcccccaccctctgttcctgttcctgtagggcctccctgagcacggccctctgcccttgaacccccagcctccttagagcctcccctgcaccacagaccatggtgggggctgcggcctgaggctggtaccgccccgtaaggtgtccatcctcccctccctcct

SEQ ID NO: 8170 - DNA, 2325 bp, Artificial sequence
  DNA replication origin
cagcctggtcttgaactcccaacctcaggtgatccgcccacctcagcctcccaaagtgctgggattataggtgtaagccactgcgcccggccaatatttagacaatttaagtgaaactgaatgaaaaccaggcagctggcgtctgtccctctcatggccataggcgatagggccctgcagaccccaagggcaggtgattgagacctgggggccgagtgtgagcctggctggcctcctgagcctgctcccacccacatcttgcccccacaggggatcccccaccctctgttcctgttcctgtagggcctccctgagcacggccctctgcccttgaacccccagcctccttagagcctcccctgcaccacagaccatggtgggggctgcggcctgaggctggtaccgccccgtaaggtgtccatcctcccctccctcctcctctcctcggggcaggcctgagcccccacctccagccctgcgaggggtgcgggcaagatgggtgcctggcgccagagcaggggccagcaggacatgatggcctgggactcaggtactgaggcaggtggcggggggctgctatggggctgggggcatcttctgacttctccttggaaggtgtggctggctttgggcccagacccctcagctgagaatggggctgggcggtcagggctgggttcacattgtgtgtctctgggcgccgaaacccacctctctccagagacccctctgcctgcctctccccactggggctgccttgtccctggccccagtgcagcttgcagctaggacactcctgtcccccagccctggctctcagatgagtggagtctccatggggcacaaagagttgggtggcactgaagcctggtgcagggaggggcctgccagggactggaactcgatgtttggggacagtttcttgtccccagggtccctgggccacaaaaagctgcagggtcaatccagagaccccaaagccctggcctcctgcccagcccacttcacactgccacccctgcatccctggggtctgctgggtgcttctacctcctcctccatcctagcaagctcctattcacccctgaagacccacgcagaggaagctcccctgactcaggctagcctcgtcccctgccctctgctcaggcttgtcccctgccctctgctcctgggagatggcagtgggcaggcgttctgcaggcaaagcccatggcgggcctgggtgtggacccccctctgtccaggcctccctagaggagcaagccctgcaccacctcagccctgggctccacctcagccctgttgtgtcacgtgactgcgccctggagggatactcagaggggtgaagatgagcaaggcacctgcattccagcaacggagcaggcacagagtggggagaagggaggagggaggagggaggagggcgtggagcacagggcactagtgctgcagcctagtgggcaccagggagctttggttctgacctggaggtcacaggagccactgccggtgtggggtggggcaggatgtgggggatcccctggctgccgtgggcacaggggacaggaggccacccaggacagcaaggtccctgtggggactggggctggggtcaaacgtgaggagggtgtaatttcaggcctttgtaggtggccttgggcctaggtgcaggctcacaccttcccaacctcctgccctgccctggggcccctccctgacatggtgggcagagcccaggctggctggggtgccaggtcccaccagggtattagggggcagggcctgggaggccagtacccctggaatcactcagctctgggcctgccacccaggagatgaaaggccctgcccctctcagggcccacatgccctttgaaggctgtgggaatgcccgcagggcaggcgagtgccaggcgtgaggaggctgctggggccatggcggaggcccagaggatggcccaggcctgcaacgcctcctgctgagtcccggcaaccctcccaaggccacattgtcatgcacttcccagctctgaggtgccagtcgaggagggaggggaggggcagggacgtgcccccccttctaggcctgggaccctgtcttccatctggactgcctgtagaggcaggggccctgtgggcggctgcgaaagcagggttcacccacccagttcgggccttagtgacccgcgctcagccacagccacagggcccttcagcaggtcgcccgaggcccctcccccacctcctctccagtccagggtccgaggacgggtctccggccatccccgcctcaggggtcagcacagaagctccagccagagc

SEQ ID NO: 8171 - DNA, 2009 bp, Artificial sequence
  DNA replication origin
ctagaaaccaggcctgaggggtccagcccagaccctgagtggggcagcctcctcagggagggcctctgggaggcccagctgagccctgcctcggggggctgaagggctgcaggcccctgggaaccgtggttcctccttactccacctgacttccctgctgtcccaacccgcacctgggacctgggcctggaggtggctcagggatgagacaaggaggcaggctggcatggggcatggccttccccttggcctgacacccctcccggggctgactccagaagagcagtcccaactgacccagaagctgctgaaagttccagggttgaaggtacaagagcaaaggcagagaactagccctgctgcctggtctcagtgggaagtggaggccatgggacccccatggtggagcggcccccccttggccagtcgcccccacatcaaccctgtcattacttgatcgggtttcccgctgcaaaccccaggctcctgtggtttcttcagagtcacaggatccggccaggcctgtccttgtcctggccaggagagcggaagccatgggggactcggaggactctgcctttccagaggcaagggggtcagagctggccaaaaactcctccaaccagcaaagacggggctcctgagctcagggtcatcaccgtggggcctaggacagaggactctggcaggcgggacccacagagcctctgccctgggcactgataggctccaacgggtgccccctagagccaaggccgccccctgaagccccacaggccccacacctgcctgaactggtcctgaactatctgggcacagggtgggggcatcaggagacacggggctgtgggcatgtggggggcagagggggcccgccgatacagccctccggggactcactgcagcccacccacacatgcgctggggcaacagcacctgttaggtgcccacctggtgcccacctgcctagccctgctggcctgcttggccccacactcctcccagaacgcaacccgtgtgggtgccaggcctgtgggtggggggcaggggactgtcaatgttttaccaccaaacttcagaggccaacgtgactctgggtggcaacaggaatggggcccccagccggccccccacaggcctgcctgggtcaggtttggccacattttttctcttgggagagggcttgttgcttcctctggtgaagatgtttactctcctgaggccggggcgcctgctggggtgcctgtgcctgtgtgtgcctgcgtgtgcatgtgtgcacgtgtccctgtggctgggttgctggaagcgggtcctgggcggcagcgagggtcgagctgcgcttggggccagcatgagcaggaaaagacggaggattagagagggaagcccggcccaggccatcccctgtggaccgcagggccagccacacgcgtgtggtccaggccaagacccctgccctaggcccctgcagggctgggcagatgtgcagagcccctgggctcctgggccagcaattaccctaaataggcggccctggagacggcggggccaggtgagaacgggcgagtacacccttggtgttggggctgaggtcaagttccccctccacacctgctgtagggtgaccttgggctgcctcactgcacctcattttcccacctgtaaaatgagggtaataacaacacctttttgtaatgtaatctgggtcaggtgtcccgggatagggccgggcgttcagacagcgctccgcatatgtgagagggccggagctctgtctgggaacagcgacatctcatgagcagcctcccctctggccccagagcccagaaactactttgagagaaaaggatgaggccaggtggggggtggggaaggggtgctaacctgcctatggaaccttggagccagggcttccaggaggacgggaggcgtgcagggacccagcgacctggggctgagctcaggaaactcccgctggctgccgggaggaggcggtgctggggttgcga

SEQ ID NO: 8172 - DNA, 863 bp, Artificial sequence
  DNA replication origin
gagcccggtgccccccacctggctacactgccctcttggaagccgtcctcccccacccctgcccgatggtgggtgtcctgacttctgggggcgagtcctgcagacccctggtagggctttgcactgtgccagcctttctcccatcaggtgcttctcctggggggtgggcacagagtgggggagtctttggggctttttcccaggaatggtcccaagtcaccctctcagagccagctccacccccacccgctctgcacccccggcacagagcccagaggcctacagagctcattagcacagcagcggccccgccgagctcgctttaattggggccggcgggacgtgagaacccggggaccccgtgcccgggccgcagggggaggggacacccgcctgggctgcccgcggtggcggcccggattagcacgaggctcaatgggcccagcgagcggtaattaaagctgcccgcccgggctgccgcggggcccagggaggctctggcgcccgccccggttccaccccagagcccgccccgcctgaacctgcacagtagcgccccgcgcccatgagtgctgggaggccacatccccctcctcaccagccctcctccttcctgccagggtgaccaaggtagtcgttgcacgctggtgcctgcctcggtttcccctttagaaagcggggcgaacacagccctgccatgaagtgtcttggggtggtgggaaagggttgtgggtggatcctggtctattagtgggtgcaggggtgtggccagccactgcagaaccctccagaactcctgcacgttcacctctgcactggacttcctgggagccgcccaaaggcctggccaggtactagaaacc

SEQ ID NO: 8173 - DNA, 1208 bp, Artificial sequence
  DNA replication origin
ctggagggttctgcagtggctggccacacccctgcacccactaatagaccaggatccacccacaaccctttcccaccaccccaagacacttcatggcagggctgtgttcgccccgctttctaaaggggaaaccgaggcaggcaccagcgtgcaacgactaccttggtcaccctggcaggaaggaggagggctggtgaggagggggatgtggcctcccagcactcatgggcgcggggcgctactgtgcaggttcaggcggggcgggctctggggtggaaccggggcgggcgccagagcctccctgggccccgcggcagcccgggcgggcagctttaattaccgctcgctgggcccattgagcctcgtgctaatccgggccgccaccgcgggcagcccaggcgggtgtcccctccccctgcggcccgggcacggggtccccgggttctcacgtcccgccggccccaattaaagcgagctcggcggggccgctgctgtgctaatgagctctgtaggcctctgggctctgtgccgggggtgcagagcgggtgggggtggagctggctctgagagggtgacttgggaccattcctgggaaaaagccccaaagactcccccactctgtgcccaccccccaggagaagcacctgatgggagaaaggctggcacagtgcaaagccctaccaggggtctgcaggactcgcccccagaagtcaggacacccaccatcgggcaggggtgggggaggacggcttccaagagggcagtgtagccaggtggggggcaccgggctcggggttgggtggagtctgcccactgtctcagctccctgagggcttcctctcctccggacactggtggtcgcgggcattggtggcctggggacaaaggccatgctggtgcatgttctggcatgcacctgaggcttgactcctgtgggacacagacactaggaggggcccctgggcttttcactcggaggaaacctaaccccaaccctgaccctgggacctgagaggcaaagggcaagtgagggctgaggtctgtacggcccagggctccaggctctgcagctctgggtagcagaggaggcaggggagcaggaccaaacacgtctcaggcccaccaggggtgcccggcctcagactgcactgcacggggcaaacttgtgaggtccctgggggctctgtgggtttgcaaacctctcccca

SEQ ID NO: 8174 - DNA, 3035 bp, Artificial sequence
  DNA replication origin
gacctatgtcaatggggtggtggcacagcacacaggactcaccagagtgagaaactggagggtcccgggagggtccctggccagactgcgtgcccgaaggccatgaggacagcgggtgtgggctgggcaggggctctctgtctcgggtggcacgtcactgccgggagcaccccctctactcgcctggcctggtatgctgtatgcagcctgggagtggccacccctctctgggtccagttgcctgtctggaggccaggctgggtgtgtgaggaccctgcgggggctggaagtgtgggccaggacccctcctcccccaccccagccggcccgatgctggggctcgcggttttgctggggcctccgggtctggcttgtggcgcagccccgcccccgccctccagttctgcaccgcagctcggggccccagactccgaaggggggtgaacgggggccttggcaggcagaggccccagctcagcccacagaggcccagagaggagccactggcagtctacggggggctcggggcaggcatggggaggggctgggagcacgctgggcctcggcttcctggtgccagcaacttgtgtcctgatccctaacctttccgacctgaccgcttgcaggggggcctggggcctgctcagcagggcactaccagggactctgccccggcccctctgtgcacacagacacacgggcacacaggcacacgtgagcacatgcctgcgggtgtggggcacacccatgaatacatggcccctgggcaaacataggccccagccctgggaggggtccctgggaggggccccgggtctggtccctggcagggtctgggctcagtgggtgtttgtggtgcctggcagcggtggaggccgagagtgtgcaaagcagcctgcaagctgtgtgatggcggcccagtttattgggggaacccaagcctccgaggcggggggtcggggtgactgtgaccagccacctctcagactggaccacagggatagggactttacccaaagccagctctatgccatgcagaagcgtggttacccacacacttgtgtccaaagacccagagatggtgcggacctagggacaggtcagtccctccccaccaccccatctcaaagcatgggaaactcaggctactgtcagggggcacttatggcaccaccaaaagatgcttgtggccctctcttcccacggctgggcagatggccaagagtcaggcaggagctgggggatctggggagttggcccaggcctccacctccttcccccacgtcctctctggccaccttgtttgactgggggatgagggaggggccggttgtgtccaaggtggcttgtgtcctggagaggaagggaccccttgggtcccccaagcctgctccactcccaccccatgcccctccctctgggccccctgatggaaggcaggaaggggaggttatcacttccaactggccctcccctgggccctggcccaccatgcccacctctctgcctggctcgagccagtgccagcccttgttccctggacagccggtgagcgctggaggtgttatctctgacaggagcagaatggactcgtcgcgcccgaagcaggtgtcggcgcctgggatggggccaactggaaatcctaccctgctcaccaccccccacccgctgcaaacctggcggggccgtcccaggagacgcagagattagcacgactcttgtccctgtccctccccagctgatctgccccagatatgggcaggggccggaatggtggggccggagccgcctccagagagagatgggctctcgaggttgggtcagggccgagcagggcagctggttctctggtgttggtctcccatttgccgggtggggcccacccctgcagcatctgagtctgtggaggcccaatctcagatcccagctcccttcctgctcagatggcagcgagatctgggtgagggtgggggccgagagggaggcacgttcgggctggctcacccagctgttctcacaccggcctccctctgggcatgcgggcccagaccatccccaggggctgtctgtgagctgccagctctgattggctgctggcctctgcccgccacggcctctacccagggtcctcaggtcccacctcccacccccgctgcccgcactggccatgcacttctgctctgagacccgactcagctgtggccctctctgggaagcccttttaagccctccaccccaggcctcagccccacctcccctcctgttctcattgcctgagatgggccctgttggcccagatggaggctcccctctgccccgtggctctgtgcataggggtgcgggcagctgccggaccacagcccatgtctgttctgacccctcatggctcagtgtgggtgatggggtggtaggccctgggacaggggtgaggggatctgaggagggcatcttccagcaggcacaaatcccagcaggtgctcagctctggcctgggacggtggctctgggctctagggctcctaaactcactgctgggcttgtggccctctcctccgggcctgttctccatgcctaggtggacagcccccaggccctgcgcgatcctctggtgcggctcagccgagcccccagcctcacctgtcgctgggaaggcagcttcaacttcttcctggccttcctgcctccattctcctccattcagcctgggctgcttcctgaaccccacgtcctgatggtggcacacttccctcggagagaggccccccgggccatgtcctggctcatgggaaggatgggggtgttgggtgtgcctgtgacggaggtttttgacacggttgtgtgaggctctgctggagctgttctgcagccccgtgtccaactccagaccttggggatttacccgaagcccccaggctatccacctgcctgccctttcctccctatccagccatgtgcacatgggggcctcaccaaagcagctgaagctgcaagaacatcgagcctacaaggccacagcggcctcagccaggctacat

SEQ ID NO: 8175 - DNA, 1284 bp, Artificial sequence
  DNA replication origin
acaggtggggggggggggtgcagggcgtctgggtagaacctgaacagagaggccctggggaacaggctggctgtcgagtctccacctgcccaagccaatttctggcactaccagttctgtgagctccacagtagcaagcagtggggtcctataagctctctgggcggagtgccatgtctgcacccctcacgggcctgcatgcacaagccgtgcaacttgagtccagggcatccttaggagagggtgtgtggggccgccctgggggtcctgccatgctgtggtggggtcacaatgtcaacgttgcagcggggggaggtccaggcacaggaccattttgtctcgggggagctaagggtcttccagcagtaaggggtgggtgggcaggggcagggatgggggcgggatgggggcgggatgggggtgggatgggggtgggatggggggtctctttgagactcaccagcccctggttttggagatttgcccgtccccctgctcttcagtggggtggatctgggaggaccgcagagccagcagcagctggtggaccgaccctgcccagcaggtgcacagattgccccaaggcagggctggaagcccaggcaagcccaggcctctgtggggccagggaggaagtggggaatgaagaaactctgtggagggaggtgcctgcccttggacccttggcttggtctgagcttcctggcagccagggcaaagagagaaagaaggtgccccatgctcaggagagagtggtgcagcagggttcggtgggcagacggctcagcctctacccttggcacccaggatgggggtcacctgcagcccgtccctctcttcagtccctgccctccaggaaccaggttagaggctgggcaggggtatggggcccagggcttcagtcctgaggtgcccgtgacagtgtcctgcagttcctgcaccgccaggaggatgagcctcgagggctaatgagccccacacggccgggccagcctcaaggccaaggcacagctcttgcggaaccctggcagcttctctgaggcagccatgcggaagatgggggtgtgtcctggtgcagcaagctgggggttgcttgggaggcaggacgagcttgacccaagggagggtgcttgatgggcagtcctgaggtgctcagccaggaagcgactatgattgatttgctgtgcacccagggcaggggctgtcctcccgaagctgagcttcttcacctgtcttctgactcacttatctccccgagccccggagatacaaggatcacaggca

SEQ ID NO: 8176 - DNA, 1145 bp, Artificial sequence
  DNA replication origin
tgcaagctgggtgggtgcagtctgagcccaggcctggcgggcactccatgtgcccccaccccaggacctgctggtcctcaccctgccttcaaagcctccccagccccagcctctgtgtccagctctctgtcccctttggttgggaaggggcacctcccccgccccccagttcccatccccttcactgtgcccctgggaggcccctgaggccctcactccccagctggggctcagcaggtttgaggccctttgggcagccctgtctgaccagggctatagtgtggcacaggtgtgggcacaggtgtggcataggcgtgggcaccagctatgtgtggcttgggtgcacactgcgtaggcaccttctcccgggcgcctgcctctgcctggcgccggtcagcacccccatgccctcggtccctcccctgcccaggtcagtggacaatgaagctgtcagcagactggggccgggggaggcaggcaggcgtggcggggaagggaggcctcaggaggcgaagatgtctctattaggggctgcagaccttgcttccactgtcctgcccagccctggggactccgagagctggaggcagaggtggccccaagcttggggcagaaagggtcgtcttgtccatcagggccccagtcagccttgggactgggtccctggaaaggcaggcccatagatggaggagcccagagcgtggggctggccacaggtggtcagggagggtggaagcgtggctgggagctgcacagggatgaggtgtcgacggcgctgacatcccagccctgccagcctcctaaggcacccacggcccacatctccctgctgagcggaagcactgggggacgctctacccagtgcctcagcagaccctcagccaacggctgttagaatatacctcgtgtgaggtgcgtcacgatacccagctgtaaaatggggcaaccctgtggcttcaacagactccccttcccagtgcctgcggctgagctggagtggcaggagggcttctgtgggagcaggtggcaggaagcataagggctgggggacctgcagaagctccgtacccccgggaggctggggccagagcaggcttcttgcaggggcgctggtttcggccctcaccctgactgccctgccggat

SEQ ID NO: 8177 - DNA, 2110 bp, Artificial sequence
  DNA replication origin
gcccggcggtctcgagggcgtgggagccggggcaggcgggctaggcccctagtcgcaccgcggggcggcccagggggcggcgggcacggggcgcaccgagggcgagggcaggcctgtgtttgcatagcgcgcagctcgggtcccctggggctgtgctcaggagctcagaggggaggtctcggcgggggtcgggatgtcaggaggcttcgccgagatgccgcggagctgaaccctgtggtgtgagcggcaattcctcaggtggaggagggcaggacggcattccaggctgagcctcccgtgtgcgccgcaggtctggggcagcccggcgcggcctgcgtacctgaccggcgaggtgcagaggctgcgttgactgacctggggccgcacgcagctaagccgcctgagagccccgcgcgaggggtccctaccccccgccccccaaggaggacacaggcctggggctggctgcctgcccggcctaggatgaagagcgggggctggatacccctggcttggggagcacagcccggctctgagggaggatgacagagagctggtggcagagcctgagctggcccgaggttctgggctccacggggtgggctcagagtccagctgaagaggggtgggttcccaggaggggaaggtgctgccctgcgggggacgctggaggtgcctgggtcccctcaccccacatgactgttggcttctgtgtccaccctcacaaggaaaaggccatctgctcccaccttcaggcaaagcccaaggaggtccggggcccatgggagccagtgagctggccgggagggccggccgggtgggctgcgtgcctggcttgtggcttccaggactggaggtgctcatcaggaaaatgggcgctgaaagcccctcagtgactggctgcctgctgaccccacccagcccatgcacagccccaccatgaatctcccagaggccagggtgtccctgggctgacctcagggacttggaagggccctgctcccaggaagccctcatgcccacccctctgtgccgactcggtggctcagcacctgtccttggccaccctcatttcctgctctggccaagcccatgtccccagaccgtcttggggcccaggctcacccacctccaagtgcactgtccagccccctccagtgcacagccccaggtcactgccagccaggtccgctcccaggacaccgttccccaaggcacagcagcacattggccctgctcttttttttttttttttttttttttgagagggagtctcgctctgtcacccaggctggagtgcagtggcacagtctcagctcaagcaatctctgcctccctgattgaagtgattctcctgtctcagcctcccaagtagctaggattacaggtgtgcaccaccacactcggctaatttttgtattgttagtagagacggggcttcaccatgttggccaggctggtcttgaactcctgacctcaactgatccacctgcctcagcctcccaaagtgctgggattgcaggtgtgagctctcttaaccaactaagtcatcaggttctgaaagcaccagcatgcgtgtgggtcctgacctgaccgtcttgccccttcccctgggggactggatgggactgtgggaaggagctcacgcgtggacaggtctccctcagggaacagctgctgagtggggcccctcctgtaggcagaagggctcagtggagctgtaggctcctttcccagtacctccaagaaggactgactccctctgcacccacggccacgggtctctgggaggggagcatccgtgcatctgtgaacacatagctttctgctttcttcctcaccaggatcctctccttggcagaaatgcccagtaggggtctggtccccatgtgtcccttccccagcccctctcccatttgtccttgaaagcctgatcctacagaccctatctctgagggtcccttgctctccagcttctgggtgggtttgaccagtgggcagtgctggcaggaggagggactggggaccaggcactttcacaacccactccctccctttgtccccgcagccctggcccaggcccaccacctctccctccagtagcagccgg

SEQ ID NO: 8178 - DNA, 899 bp, Artificial sequence
  DNA replication origin
ggagggctttgcagcagccagggagggaagggggaggagggagggaccgcggcggggaggaggcggccggcgccaggcggcccgggagccctgggcggcggcggcggcgggcggggcggctgggggtcggaggggtcgggacgcaggagccggccaccgccgctttcgtccctgtccgcccctctaacgagctgccttcctcctcctgtagtctcccgagcggcgcccgcctcccgccggtgcccgcgccgggccgtggggggcagcatgcccgcgcgcgctgcctgaggacgccgcggcccccgcccccgccatgggcgcccctgcctgcgccctcgcgctctgcgtggccgtggccatcgtggccggcgcctcctcggagtccttggggacggagcagcgcgtcgtggggcgagcggcaggtaagaagggacccactaggcacgggagaggccggcccgtgcgggcagaggcgttggggacgggaaccggccccgggtcggaggggccgccgggtgtgagtgacgccccggggttagagcccggattccgctgcctccttgccggagagcgcggccagagctagcgcggcgacttgtggtgcgcccggagccgcagctaccctccaagtgcgaggccaccacggggagccaggctgggggttggcgtccgcagccccgatcccctgcgactccctagccctggcctgtcgggagggcgcggggggccccatttccacgattcccgctgttgttattcgggttctgcgcagacggaaagttcccattgttggcgtccccctcccccgggccccagtttgtggccagcttcggccaaggcgagagaccggacttctaagggtgggtgtgcgcgtcagcgaagcccggcccctgcccgcc

SEQ ID NO: 8179 - DNA, 1718 bp, Artificial sequence
  DNA replication origin
ggaagggttctttctttcttgatccacaaaagggaggccccactgacaccacacagacactggtgcccaaacacgttggagacaaaactcctgctgtacccaaggcggggtaggaggcaacgcgtcccacctcccacccttctatggatcccacaacacgtgctcctgccggcgccccaaccccacacagtgccgacctcaacttgggctccacatgccaacgacagccctctgctgtgtcccagagtctccacaactctgccactcactggtcctgtacctcagtttcccccactgtggcacaaagtaaaaatcccaccccacaggcccaggagctcagggagggcaccaggccctgaaatggctgcaggagtgagggtaggggtgagaggcgctccctgccctgggtctctggccccaagactgatgtccattaggcagggtgctggggacggccaaactctggcctggggaacctttctccaggctctgggtctctgcagtggaggcccagtgcatgtgagggagcatggctgagaggatgggggagccttgctccatcataagcccctcgggttgaccccagagaacaaggatcaaatccagactcgcttccggagctggctgccccaggggtttatttgggttttggggtgagatgagggcctggggtcaggaaacaacacattctggtttcggatgcacatgaagttctctgcagctctctggggtacaggaggtattgccaggtaggagctataaaatagcctaagaggagggggcccccaaaagtccagcctccctgtctccccacctggagtttcacaataaagtccggaaaaaagggatctggaggctgggcaggctaaagagggcttgccagggttatctggcctaatccttcaaacagcctgccattatcggttctcttggacaggtaaggaaactgaggttcgaagagggcacccgagcctgagctggcagcctagaggtccaggctgacccctaccccaccaaaggtggctccactcctggctcattcactcctgaatcactcaggtgagggctgcatgcctccctagatgaggtgactttagatccccgtcctccaggagaccccaagcccctgggctcccactcaagctcagctgtaacaaggggtgccacagccccagatctagccccaagtgagacctgagggctggggagctggggggtgggtaacaaggggttcctaggctcacacaaggacctggaggccaggctcagcccaggttaatgaaccacccagaggcccacgcggctcaaagtccagccctgcagaggaggagtgggggaggttgcagccagcaccttcgggaaaggccctgcacccccagacccctgctgggtggggtgggactgtgggagagccgaccttgtgtacctccctgcaccctggggggtcactccaggtcccaaccaggaatacggccccctggggagatgggggctgtcctggcagggcctggggtggccagggcagtccagtggccaaaacctttcccaccgcccttgacccctgcgagccaaggctccataatttatgttcccgggcaagcgccagcctagacctcagtccatttcacgaggtctttgtatttttactgcccggcccatcttgttaaggaaccggattaagtttattgaccgatcaactcactacctgtttcaccagc

SEQ ID NO: 8180 - DNA, 1837 bp, Artificial sequence
  DNA replication origin
ggtgccgggtttgggggtgcctgcctcatggttgcccatcttccccacagaagtcccgggcccagagcccggccagcaggagcagttggtcttcggcagcggggatgctgtggagctgagctgtcccccgcccgggggtggtcccatggggcccactgtctgggtcaaggatggcacagggctggtgccctcggagcgtgtcctggtggggccccagcggctgcaggtgctgaatgcctcccacgaggactccggggcctacagctgccggcagcggctcacgcagcgcgtactgtgccacttcagtgtgcgggtgacaggtgagctctggggccacgccagctacagaaaggagccgagtgccgggctccctgagtccctgcgtgggtcaggagcggctgggggtctctctggtcattggtggagaggagggcacccccaggaagtgctgcccaaatgggggaccctgccccatctgggaggggcacctgggggcctcctggggcaggttgggcattggttgcggccatctctgccttgcagacgctccatcctcgggagatgacgaagacggggaggacgaggctgaggacacaggtgtggacacaggtaggagcagggtccagggttcaggccagccggggtggggcccgctgccaccgccaagccctgcccttcacaggcagctgagggactaaggccccggaacaacctccctggggtcaccccgaaggtctggtcccctcaggatacaggaggggctgggtcactgacatggctctagatgccccaccctggtggcagggctggggtgcaaggggacaccgtgttgctgatggggagactgaggcacagggccctgggggttccaggagcaggaggaggccagggctggcctgtggggctctggtgttggctataggtgaggtggaccccgcagacattagcgcagcagggcagggcactcaggtggctgccgtggggtggatggacccggggtgagggcgccggggcacctgccacaaccagtggcgggcagggtggctggcaggagggtggctggtgggtgggctgcggctgtgagagagcagtcggggacgatgcctggcgtcccggcctggaacggtggcaggtggactttgccaagttgtagggtggggaggtggggcttctggttttggagggagctctgaggggagtgcgtgcaggtgagggtcatcgtggcacagacatggggggcagttacgacttgcggactgatggtgtgtgcgctgggtccctgggccagtggggtaagcaggtgaggaagggaggctgagtccatgagagaaacagctgggggaactcaccctgggggtctccaggaggcctgggagggagctcagcaccgtggggtgcctctttccagcctgtgtccacactgctgcttgctgggcctcagtgcccctgatgggcgtgtgcctggagggggctggcagtgagctcactgaggggagggctgcttccctcctggggaatgccagcccatccttgcctggagtcccggcaggaaggcagcaccagccctgaggaaggagaaaaaccagttgggctgtgagaggggtggtgggagccctggacatcgagatgggaggaggcagggcctccagggtgccaccgtctctgggtgcccgccagacttggagctctgcagagggtggtgtagggtcttgatttccgtgggcccatgctgcccagctgcctccaaggctcctggctctgcaggcgactgggctcctctcctggtaaactgctcccaggtcctggcttgtccactagatgggcctgccccctgggt

SEQ ID NO: 8181 - DNA, 1526 bp, Artificial sequence
  DNA replication origin
cacccgcccgcgtcccggtgcagctgcggcatcagcagtggagcctggtcatggaaagcgtggtgccctcggaccgcggcaactacacctgcgtcgtggagaacaagtttggcagcatccggcagacgtacacgctggacgtgctgggtgagggccctggggcggcgcgggggtgggggcggcagtggcggtggtggtgagggagggggtggcccctgagcgtcatctgcccccacagagcgctccccgcaccggcccatcctgcaggcggggctgccggccaaccagacggcggtgctgggcagcgacgtggagttccactgcaaggtgtacagtgacgcacagccccacatccagtggctcaagcacgtggaggtgaatggcagcaaggtgggcccggacggcacaccctacgttaccgtgctcaaggtgggccaccgtgtgcacgtgggtgccgccgctggggctcctgggctggccccaagggtgccccttggctgcgggttgcgtgaggatttgggtctaggggttggagcttcgggggcagaagctgtgggggtgcttgtggggccaagtctcagccaccccacacctcagggccataggcagctgcgttgggacccgtttccgtgtctgcagagggccagcctcagccactgaagtccctgacatggagctgcccacgggcttcttgggggtgggtgcggcttgggcagcagtggtgccccaggacaggagggcagtgtggccaagccctccaggccccctctgggcctcagaggcggtggctgagccccgacctggccgattggctctcgtcagctgtgtgcagtggggcccgagctcactgtctgcccgcctcctgaagcccttagctttgttcccatggctgccgggtgggggccactgaattgggacggttgcgacactcaaagcccaaagagaaacatctgttcagagagaagacggtctcttgggggcggggagcaggcgcagggcgagggtggagtccagaccccgcccagagaggccgcctcgggccctgtccagggtgcaggttctgcaagagcccgggggagggcaggccagtgaccagaggttgtctgagggtctgggctgggttgttggggtggaggcagagacgtgcatcctgtgaaaccacagccaccgtgaagtgcctccacgcctcctccaggcagcctttggggctgacgcagcccagcctcgatctgtaccttgggggtctcccacatcctgcctcgtgcccggcggggctgcctcgggggcgtgcctgagccgggtctcttgtccccgcagtcctggatcagtgagagtgtggaggccgacgtgcgcctccgcctggccaatgtgtcggagcgggacgggggcgagtacctctgtcgagccaccaatttcataggcgtggccgagaaggccttttggctgagcgttcacgggccccgagcaggtaacgactctgtcccatgccggccggcacaagagctccagctccaaggccctggccg

SEQ ID NO: 8182 - DNA, 3906 bp, Artificial sequence
  DNA replication origin
ttggggctgacgcagcccagcctcgatctgtaccttgggggtctcccacatcctgcctcgtgcccggcggggctgcctcgggggcgtgcctgagccgggtctcttgtccccgcagtcctggatcagtgagagtgtggaggccgacgtgcgcctccgcctggccaatgtgtcggagcgggacgggggcgagtacctctgtcgagccaccaatttcataggcgtggccgagaaggccttttggctgagcgttcacgggccccgagcaggtaacgactctgtcccatgccggccggcacaagagctccagctccaaggccctggccgcgcgccctgcacgccccgcacgcccagccctgctcgctcccgccccggctcgcgctccactcggggccgcctcggcaaggctggcagctccagcctccacggtgaccgcccgcttcgagccctgtggcctgcgccgacccttcccgcacgcctgcgacccccacaggaggtgcccggtgcccaccgggccggctccgtgccgtctgtgagcacccctttgcgcctctctccacccctgcccgctgcctgctcgcttccgcagcctgtgtgtccctgtgtccatcctccacctgcacccgcccggctctgcgctaacccgcatgctgcctgcccgcctgccgctcacctgggacagaggactcgccggtggaggggcctggcttcgggctcagtaccggtgtaccaggcggagggccctcagccgcgtggcggtgaccaagttggcggtggctgaggagttggtggtggcggcgttttccttgcagcggctggatcctgccgtgtggactctgtgcggtgcccgcagggcggtgctggcgctcgcctatcgctctgctctctctttgtagacggcgggcgctaacaccaccgacaaggagctagaggttctctccttgcacaacgtcacctttgaggacgccggggagtacacctgcctggcgggcaattctattgggttttctcatcactctgcgtggctggtggtgctgccaggtaccggcttctgctgctgctgctgctccgcactgtctgggggacgctggctcgggacacgccaaagctgccaggacggacgggaatcctgtgacttacggccgtcccgcttcttgagccctcactcctggccctgtgcccagtgtggggacaaagttggcctggcccggtcctggtcccagaggggccccctcagccccctcgagcccacttcccatctgggtccccaaaggcctctcctgtggctctggtgtctcccgggcgcctggtggcggtgtgggactggctggctctgctgggctccttctctccagggtctggccctctagactcactggcgttactgactgcgagaccctccagacaaggcgcgtgctgaggttctgagcccccttccgctcccagtggtgcctgcggctctgggccaggggcatccatgggagccccgtgggggggggggccaggccaggcctcaacgcccatgtctttgcagccgaggaggagctggtggaggctgacgaggcgggcagtgtgtatgcaggcatcctcagctacggggtgggcttcttcctgttcatcctggtggtggcggctgtgacgctctgccgcctgcgcagcccccccaagaaaggcctgggctcccccaccgtgcacaagatctcccgcttcccgctcaagcgacaggtaacagaaagtagataccaggttctgagctgcctgcccgccaggcctcctggagccccacctcggcccacgctggtcctgggctgtgtgagccctctctgcagccaggcgggctcccctctcctcgtctctgctcaccatgtagagcctagggtactttggggcacgaaacattctaaaaatcttcattcaatgctggtggaagtcagaacgcccccccttctggcccagcactgacccccggctgtacctccacgccctgtcgcccacgcggcgccaacctgcccctgctgacccaagcaggtgtccctggagtccaacgcgtccatgagctccaacacaccactggtgcgcatcgcaaggctgtcctcaggggagggccccacgctggccaatgtctccgagctcgagctgcctgccgaccccaaatgggagctgtctcgggcccggtcagtggtgctgagggccagcgttggctgtagggggcttggtggtgggggtgaaacagccaccagtcagaggcccggctgggtttaggggccgtcagggatgtggcggatgttgggtgtggctggggttctgtggagatgctcctgggacgggtgtatggcagggactgcccctctcaaggtgccctgtctggaggggcagcaagggcgggaggctgtgggtgacactcttcgtccttacgagcaggctgtagggggagcatggagggcttcctggaggtggtggctctgggcctcaagggctgggccaggctggggtggggaccgtggtgggctgagagtgggcgagtttgcacactcatggtccctctgcctccactgccaggctgaccctgggcaagccccttggggagggctgcttcggccaggtggtcatggcggaggccatcggcattgacaaggaccgggccgccaagcctgtcaccgtagccgtgaagatgctgaaaggtgaggagggggcggccaggggtgcagagcagggctgggggcgccgccgccgcctgacacaggccccccgctccgtgcacagacgatgccactgacaaggacctgtcggacctggtgtctgagatggagatgatgaagatgatcgggaaacacaaaaacatcatcaacctgctgggcgcctgcacgcagggcggtaggtgcggtagcggcggtggtgccggctgggcggccctcctgggcctggcagcccgtctgaggagcccgtgtccccagggcccctgtacgtgctggtggagtacgcggccaagggtaacctgcgggagtttctgcgggcgcggcggcccccgggcctggactactccttcgacacctgcaagccgcccgaggagcagctcaccttcaaggacctggtgtcctgtgcctaccaggtggcccggggcatggagtacttggcctcccagaaggtgggcagggcggcaggtgtgggtggagtaggctgggccctgccctgagatgctgggagcagcggggagaggtggagaggcttcagccctgcctcccaccccttccccagtgcatccacagggacctggctgcccgcaatgtgctggtgaccgaggacaacgtgatgaagatcgcagacttcgggctggcccgggacgtgcacaacctcgactactacaagaagacgaccaacgtgagcccggccctggggtgcgggggtgggggtcatgccagtaggacgcctggcgccaacaccgccttcccacaccctcccagggccggctgcccgtgaagtggatggcgcctgaggccttgtttgaccgagtctacactcaccagagtgacgtgtacgtgtcctgcagagctcaggcttcaggggtggaggcgggaactgggcagagccaggaccccagctgcagtccccaggcctgtgccctggagctcctgggtgtggtttctacccctccctgggggcagcagcgcagccctggcctattcccctggtgcccgcccaggtgtctgtcctgggagtctcaggacagcctgacctcaccttcccctgcagctggtcctttggggtcctgctctgggagatcttcacgctggggggctccccgtaccccggcatccctgtggaggagctcttcaagctgctgaaggagggccaccgcatggacaagcccgccaactgcacacacgacctgtgagtggcatccctggccct

SEQ ID NO: 8183 - DNA, 973 bp, Artificial sequence
  DNA replication origin
ggccttgttgtccacctgctcgccctccacctcggccactttcacctgtgcttcctttgccttcagaagagggtacatctgtgggtgagcccagaagccaccagaggcccctgctgcccctcacctctgtcctgtgtcctgtgtcccctgccccgtcaccacctgggcttcacacacacaggacagaaggcactgccgaggtgctgcccgcaattgctgggaggcccctgggccgccctctgcgctcgcccgatgactcctgacatgtgggaaggagcataggcgctgctgacacagctccaagggccgcggcccagatccacagcagccaacacgtggccaggtcgggaccactggcaactgtgccacacgggggatggcaggcaaggggctggtgaggagggatggaaggaaggggacaggtggctgggtgggggcactcgcgagggggtgggaggcaggctcctcgcccatggttgaggaatgagtgcgcttgcacacctccccccaccccagaagagcggagccacctatgaagagatgaggtaaaaggggtctccgacagcacgtaccacaatctctgggagggtctgcagtgtggacttgagctggtcggctggagagagggtgtccgggaggtacatggcccgggacaggatgagcagcgatgtggggatctcctgatgcaggtgcaggtccagccactgcaaccaaggccaggttcagcagatgggcagccccccaaccctgctggccccacagcaggtccgcccatctcatcaccagaatagctctcagagaagacagtgtctcaagttctacaaggtctgtttgttgctgtgctgcgtgacccgatgacggcgttagtaaacaaaacaccagagaggcttgggggtcagcaacccccacagcgaggaccccaagggcctcagaacagggcaccaactcttcacttaaaaacaccccaggggcc

SEQ ID NO: 8184 - DNA, 852 bp, Artificial sequence
  DNA replication origin
tccgggagggaggtgggggggtcagccccccgcccggccagccgccccgtccgggagggaggtggggggcggtcagccccccccgcccggccagccgccccgtccgggaggtgaggggcgcctctgcccggccgcccctactgggaagtgaggagcccctctgcccggccagccgccccgtccgggagggaggtgggggtgtcagcccccctgcccggccagccgccccgtccgggagggaggtggggggggtcagcccccctgcccggccagccgccccgtccgggttggggggcgcctctgcccggccgcccctgctgggaagtggggagcccctctgcccggccagccgccccatccgggagggaggttggggggtcagccccccgcccagccagccgccccgtccgggaggtggggggggcgcctctgcccggccgcccctactgggaagtgaggagcccctctgcccggccaccaccccgtctgggaggtgtgcccaacagctcattgagaacgggccaggatgacaatggcggctttgtggaatagaaaggcgggaaaggtggggaaaagattgagaaatcggatggttgccgtgtctgtgtagaaagaagtaggcatgggagacttttcattttgttctgcactaagaaaaattcctctgccttgggatcctgttgatctgtgaccttacccccaaccctgtgctctctgaaacatgtgctgtgtccactcagggttaaatggattaagggcggtgcaagatgtgctttgttaaacagatgcttgaaggcagcatgctcgttaagagtcatcaccaatccctaatctcaagtaatcagggacaca

SEQ ID NO: 8185 - DNA, 1229 bp, Artificial sequence
  DNA replication origin
ggtggccgggcagaggcgcccctcacctcccggacggggcggctggccgggcaggggggctgacccccccccacctccctcccggacggggcggctggccgggcgggagctgacccccccacctccctcctggacggggcggctggccgggcagaggggctcctcacttcccagtaggggcggccgggcagaggcgcccctcacctcccggacggggcggctggccgggcaggggggctgaccccccccccacctccctcccggacggggcggctggccgggcggggggccgacccccccacctccctcccggacggggcggctggccgggcagaggggctcctcacttcccagtaggggcggccgggcagaggcgcccctcacctcccagacggggcggctggccaggcggagggctgacccccccacctccctcccggatggggcggctggccgggcggggggctgaccccccaacctccctcccggacagttcttttaacacttgaaaaataatgctccacttcctctggtctccacagttcctgatgagaaatccattgtcattcaaattttcccctaatggtaaagatgccgttcttggccaggaacagtggctcacgcctgtaatcccaacattttgggaggccaaggtgggagaatcacttgagcccaggagttccagaccagcttgggcagcctaatagtaagacctcatctctacaagaaaaataaacaaaactagccggtgtggtggcacaggcctgtggtcctagctactcagggggctgaggtgggaggatggcttgggtccaggagatcaaggctacagtgagttgagattgtgccagtggactgcactccagcctgggcaacagaacaagacaccatctcccccaaaacccaaaaaaagacctggcattcataaatgaaacaacgacacacacacacacacacgatgcctttctctcactgccttaaaaaccctttgtcttcagggttcattagtttgactctgacgtgacttgctgtgaatttatttggatttatcctactcagggttcactcagcttctgaaatttgcagatttacatctttaactgagcctgggaagttttcagccagccattatttcttgaggtactttttcagccctgctctatcctttctcccccggaacatcagataacacagatggttgacacttgctatagcacaggctgtggggc

SEQ ID NO: 8186 - DNA, 1081 bp, Artificial sequence
  DNA replication origin
cagccgcctctgtcagccgtccgcgcgggccgggtctgaagcgccgccgggacggcgaagagccgcggccgccgcggagaaggaggcagcgcaggaggccggagcggccgccgcgcccgagcacatggcgtccatcttactgaggagctgccgcggccgggcgcccgcccgcctcccgccgccgcctcggtacaccgtcccgcggggtaagcggcgggcaccccagggcggggccggctcccggctggtgggtcgggagcgcggacgacccgcgggttcgggctggttgtcacggcgatgcggggagcccggtggtcccggcctccggagcccctgcgggaccgtggggccccgggtctcgtcgcgggctgggccgccagcgccgggcggagccgctgggcctctgccgtgtgttgtgaccttaggcggccgggtcccccgggtcactgcctcagagacagtgggaaaattctgaagggctgggcagccctggcgcgccctgcgcgagtaagcttggtggaacgtgtccacgcacgaggacggccgtgccctttggtcacgtttggggtcccggagacgagactgggtgggcagggcagacaccggcgagcaggacctgctgggctgcaggagccttcctggtccgtcactgatgaggtgatgccagcacctacaaacccctgtggtgtgattaggccgcgaccggcacccggggaacacggggactccggagccgctgagggtcctcagggtgcgtggctttagcccccctagcctcaggtgctgtctggagtgaatgctgtcccagggtgtgcccacctcctctctctctctaattaaccaacttatttgagtctatgtccttatttgtaaaattggaataaacataaaacttgctaagagggactcaagtaaaataattagtgcagtggtgcgatcatactcactgcacctcaaactcctgggctcaagctatccttctgcctcagcctcccaagttgttagttgtgccacacaacacccagctaatttttttttttgtagtttttttgtagagacagggtcttggtatgttgcccag

SEQ ID NO: 8187 - DNA, 1765 bp, Artificial sequence
  DNA replication origin
ggctcctggggctcgctgcatcctggttcccgtcgtaccgtggacgccggggctcgcagcgtggcggccgcaggagctgagggagtcggccgcgcttgcgcggggagtgtcttttcgtctccgggcggcggcagcagcgcgtgtgtccggaacttttctgggactaagtcctgcacccacgagtagaaaacggctcctgggagcttggggctccaagggcaagtcaggggacgctggggatggaggggcgccctcgacgccctcggccgcggtccctcgccggcccccctgctctgtggctctgccctcggcggtctgcactctggcgcgcgcagctctgagtgcctcttccctgcgtaccgggcggcgctccccagatacggcgctgctcggcgtcgggagtccccgtcaccactggggggacgggagcgcagggtcccgccccgaaggacagggccatgccggcccctggaggcgagggcactaggccgggtggcggcgcagccagcatagcggccccccatcccggcacaccgcgtcctcccgtctgagcgggaggggtagatatgggtcctgcgttggcgcggggggacccctcgtttcgctctggcctaagcagcccctggggtcccgcgcgccgcaagagcgccagacttcctaacctgggccataccctgtccgctccacttcccagtccaagaaggaacagccgaagcccaggacgccaaggacctggctcgaagtctccagaattcccgccagagctgggctgggctcgcggaccgctcatgcgccgtctcccaggagcctccccccagcccagtttaatagccggccctgaccagtccaggggagagagaccgtgcagcctcccagcagaccgtgacctctgagctccaccttccccttccttccctaagatgaggatccctgagttggggcagagaaagcaggcagggagaaaaatggggacctgcggcgctgggggcccagctggtggagatctccagctaggagatccccagcacagcacttgccctgccctctgtcttgttcagggatgtaacctgcctcctcctgcttctccgcggcacctcagggcaccgcctggggagggtcttgtagtgcacactcagcatctctgttccctggagcgcatggggtgtgaaacgcctgatgccagccagctccccagtcttgagaggctggttgaatggcacatctccctaggaggctccctccccagggtcccctctgcccctgctgtccatgcagtcggtcctcacccgtcaggaaaacgtagcctgcttgcctgggtggttttccccatcaggaactgccaggtactgggcctggatgggcttgaattccccatctcagtgggagaagggggcattgtttagtgcagggcactttgaagccgtctgtaagtccctgtgtccacaccggtcagtgggcactgcagacatcaaatgcagacagagtttaagcacaactaggcctgaacctaggcctgtgctgccaacagacatgaaggggccccttttccacccatcccccaggaggcaagagggggatacagaaggatagtccttgcctccccacccagggttggacctgagctggagtggacagttggtcagggtcagaaagaactggactttttatggcccagctgtaggactttttatggctcagctgtaggactttttatggcccagctgtaggactgtatgtcctagtcctggtctggacattggttctg

SEQ ID NO: 8188 - DNA, 1335 bp, Artificial sequence
  DNA replication origin
ttacagtgagccaagattgtgccactgcacttcagcctggtgacagagcgagactgtcgcaaaaaaaaaaaaaaaaaataggtcaaaagaaataagtagaaatctggcatccagccagctgactgtgcacccttaaggctggaatgaggccttccagtcccacatctccatatgcagcagaacaagggcacagaaccatggcgcagtggtttaatagcaagcactgtttttagcctttttctcttctttttttttttttggttggggaaacttccttttccttctccctatgttcctcacaaatcacatataaccttccatagtcactcggtgtatatacaagtgacagtagagaaacagggcaggaagcccaggcagcacacgggccccagttagggaggttagggatcccgttagggagggcggttagggatctagttagggagggggctagggactagtcaggcagcttagggacctagttggggttgggacctagttggggggtttagggatctagttagggaaggggggctagggatctagttagggaggaagttagggatctagttagggagcttagggaaccagttagcgaactagaggaagacttagaagggttgtgtgctgcacttgacccatgctctggtgaaaagcagccagagttgcatttgcccagattggggatttgctgggaagtatgatgaaggaagagagacaaggatgtttgcaagagactatgaggcttgtcccaggaattgaaactggggagaaggaaagggaagaacaggagggggcagtgggagacagcagaagatagcaggatcactggcctgtgggctgagaggggtttggagccaggtaccagaacaagtaagctgacgaaagtgggatgctccacacagggtgcttgcacttactggtgatggcaggggctagggtgacagcccaggagaaaaaccttggataccaggtcaccttgcagctgggagaagctttagccaggtacatgcagcaggagaagtggaggtcagcctccagcctccagcctcctctcaccccactgaggaaccacctgcagataaaagtggtggttttgggccaagcacagtggctcgcacctgtaatcccagcattttggaaggctgaggtgggcagatcacgaggtcaggagatcgagaccatcccggccaacatggtgaaaccccgtctctactaaaaatacaaaaattagctgggcgtggtggcacatgccggtaatcccagctgcttgacaggctgaggcaggagaatcacttgaaccctggagatggacgttgcagtgagccgagatca

SEQ ID NO: 8189 - DNA, 1881 bp, Artificial sequence
  DNA replication origin
gtccctggtcagtccctaactcaggctgccaaagacggtcgccagtctagggaagaagcggcccaacgcgctccccaaagacgtcgctgcaggcacagggtttaggaagaacttttattttcttccttctgctgctgtgggttttaatttcctgccattttcataattaaaaaaagaagtgctattttagcacgaaacaatgtttctttagccaaagccagagtgagtgggcagcaatggccgcgcgccctgctctgggtggtcccgaccccggggaagtccctgtgcagaacgggggctgcgggggcggcaggaggaagtggggggcgcggcacccaggcctcgctgtcttccctttcccttcgagggacctcgcgctgcaaaatccgaagagcccggctggggcggggtcgcggggtgcgcgggaaccggggcctgggacggggcggggcctagccagggcctccacggaagcgaggccaggactggggagtggggggtgggggggtcgtggctgagtgggtgccctgagggcggtcaaggaccccgcgggcctcttctcctgcctggacactgcgcttgcctggctatcaccagtcccagccctgccgccctggggagagggagaaggcgtgcaggtgagcgctacgggctggggctggctctgacctgacaccaggtcccaactgtagttgctaaggtcctgcaactagttagagaggtgttgtagagccaggtgctcatggttgtaatcccagtgctttgggaggtggaggcaggacgattgctagagcttaggagtttgagatcagtctaggcaacatagctagacccccccaccaaaaaaaaaaaaaaaaaacgaaatcggtcgtggtcttatgggcctgtagtcccaggtactcaggaagcagaggcgggaggatcgcttgagcctcggaggtcaaggctgcagtgagtcgtgatcgtgccattgcactccagcgtgggcgacagagctgagaccttgtctcaaaagagagattttcgggccctaacctggcatctctaagtgcgagctcacttggaaatagagtctttgccgatgtaaccaaggtaagataaggttattaggaagggccctactccaatagatctgtgctcctcctaagagaaaagagactcaggcgatgtgcaaggcagaggccacgtgaccacggagccagggatcagaggttgccaccaaaggtctgaggcaagcaccggaagctgaggagataccagggaggaccctccccaaagcctcccaccctgctggcaccttgttttcaggctcctaggctccagaacgatgagggtaactttctggcattttgtggtcctaagaaactggtaggagcgggaacctggcctgggagccccccagtccagtccagaggtagtgttcatggggctatgggggaggaaggagggctctagaggaagttgtccctcagctgagagctcgcacagcgagaggggtaaagttcagattggtgcttgccaaaggtgggtgtctgactgtccaaggggtgacaccagtgcgggtcacctctgaggcctggggctctgcttgcttgggtggcctctccaggaagcatctttgtggggagatggatttccagttgcccccacgactgaagcctggtcctgatatgtggtttattcttggaggtgaccactgggactcagccaggacacagggagggaagtggggctcctcagctggatttcagcccccatgtccatcacccctacccgatggggaccccaactcagtggaagctctgctcacatggccctaagaggccttgcagtgctgcccttgggcttccagtggctgcagctgtcactcccatgggccat

SEQ ID NO: 8190 - DNA, 1269 bp, Artificial sequence
  DNA replication origin
ggcgcgcgccctgctcccgctactcggcggcgcgcacccggcccagacccggcgcccgcgggcgccgcgctcagtgacgtcacgatccgcgcccaatcaccgtccggagccggcgcccccgagccgtgggcgcgcggccgcggaggctggcgttgggcgcgcggcccgcccgcgcgggtccccaagctcctgtcccgtgagaggggcgcggggcctggggcccgcgggaggctgctagcggcgtccgcctcgcggagcggcagtgcggggacgggtggggaaaccgccgcagaggccccgccgtggcgggcccggagcctcagaacagacgtggcggagagggtcagacgccacgacggggcagggcagggcgtcgtgctcttcccgcctaacggccgcagggcgtgaacgagtcccccgggcgagggtccgacccggagctgggcgcggctgcgggaggaccgctcgcgaggggaggacgcctggtccaggggcgctaccccagcgccgctgcggtagagccgggcttcagggggtggcgcgggcgactgcgtgcggcacagggaggaggaggaagcggcgcgggcgagcggggaagtcagacgctgcaaaaagtgggcgggccgggcggttgaagccggtgtgatttgctgcccgccgcccatggaagttcggctcctgcctccaggtgctgccggagccggcggccttgggttttctgtcacgcaggttcagggagccgggaacaccttcggccttgagccttagtgtctgctcgagctttacaggcccagcttgagccctcgctgagaagcgggcccaggggagcctggcgagagtttggtcaaggagagctttgtgaaagtgcgctacccgggctatagaacgacacctcagcccaggtcctgcctccccggacccacctccagccaccaaggagtggccacagttcacctcctcttcctctcccgcgccgcctccgctgctgtcccttcacaggtgctgggcccctgtatgggttgagttgtggcccccccaaaaaaacaagggttgctgcaagacttactataaggctacagtaattgagacattgtggtactggtggaaaaatacacaaatagatccatgaacagaatagagaacccggatatagaccacataatggagtcagctgagcttgactctaggaaatggaatggagaaaagacagtcttttcgacaaatggtgctggaacaactggatgtccacatgcaaaaaaaaatcaggct

SEQ ID NO: 8191 - DNA, 890 bp, Artificial sequence
  DNA replication origin
accgggaggccgggcggcctgagagggtcgtggggaccgcgaggaccgcggaggcctgagggccggcgggaggaccgggcggaccgcggaggccgggacgagtccgggcaggggaggggcggcggcctgcgggcggcggcggctaacggggccgggcgggcgggcgcggccatgttgggcccggccgggccctgcggctgcacctgtgcccggcccggccgaggcggccgcctttgttcccgcggcgccgagcgggtcgggccggcctttgtgcggcgcccccggtccggggcggccgcggtgggaggggcaggttggggtcccggggccggcgccggggccaggggtcgggccgagggtcgctttttgtttgcaggcggtgtctggcgttgacactcgcggcgcccgggcgttggtcagcgcggacgctcccccgggaagccgggccgcggtccggcccttggcaggtggaggcgggggtgagccgggtgtgggtaccctgctggggggctgcgcgccctcggcgtccgggcctccgcctgggatgttcccctcgccccaggatgcagattgatagtccttgaagcctcagtgcatgagatgggacctggcgacttaatggctggttttgctccactcacaggaaccgtggtttaaaatctcggcgtttaaaaaatgctggtcttaagtttcggtagaaataaaatggatgagggtattgtataggacccattgcagcacgaatctttctgtgcccacgatgggctttgacattcaagtggaaacatagtatcaaaactgatgtggtgacgttaatcgtttttaggtagataacgtgtattttgtgtgtgtgtgtgtgtgtgtgtgtgtgagagagagagagagagaga

SEQ ID NO: 8192 - DNA, 1476 bp, Artificial sequence
  DNA replication origin
aatgttgggattataggcatgagccatgtgtccagcttgttttttgatatgttaagaataaagaagtggccactattgagtgcttatcacatgtcagataccttgccagtatgttattgtacaaaagtatatctagtactcctcagaatcaccttataaggtaaatataaattatctctgctttatagctggctaacctgagcttaaaagttgtaaggtttcagtgagatgatgcagtcaggaagtaggagaattgggacctgaccctaattgtgtgtgagcatgcgcttttgtgtttttagaactcgtaaccatcataccatacagtttcaccgtgaagctcggagacgttaatgaggagtcattgctctgttaacctcagatgatgatgacactttcctggcttccccgcagaagccgtctgtggtggctgtcttgtgaggcgtggtggctgtcttgtgaggcgaggtggctgcagggcgcttgtgactctgctttgacgaagcagtaaaggacactgttagcattcatcctaactgggggctctggagtcatggtgggtgatggggtgccaggggcagaggtgggtgggagggcagcaggcccgtgaaggaatgtgctgtgtttgaggaggtgagaggcagatgtgttgtggatccgaagccctgtgcagaaacttccactggttgaagagctgaggcccttggagcttgaagagttgggagtgagtgggctcatggagtgagtcatggcagcaatcagggtagggcctgctgggttgggaggggtgtggcaggagtaggcatatgcagggctggggacagggaccccacagggaacactggtggagtgctgggggtcagagccagacccagaactgcagaaggtgtcctcaaggtgggaggtcccaggcagttaggctgggggtgtctgcaggttgtctagagaggtggtgggtgggcattggtgggtgttggtgtccaggccagggtgaggacaagagggagtggagcacatgactcatccaggcaacaagagggcaacaagagcctcccatggtggggccatgggaggctataagaagccgtctgtggtgactgtcttgggaggaggggtttgggtttgggggcagaggttacctgtattggctgggcaggtggtaggtccaggtggtaatggtaaccaaccaacattaacctgatggttccttaccactgccaggtggagtgttactgcccccgtttcacagagtggaggcagagacagtgccttcacttgccgaagtccacagaactacccagtagaggagccagcatcagagctggttggtgccgagccagtcagcagactttccaaagggctggtgagcagtgagggctctgttctgactgctcagctctgctgttgtggcaggaagacagccatgggcagcatgggaacaaatgcatggggctgacatccagtaaaactttgtgg

SEQ ID NO: 8193 - DNA, 1990 bp, Artificial sequence
  DNA replication origin
agccgggctgtgcggctgccagaggcagcgtgtgcgcagcgcttcctgcagccacgtagcatcttctgccgcatcgcgcactcagctcgggcgggcgtcgggagtgagggcccggggcgcagggtcagcggccggggcgacaccctccctggttgcccaaggaacagaaggggctgggccacgcggggggttcttgactcctgagggcagctgggtgtcctgcagggcagatgcagaggggcttggcagcaggcaggctcccctggcacgacctctgatctctgcccttcgagccaacttccctcagggcaggaagcccatgaggacagtgagggaagcgctggaaggtcctcccactcagaggccaccaggaggcggcgctcgcggggacgtgatggccgcagccctcgtaggacgggtctctggcgcctgacgcagggagtgggtgtcaggaaggcctggggctggggtttcagccccggcgtctggacagggcagggcgctgttgttcacccccagcgccagccagcccagctgtctcacactgtgagcagcccagtgggcgcatggcagaggcacaggcacgccatggcctggctctctgcgtttcctcgtgggagggggtttatgtggccgaagcaggccctggtgtggatggatctggcctcccaggtattgagggagcacggggtgcgcctgcttcctccacgcacgtcgcccatggcctccccaaggccctggcctcactccagatcccggggccacctccaggctccacgagcgccaactcccagcgccgtccagacccagaggcagccgtccctgcctagatggtgactaggcaccagctcagctgtcacgggtgctgccccaggtcccaggccccaccccctgctgcccaggcacacacccccgcggcaggtgactccaccctgctcctgcgctctgctgtgccgggcacctgcctgctctacgcccctcatccccaggatttcccacccgcaggctttctgcgggagcagtggtggccccggcttctcacccttcaggttttcttgcatctgcgcaccggtggaagagtaggcccagtggactgggtgctgctgggaggtgggaggctgctgggagggcaccggatgccggggccttgcaacctggcagaggctgtgctgctcagggaagcaaggtggccctggggtgaggcggggggctcagaggaaggggagccctcaggaggaagtgttgggggcaactgccagagagcccggccactgcccagtgcccatccggaagctcagcagggagtgggcttggaagtgggcaggggcatggtggcgccggcagcatcctattttgcagatgaagggcgccctaatggagatcatccagctcgccagcctcgactcggacccctgggtgctcatggtcgccgacatcttgaagtcctttccggacacaggctcgcttaacctggagctggaggagcagaatcccaacgttcaggatattttgggagaacttagagaaaagggtatgttgtgctgctttaattcatgttgggtggagggaaatggatctttcttgaaaaatttttttctgaaatgaatttgatttttagacctttacgtttttccgtgtgtcctggtccctagaatattaactgtatatgcaccatcctcccccgtaagctgctgcctggcttttgccatctttgaaaacaaactccaaacagcccacaggccccatcctcactgctgcggtgtcagtgggaggctgtgtcacgccactcgccgtctctctctggtcggctccgtgagggtaggggctctgcccattcaggtggtatctgtagatcctaggttctagggcccagagcattccctggcccagagtacatgctcagaaatgcatgttgaaaatatcaacgatttagttgtttaaatgtgaactgaaagtcacttagaaaatattcacaaggctgggctccgtg

SEQ ID NO: 8194 - DNA, 1481 bp, Artificial sequence
  DNA replication origin
tcacgccccctcctcgctcctccgaatacctccctccagtcctcacctccccctgggtcctcatcccccgcctcgatcctcatctcccacctcggttctcatccccaccgtgggtcttcaggaccccccgcccctcctcgccccctgggaatcccccactagggtcctcacctccctacttttcgtcctcacccctacccaagttttcacctcccctgggatcctcaatctcctccccgccgggccccgggttctcgctacgacccccaggtcctcactcccctccctgggcccccgggtactcatccccacccgcccccgcctcccccgccttcggtcctcaccaccctaatcccccaccgtgccgaagcgaccgactcttggagcgggggtgcgccggccccagcggggtctcccatcggggtttcccgtcggggacgcagccctggtgacctgggcgagggcggggatcccgagagaaacccccgcgtgaggaaggggcggcctgggctcggtagctccagtgtccgctgactggattttcttgttctcacctcgcaaagaccccggccgtccggagcgctctgtgtccgttttactcttttctacacgccgttttgcgtcattccaataagtgggtgtgtgaggtttgttttcttttttcctaaactttatattgtatcgctttccgtgcgaaataaaccgagtagttttgcagactattgaagccccatggttgtttaaacgttcctggctactgatgtattattagctattataggttgtaattgcttttgattgagatatgacatgtatggaaaagtgcatttttgttcagtttaacgaataataatagcatcgcgagccactcctgtgatccttacacaggtggagaagtagaaccatgcctgttccttggaagcctcccactggtaatcacggccttcttcctttccccttcctcattttggaaaggtaatcatttctgtgccatctccccggtgtgagcaattatttatgcacccctaaatggcacagcttggttgccggatttggagttagtgtgatggtatcatagtgtattttgtgtgtggcgtgcatgtgtctttttggtcgacgccgtgacagtttcatccacgttgcagctgactgcagtttaattttcactgctgcgtggtattcctgtctgtgagcacgaggcactttatccattctgccacagtgacacgcttagcttttgtgctcttgtaaatcatcccgttactacattacggtcatatgttcaggtgtttggaatcttggatttctctagggtataacatctaggagtggaattgtgaggatcataggatcatgccaaattatttttcagagtgttttgtttttgtgtttgtgttttgtttgagacagggtctggcgctgtcaaccaggctggagtgcagtggcaccatcgtgactcactgcagccttgacctcctcac

SEQ ID NO: 8195 - DNA, 1179 bp, Artificial sequence
  DNA replication origin
tgtcatatctcaatcaaaagcaattacaacctataatagctaataatacatcagtagccaggaacgtttaaacaaccatggggcttcaatagtctgcaaaactactcggtttatttcgcacggaaagcgatacaatataaagtttaggaaaaaagaaaacaaacctcacacacccacttattggaatgacgcaaaacggcgtgtagaaaagagtaaaacggacacagagcgctccggacggccggggtctttgcgaggtgagaacaagaaaatccagtcagcggacactggagctaccgagcccaggccgccccttcctcacgcgggggtttctctcgggatccccgccctcgcccaggtcaccagggctgcgtccccgacgggaaaccccgatgggagaccccgctggggccggcgcacccccgctccaagagtcggtcgcttcggcacggtgggggattagggtggtgaggaccgaaggcgggggaggcgggggcgggtggggatgagtacccgggggcccagggaggggagtgaggacctgggggtcgtagcgagaacccggggcccggcggggaggagattgaggatcccaggggaggtgaaaacttgggtaggggtgaggacgaaaagtagggaggtgaggaccctagtgggggattcccagggggcgaggaggggcggggggtcctgaagacccacggtggggatgagaaccgaggtgggagatgaggatcgaggcgggggatgaggacccagggggaggtgaggactggagggaggtattcggaggagcgaggagggggcgtgagggcgggccgggggggttaacagtctgaagggggatgggaaggttgggggagggagcgaggagggtccggagttgggtgtgcgggtcggaggtgggaaggttgggaatctgggggccgcggggcgccacgcctgccttacctcgtccaccgtgcggcgcgggaggtgcagcgtcccgagtagcaacttgagcttcactgccgacgagaggccatggaagcagagacggatgttgtcgatgaccgcggccgtgagcagggacgcgatgctgggcggcgcccacagctcgtccgtggcccccagcttgttgtgcagccacaggcccgtgtcgctctcccgcatggacgccatcttgggggaaagcgcgcg

SEQ ID NO: 8196 - DNA, 2143 bp, Artificial sequence
  DNA replication origin
tccctctgctggccatggcccccccgcccgcgtgccggtccccgatgtcaccgccgccgccgccgctgctgctgctgctgctgagtctggcgctgctgggcgcccgggcccgcgccgagcccgccgggagtgccgtccccgcgcagagtaggtgccgggggccgggttccggggagcggggcggggctggcgacaggggcgtgcggggccggggctctgcggggaggaccgcgcctcgcctttgttcccgggagcgggtcctccccttcgcgggagatggtggcttggggagtggggacgtgcgctctttggcactgggtggacgggcccagagtgcgtgggggccttgcgggtgaccccccctgcgccccctccaccctgacccgcgccccccgcaggccgcccatgcgtggactgccacgccttcgagttcatgcagcgcgccctgcaggacctgcggaagacagcctgcagcctggacgcgcgggtgagcgcccgcggcgcgacggtcctcccgggcttcccagggggtggggagggcagggaggatgaggaagaggccccctgcgggagtggagtgtccctcatccttcaccccgatttaagatgccgcaccttgcccccttcctctggctccagtcatccaaggggcattctgggcacctgtctcacctatgagacgcccctctctccagcatactctatttctagcccctcccccagaaggctctcactgggcactttgtcctatgaccgccactcctgagggctgtgacagatctggaccctggggaaggactgtcagcccaatccaggatcccctaggtgggcggcaaggccccagggcagaggagaaactgaggccggaggatgtggcgaaagtgtcaggaatggggggtcaggctgggcagggtggtctggatcctgggtggatgcacaggttggttaaggcccctccaagcctggatgaacagggagcccccacgccatggggtgcagccaaggagtttttgtttgtgccggggctcaagcttcttcctggaaagggagaattctaggaaggagaaagcagggaagaccctgcctggtcccaccccccaccagccctagtgtccttcttgggaacactccagagggctccgactaagacctggagccctctccccactcacagagcctggaactgagctcttgggaggagcagcccccacctatccttaggcatgagggtggcagggagtgggggacagtggacccctgcgggtggtgtgggagctggaagaaggcaggtgggcacgctggcatggcgtgggcaccagcagaccccaggcaggccccaccagtgggagccactgcagaggaaagagatgagtgggaggctctgggtgtgggggttagagccagggcctgaccttgtctgtctcaggagccggtggagatagggctgccttgggtgggtggaggcccaggggaatgccagtgggcagctgggctgcaccctcacccctcttgttgctttgcagacggagaccctactgctgcaggcagagcgccgtgccctgtgtgcctgctggccagcggggcactgaggaccacgctgctccgtgtgaataaatgcccagtggcacgcctgtgtcctgtctctctgttctggccaccagagcccctgcgtcgcccccggcagtcctgggttgggcccctctctgggcttgggtttccccagctgttccagctgggcgagccctcttggctgctgtcccataccagtgcccgtgcggagaggtggacacacacgtccgacctcagtgacctgtgcttcctcgtacctgctcccctgcctgcctccccttgttttgaggctggggaagtgtagaaatcggcctgacccccctgagcccccagagcagctgccccagggctgagcccctccaggctcctgcaccactgaactggtggaccagctgcctgagactgtgggagacagagggtcccggggagagagggcagggccaccccacacagcatcatctcccctgccagctcccacctgcagccctgagcctggaccctggtcactggggagctctggatgggaacttgatgaggccgtactgccatccacacacctgtgcacacagcaccc

SEQ ID NO: 8197 - DNA, 2259 bp, Artificial sequence
  DNA replication origin
agccgggaggatgtctgcgccctctaatgcaggccagggagagcaggggcctgaggtcactgcaggcccaggcagggtggggtgtggggcaggaaccagtgccggccaccagcacctgctcagaggctgggaggctgggccatgtctttgggggcatggcctgggtggtgctcatgtcccattggtcagccttcctcacgcctttctagctgcaagggaggccaggaacatagccctatttctaggcttatattgacagatttaggcaatcaagtccaggaacagccagattcctgtttatccctgcagtgttagggattcctcacactaaatattgtttatccaaaattcaaatataactcagtgtcctgtgttatgggcagctgtgtgccctggcacagggtgaggtctccattactataaaagatggggtctggggcacactcgtcacacacgccctggggaggtgccctctgggattcagtgggggcaggagccaggcttggctgtgggacactgggtggagaggcctccccctaggccttgcggggctggggcaaggacaaggtttggtaacgggagcttctggctgccggtagggaagggacttgcggggcttgtgaggaggtgacggcagactgagaaggacagcagccccacggcagcagagggtaagaggccgctggattccgggtgtgtttgcaggtagagcctgtgggatttgggtggggggtgggagtggtcatgggggtccgggaggccactggggaggtacgcctgtaaaaggagctggagagagaagtctgggatcccctgtggcctgtttgggggcagaggagagaagagggcccctaggggtgacgagcagctgtgaagcaggaagagaactgagctgcgtcccgggcagccacagctgtgtctcatgccaccaaggccaagcaaggcaagaggaccacagggtccatgaagagcggggaaggcctcggaggagcagagcggagggagcctggccacaagcgtgggcagggccagtggcattcacactcagtcctggagccatggcgcagctttcctgccaggggctcagcaactcagggatgagtcaaccctggcatggccgagcagtgacctggcactgcagtctctttctgggacaccttttcttttcctggacctgctatttccctgatcttccctgcattccgcccttatgtctgtagcttctccagtgtcagggcatccccttggtccagggcctctccctgtgttccctgtgggccctgccttcctccctgaccgctgggtatccccactgcccacctgcactccagcccagagccgcctttctctggatcctatgtcctcttctccctgctgccatgtagaaaagcgtgtgggagggacactgtgtctgcttgtctggaaggcggctgctgccacagtccatctgcaggtcacccttcctaccgcagggcctgtgcatgtgccctctgcagggacgcatcccttgccctgggaccggcctcactctgcagccctgtgtccctccttaaatagtttatttttaagagagggccttgctctgtcgcccaggctggaatgcagtggcctcatcacagctccctgcagcctcaacctcccaggctcaagcaatcctcctcactgggcctcctgagtagtggggcccacagtgccggtaccagcccacagagcccagagcctgtagctgggtccccagcgcacgccgacacacccagccccgcattttcttctaagcgtttgtccctgaggggtcccggggtgtttgtttctttcctccctgccaccccacactggattgtgaagcccaggagggtgagatctgctcttcccaggcgcccctgcaggccgcgcgctcccccagtggaagctgcagggaggctgcctgggccagggctctgggaggagctggctacaggggtcccccgcagcccctcccttcctgctctgggggtctttgggacgcagggctgcatggggtgtggttttgggccatcttcccatggaagatgcggggtagggcgagcctggggccttgggcgcctttctgccactcccacctcccggcctcctgtggagccccgttaggcgccctgtgggcctggggaccgttttgcttttcctccttcttcctctggcctcccggtctgtagttccacttcataagagacctcggcccgccccccgccccgtctcacccgcagctccgttccaccccgc

SEQ ID NO: 8198 - DNA, 1855 bp, Artificial sequence
  DNA replication origin
ctgtgggcctggggaccgttttgcttttcctccttcttcctctggcctcccggtctgtagttccacttcataagagacctcggcccgccccccgccccgtctcacccgcagctccgttccaccccgccctgctccctcccaccgtggccagacccgcgccgtcctggggttcccctgggctgctcggcggctccccgcgcccctgttcttcctccccacggactcgggctcggggcgttcgcggcgggataggagcgccccgacggcgttggaggagaccccgcaagtccggcctgggcgtgggctcgcgggtccccgctctgccgtgggtggggctgcactgcccacgtccgctgcgttgggtgtgccctcctcgaacctgagtatccaagcggcggaggcccgggcgcctctcagcttggcatctgaaatccggacggtctcggccgctccgctcccaggaaggcgaggcctgcatgggccaggcggggcgcgggggcaactggggcaggggcaggggtctccggtgaggagggcgctcagggaagcaggagacagaggcggaggtgggcggccagggaggaccgacaggtctgggtttccgctcttgccccacaggctgacctgaccgagcctcagtttcctcctctgtaaaatgggcccttggcgacagcctggggctgatataggcgctctgctgctggcgctgggagcaccgtgtggcctacggggttctccccttgtcgtggggaggggctctaggccccccagcccccacccagagcaagtaccatggtctcccagaccttccaggctgcttcctggagcccagccctgacccttccaagctgacggtgttctggtgccttccaggtacctatgaacccggggctggagcacaggcctcagctgaccatcagggctactgggggtcacatggccacgggctttgggtgacttgtaggggctggagggtgaggccaggcaggctggtgggagggagtctgcagatggagactggaagggccaccaaggcgtgctgagcaggcctctgtctctgggcctggctgctggggccgagcagtggcaggctcaggctgaggctgtggggatgaggtggagagggcaggggccggcagaggctgtggccctgtaagggctggaccgctctcctcagaggtcactcaggccttggggtctgggtggggacactgctcaggagctcctggacagtgaccatggcttctcccctctcctggcccccatcagaagcatgacagcctgttcccccagtctctgctctggagccccaggcccccattcaaagcccagcctcatcttcctccagccccctggctctccaggcgcgccagcccctcacttgcctccactgcctggtttttcctgcccggaccccttgcgtgctgatccctctgctgggacgcccttcctgccgtccacgtggccgaccttaggacgacactgcggagctgcccctgtggctgggcagggaccctggtcagcacttgagcgtcgggtgcaggggttgttgaatggatcagcgagttccttcgagattgtccatgacccacgttgcctccctggaaggcgtgaacctaaagggttgccctgaccctgtgccccggcgccgcagtcctcaaacctggctccggtaaactctccacttcacattaattttgcctcagttttttccctttaggtcaacatatctggcataagtcagcaggcttcagtgaccctcttccctgaccacctggggctccttccaggacttgggggtggtatgagcaggaacccaccatgctcccctcactccagaggtttcctgggtgca

SEQ ID NO: 8199 - DNA, 1439 bp, Artificial sequence
  DNA replication origin
ggggctctgcgccttgtaggacctgcagacgccgcaggctggggcggagaagctcaggtgcggggaggcggtcgcagaccccatcctcggcgcttctcgaacctagcccccttcagttctgcgcgacctcccagcaccaccccgagggctgccggagcagagcttccccgacatgcgcgggcgggacggggccaggggtccaggcctggggacccgcagtctgcgttgtgcggtggagttggggccagccgggcagctgaggtcacctgaaggccaggaggggctgggcctgcccgtggacgtgggagtgaggccgcagcgccctggtggggtggggaggggcggctgaactggtccacagccccgtccgccagagaacgggccctggagaggggcaggggacggggtgggggcgtgggggggaggggaagccaagctgggaaggcgccccctcagtgtctggggcccgctgtcagcttttcaacctaaaggagaaaacaggcaaaacgaatagaaatagtttgttggggccaagtttgaggactgcagcgtggaaggacagactcaggttggtctgaatgcacgcgctctcattcgcagcagttgcaagtgcgtttttaaaggaaaaatgaagacgcagctcctaaattcaccaagaatttgcattaaaatggcataagctattgattggtgtacattatttgtcacaaattccaggaacatgaagatgacgctgaggcggccaggcggacactataggaaagaaaagaaagaacaaaatgccttccagcagttgccccgggcgtgagtggggaggcgggactgaggccctgtactcaggtgtctctgggccagataatctttgagaatcccacatagctccggctatttttcttttctcatttctcgtgtttgatcaaaaattttctcttctcaaagcagtgatgatcgacattctagatgtaagtttttctgctgggaaggctcattcccgggccatctcaccccgcatggggggaaagaggacaggtgcggtgggcgcttaagaacttcgtgaggcctcaaggccaaggttgattggcacggggtctgtcaggccgtctgctatgaaggagccacgcataccggatggcttctgagcatctagctagcatcctcggggttttttggttgactttggacatctagaaacacaaagcctaatcaatttaagaatgaaaaatatgggccgggcgtggtggctcatgcctgtaatcccagcactttgggaggccgaggcgtgtggatcacgtgaggtcaggagtttgagaccagtctgggcaacatggtgaaactgcgcctctactaaaaatacaaaaattagccgggtgtggtggcaggcgcctgtaatcccagctacttgggaggctgaagcaggagaatcacttgaactcgggagg

SEQ ID NO: 8200 - DNA, 3614 bp, Artificial sequence
  DNA replication origin
aagcacccgagatgaccccggctcctccaccaggagcgcggccgggcgcggcgtccctagcgggcttcgccggggtggcgtctctggggcctggggacccccgccgcgccgctgacccgcgccctctgcccccagcgctgtgcttcgccgtgagccgctcgctgctgctgacgtgcctggtgccggccgcgctgctgggcctgcgctactactacagccgcaaggtgatccgcgcctacctggagtgcgcgctgcacacggacatggcggacatcgagcagtactacatgaagccgcccggtgagtcccgctcccgccgctccccgacctccgccccagacagccctcgggggcacgcactccagcgacctcagggcaggcctgggcgagggccggcgtgggtgggcctgagccggggcccctgtgacctgagccttctgggtgaccgaggcctccggtgtcagcggggctgggggaggcacggccggttcctcccgctgagtgacctgagctggccctgcgacgcagtggctccaccgttccctgctgtggatgcgtctccctggcgcctgctgcggtggggcaagggccgctgggctctgtgggtcccatctggtgtgccttgcggggatggggttgcctgcagtgccagggtcctggggggagagggcttgtgtggcaggggccggggaccctattggggcacagaggatggggtgggggcaggggacctgaccttgagccttggccttcacttctggcctgatcgctgggccgcttagctgaagggttttgtcccagcctctgtggccttctatagctggaggagctgggtctgggctctagggggggtgggggttgttctccaccctcgggctggcccccagccgctgagccacaccggttcccccatgccggatgccgcaggggtgaagactctgctctctggggtgggaggctctctgcgatcctggagcgtctgtaggccaacgagagggacagagtgtggcccaaagggttgggcagggtctgtcaggagcccggtcagtgtcaggggaggggcagtgtctggcaccgctggctgccatgctccacccccgcgccacggccttggtgcctgctgctctccctgaccctttcctaaacccaaacagagcatctgagcagcccctgagccctggccagcctctgcttgggaggggaaacgggccatgaggaagcacaggccacagcaacacagggggctccggtgggcacacggggcatggccctgctccctctgggccgtggcctccctggtgtgagggagtggaggggtagctggcagggctgcaggaacaccccacgagggcagaggctggatagctgctgatggcccgtggtggattctgggagctgcttgtgcacatggggaaaccgagtcttgggaggagtgaggtgtgcccagggccacatggtgctgggggttgctacttctgggatggccctgatctctcgtcttgcctgggtaggtagaggcagaacccctgggtggtgggcaggccagctggtgggagggatactggtccaggatcccctccttggaggtagagatgctgtgtgggtagggagatggggggttgggtgtgggagaccccaggggctccaggacagggggccgaggaggggcagccctcctgggaaccctggagctgcacaaagcttggagggcccagctgctcgtgtctgtggcgatggcagcggtgcccagtggctcccccccacgctgcttctccttgaagggccttcagtacccctttagctgcctgccaggcctcagtgtccagcagtgaaggagacagaggtccccttcatggagccagcaggctggtggctgtgcagaggggcaatggggagggatgggagggcttcccggggctcggggcaggtgcagagcctccttgagtaggaggctggatgggccacaggcaggctgtgtggccctccactggccaaacccttggtcttcagagaggtctctgggtgccacctctgcctttggctgctggaggtggctgggcttcccctgtggccagtgcctgcaggttccctcccacaaccgccccaacctgcccctgcacctctcctcctcccctgccggttcccctcccccacgaccgccacctcctggcttcgtgcctgactcgaggtgagaattgggccgtgctgtggatggggtgatggcctggccacttggcctactgccaggagaggccggggccagaggggccatcccctgtcccccacttggatttataggaaagctcctcctgggctgcagggagccttctggacgcactttgctgacccctgccctttgcggccctctgctgtgggtgctggagtttgccgtgatggcccgggtgaccctgggtggccagaagccacagcagtttggctgcaccatggcctgttcagggtggcccgggccatcaaggcatttggtctgggagtagctgggcagagggcagcggcctgactgggcaaagcctgccccagctcttggtctcagaggagggactcgggcctttgaccactactctgagcagcgcagcctccaggcttgagtgggtcctggctgttggcctgttgggtaacaggtgttgggctggctttctctgcttaaggagctctggaggggggctctacctgcttgtcctgaatagtggctgccccctcccttggctccagcagagctggtagctaggccccgggggctgccgggattgggtgtcccactgccctggcttggtgtccagctggagggggcagtgccaagggccctgtctcaccccagaggtggaggggtctccccagccttcctcaccgggtgtccctgaccgccctatcccctgcaggctcctgcttctgggtggccgtgctggatggcaacgtggtgggcattgtggctgcacgggcccacgaggaggacaacacggtggagctgctgcggatgtctgtggactcacgtttccgaggcaagggcatcgccaaggcgctgggccggaaggtgctggagttcgccgtggtgcacaactactccgcggtggtgctgggcacgacggccgtcaaggtggccgcccacaagctctacgagtcgctgggcttcagacacatgggcgccagtgaccactacgtgctgccgggcatgaccctctcgctggctgagcgcctcttcttccaggtccgctaccaccgctaccgcctgcagctgcgcgaggagtgaccgccgccgctcgcccgcccgcccccccggccgccctgtccgcctttgcccgcctgcccgccgcccggcgcggcctgctttcagacgctcaattggcgtttgtgttgggtttccccttttcaacatcctgcggttgtctggctggttccggggggtgcggggctgttgttcttcggcgacactttggtgggggtgggttgtttgtcgccatagcccctcgcccttccccacctgcctgggcggcttgccacctgaagagtggcatcttggaccaccgcggctgtccatgacgctgccctgcccgccgccactggggaaggcccagccttgctcaccaagcacagaacct

SEQ ID NO: 8201 - DNA, 1020 bp, Artificial sequence
  DNA replication origin
ggggtccatgggacccctctccccagtgcccactggatcgtgctggcctctcccagatgtccccggggacctcctgcctctggctgacggtccaccctgtgaatcttatcagcccaggctgctgccaacagcgcccagcccacagcttctcccagcctgaaaccaacacattttctaataagttatttagacagaatagcactctgcatgactttaattcttgggacaaaacggtagtttgtaccctaagacacagtttctggcccagtgtgatgggggtgggtggccgggtgggtggagcgttttgctgttggaaacctggagggaaaccctgattggatgtcatttcctgccatggagcacgcctcccagccctggcctgcagtgtgggcagggtggggggcaagggagtccgcagcctccgggaggaggggcagggcgctgccttgggctgggtgggaagaggggtggccgcctcggcttccgctggccatgctcctggtctctccttcctgaggtcacaggcaggggctgccctggacggggggcggggggggtggcctggaaggggagacagaggtggagggtggcacaggctgcacattcagcttagaagtggacctggctttggtggcaggagaagaataaacacttgcccagacccctttgtgtgggggaattggggaggggtcgtggcaggcagggtgggccacggaactgggtcccaggcatcaaggccacgtgcagggccatggagggatgcttctcacgaggcgcttcagaagcgagcgaagggacagagaagccctgcgtccaagggccttttgtcctgttagcaattgaggtgtgcagagcactgtacagaccccactcccctgtacattcctccctggaggtgcccggtccccgcttggggatgggagttttgtagactgtacagaaatcggcaccctattttcttgcagctcagattttgttaatctggaatatacagacagacgtaaagtgttttagcaaaat

SEQ ID NO: 8202 - DNA, 1017 bp, Artificial sequence
  DNA replication origin
ccttctgaccacttcagttactgcagaaagcagcactgagagcccacagcccagtgaagctgcaagcagagtccctggggcagtgcttagacccccacgggactgtcgccaagagcttgagggctcttagggtgggggtgggaaaacgtccatggtgtgtcagagggcgaggggcccttcggggactgacactgtggggggctggggcaggttagctcccagaaggggctccgggactcctgaggggatcccgcacaaggagaacgaggagaggaggtgtctgggtcaccacttgcagcacccccaggccttggctggcaaggaggaggtggctgggcgagggctgcttgtcccctggccacccacactcttgaggaatgtgccctgggggaataactgaggcagggacagaggcctgagagagctgtggcctggggggcagccagggcggagcccccccccaccaaggcacatctgcatgttggctctgggctcgggggtgggggcagagctgggcgtggggcacactgcctggcactggtggcagcaacaggtaggggtgggggcagagctgggcgtggggcacactgcctggcactggtggcagcaacaggtaggggtgggggcagagctgggcgtggggcacactgcctggcattggtggcagcaacaggcaggggtgggggcagtttggagtccccagggtcctgctcaaggggctgaggggttcgcctgcctctggggtgggcagcctcaaggggtgcccctgtgctgtgcagacaccccgaggaggaggggtctgggggagacagcatttctgtctggagaggcctcatctgcaccccacgctggtggatggctggttgttgtctgcatgcctgctgtgagtagcccccagggccttccatgggctgagagcctcaggaggggacgggggcccgataagcagagatggtgatcatcagaatcacgagccccgagggggtcttcccacagaatactaaccctcccatccaa

SEQ ID NO: 8203 - DNA, 887 bp, Artificial sequence
  DNA replication origin
gcccagcggaccgggccctgatccccgggcagctgctggagcacctggaaggagcccccaggagcgcaggaaaaaaaagaggcacctgggtgcagacggggatcgcggccactcctccagccccacacccctgcgcccagaaccgaggcccgcgtcagtcacctcaggaagttccgcttgcttctcgcaggagcccgccgccaccgccctccgtgccccgcgcgcctcgcactgcctcacgggagcgcctggacgcgcgcaagcgcacaaggcgacggcgtggtcgtgggggatgactgtttgcgcaggcgtagtgtcaaaagaggcggagtcggcgaggctggactatggggtggagctgagcaggcggcgctcggcccccggccgctgcgggcatcctgcctcctgggcggggcgcagggcagagagaggcggggtctgggccgggaagggcggggacagggcctggacaggggcggggcctgggcagggggcggagcctgggcaatgaatggggtgcagaggggtgcagaggggtgcggtggggcgccctctggggagctgaagctgcgggcctgctctcaacggagccgtcagttgtgcttcaggcctgccctgccccgtacttcaatctagaccctctgaaggcacttttgaatggtacaaagagcagcgcaggttggtggttgggagacaggctggagcccggcggtgatagcgctcgcccccgagagagacgagttcccggaacattcacagcagcccgaccaatgcctggtacattttaagggttagggattgttcgcttagagtcttttacaatgaactttattttgcaaaaacacttaatttctaatccctcaccagaacactatgtaaaagctgac

SEQ ID NO: 8204 - DNA, 1200 bp, Artificial sequence
  DNA replication origin
gagaaatgggctggcaccctcagagtggcctgaccccatccccactctattctccctagaagtggacatagagggcatggagtttggccctggtgagctggacagtgttggcagcagcagtgacgcggacgaccactacagcctgcagagtggcaccggcggcgacagtggcttcgggccccactgccggcggctgggccgccccgccctctcgtaggcccgtgccctctgctccttggcctgcctgcccgccagccacgcgtgtcagccctccagttctccttcagttgacgccagcctctccacaggcccactgctgtgccattctggaagctccagctgctgctgggctgcctggcactgcccgcttgccggtcagggcctgccgagctgcctgccccttccagctgggcagagtcccctgcaaggaggcagggcccagcttccacatccggagccctggtcagcatagccgcccacggtctgttctcagattcctaatcattccagaagtattaaacgtcattgctgcaaacctcggcaggtgccgtgtgaggggcttaatgaccaccacagggagctcagaccccaaccctggatcccaggagaaaggagtggaccgaggaaggaaggaaggcaaggctgtctgtccatccgtccgtctgtccacctacctgtcagtccacataggctcctggcgtggacaaggggtctgtgaagggcgggaactgggtgagcacctggggcaggtgggtggttaaggtccttcccacttcgcaggtgtcagaacctagggctgggctctcggggccaggcaggccagcccagcccacgccgagctgggcagcgtctgctctggtaggactgtcagacgcacacgcgcacgcacctagacacacccactcatgtacatgctcacacatgcagacacacctgggcgtcccgaggtcacatgttctggggatgatggccttcaggggtcatctggcaaacagcccctgggctgtgcctggatccccctctagctcctgctcacccacgcccacccagtagtcctgcctgtctgcacaggagaggggcttctcttcctggctggggctggggtgaactggaggctggttaagttgcagccgctgggtcctcgggggcttactcatctcccttttttaaacaaaaagcaaaaaagtaaaatgctgcact

SEQ ID NO: 8205 - DNA, 898 bp, Artificial sequence
  DNA replication origin
ccaaggctgcctggtggctgcgggtattagagctgggccgtagacagaaaccacagggctgggaggtggcatctgactgtgaccgcctggctggggcagggagggacccacctcaggctgtggggctggcagagactgggcaccctgtggcctgtagccttggctaggtcttggcagggatggggaacctcccgggcccaggcctgggtgccccagtgcctggccagggggatggggggactcctcttcccgctgtgagctcacagcccccctcgaccccagaaactggaggagcaggaccgccgggcactgagcatcaaggagcagctgcagcaggagcatcgtttcctgaagcggcgcctggagcagctgtcggtgcagagcgtggagcgcgtgcgcacagatagcacgggctctgctgtctccacggacgactcagagcaaggtggggcgtggggcgcggggcagcctcacctgggcctccgggtgcgcagtggtgcagctccctgggtggagaggaggtgcctggtgctggggctggggagaaccctcccagctccctgctgcactggggtgtgtgtttgtcactaagcgcagaagggactggacagggagggtgggatgcagaggctgtgtggcccgctgaggactggtgcttctgaggccgggttctcagccagagccctcctggcgtctgctgccccagggcccagacagcgccctccgcacttctgcccctctgcctagagcttctgcttccagaaaagggagaaatgggctggcaccctcagagtggcctgaccccatccccactctattctccctagaagtggacatagagggcatggagtttggccctggtgagctggacagtgttggcagcagcagtgacgcggac

SEQ ID NO: 8206 - DNA, 1971 bp, Artificial sequence
  DNA replication origin
gcaggcctaggatgaagccagggcccctctcctgaggtgcccgatgaatgtgtcctggaggattgtggcatgtgagcaagtacccttgagtgtgaacaagcaagcaagcaccactggatgtcatggctccagttttgtggaaagtggattcatctgtggatacggggacagaatctggaatgaggcagtttccaaagggatatgaaacttgggttggaagggcctggtccctggccctcccttgacctaggctgatcatgtttccatggtcacaaaagtgacagagagcacgttgtgcacgatgaggtagagagacgtgaatcttgtctgggtccttccagatctcggtgcagcctgaaaggcaccctcgcctcaccccacccctccctgcatgtggactccagggtggggatgggggatgggggatggcaggggggcgagctggggctcctaggaaatgcctggcggtgacgcgctgaggctttgcaggccatggtgagctgggcgcttctgccaggtgtctgggggctgtgggtgttgggctcctcctgggggtgggggacgggggttcccaaccaggccaggaggggatccttagagagggaccctcagcacatgtgcagcagtggatggtgggggtgggtctgtgcagggccctggaaactgcctgctgccctcccccaccccagcctgatggttctgtctctggctctttcagacgagccaaactcaggctgtaccttgagcagctcaagcaactggtgcccctgggccccgacagcacccgccacaccacgctgagcctcctgaagcgggccaaggtgcacatcaaggtgagtgggccttgctctccaccctgccctgtctggctgcctcagtgtccctgcacgccctgggggggtgctcacaggtgaccctgggcagcccttggatcagagggcctgaagatgggtggggagccatctggcgggtgtgtgtcgggggcctggtgggttttgccagggtggaggagcagcaacaggagctgccaaggggtcgaggctgttccgtggcttgtgtcgggtttgttgggtgctgatggcataagaagccgcatcgcagcatagactgggatggagaggaggaggtcgggggacagattgctctctggggtcctgggctgtgaagaggcagctgctggaaggagagagggggccagggtttcctgggtgccatcagaaggcagactaaaagtaggcagcctgatgggggtgccagggtggggttggggcagcgggagctggcagtgggtctgggctcagggagacattccctgggaccgccccccaaaggacttttgacagccctgttggtttgggggccttgtgacatttggaccaaccagggcaaatctctatctgctctgagggcctcttctgcctgcataggcatggtcaccttcaggctggggtgtcaggagctttgagaggggcacaaccagagccctgggggccctcacagagcaagcagtgtctcagtggggcccacaggaaggtttagagagggcagggcacaggtgttgcagggacaggcatggcataggccacagcccgatgggggcgggcagggctgggagtgtgtgaggagacccgctgtaagcaggactgtcctggagacggtgccagccaaagattgggtagcactgacccgctgccacacatggctcaacttggccaaggctgcctggtggctgcgggtattagagctgggccgtagacagaaaccacagggctgggaggtggcatctgactgtgaccgcctggctggggcagggagggacccacctcaggctgtggggctggcagagactgggcaccctgtggcctgtagccttggctaggtcttggcagggatggggaacctcccgggcccaggcctgggtgccccagtgcctggccagggggatggggggactcctcttcccgctgtgag

SEQ ID NO: 8207 - DNA, 1425 bp, Artificial sequence
  DNA replication origin
ccgtggagaactctggggcgtgagctggggctcccccagcatggagaatccaaagctgacaaccagcgtcctggccaaggctgcccgaacactgcctctatgctgagcgtttcacacatgcagccagttcatcttcaccccaggctcagagaggtgatgtgatttttatctctatggccaaggaaactgaggcaaggagaggtttggttacttgcctgccactcacccatctctgatgacgcctgttcctgagatggggtcccagctgtccacattctgctgggacagagaccatgggggcactggtgagggagacagagggctccccaactctggtgcatctcccctggctcctctgggccgagccccgctcccccggggcctgaggcagcccagggctggcggcttggccccttcctcgggtgggcagcactgccctggaggtttcctcagccagcccagacaagtagctgggcggagcagggggccagaggatctctgagcccctgacttgtccccacctgtgaggcttccatgctctgccaaggtgagggaggggacatggcacagtgaggctggggcaagggtagggagtggggccggaggacagtgtcagggttgagggaggcggcagagcactggggccagcctgcaggggggtccattctgtgggaagtgtgcttgtctcctggggtcacgggaatgctgggaacgcacttggcctggcctcagcggggacaggtcccacctctcctgagggatagagtgctcctgggacccatgttgcaaacatccccctcgatggaccccaagggtctctgggcccaggaggagctgcaagaggggccctggctgctggaggagggccccctgcctccagggtggggtccagccccgtgccacccttcaaggggtaggcaggtaggcttttatgttgaagggcacctgctgaccccgacctccctcttgactacagacccacgtggccaggctgcagtttgggctgaggacagagagtacggctcattcctgcggcctgcctattctggggaagcagaaacgctggcgtaggggcctatctctgtgaggccagtgaggagcatatggctgtggcctctgctggccctggtcggccctggctggccctggcagtgattcggaggctccttgtccagcccatgtgaccaacaggccctcccggaccctgagacctgggtctggaggctctgctgaggctacacaaggaggcccagggcctgttggtgcagcgggtgggaggggcaggcccttggcctgagtggttgggacaggagacgccagatcccaagttcctgaagcaggcagtggtcagcaagaagcttcaggaaggagccaggtcctgagggcagggagaggcctcagggctgggtctggaggtgccccgag

SEQ ID NO: 8208 - DNA, 1178 bp, Artificial sequence
  DNA replication origin
cccgagttgttctggacttttccaggcggtagaaaagttgtcagcgggcgctggccggtgccccgtgggtctggggaaacaggctcagccagggtctgcgggggctgccggccctaaccccttctctccgcgggtgggtgggcggcctcctttcgactggctctgccagccgaactctgctgctcggccaccttcccccgcccccaggagcctagacagagaagcgagtggaggcgctgtcctgggccctcactcctcccagggtgcccaccgcttctgcccagcctcctgacacagcgaaactccagccaccagtatgggggtcctcttttttaagacagaggccttttaagggggcgggaggagggggcaggctgcagggcaggggccccatgaagtcgttactacgggtgccagctgcgccctccataccttgacctcgtgttcaggcagcagaagccctgaagctggggtgcgtacaggtcccccgcgtggggagtggggaccctgggccggggctccccggggatttccaccctcctggctgctgtgaggaccatagcacacctggtcctgtctgggcccaccttggcccagcccttttgtgtgagcaggctgggagctgcgtttgtagggggcttcagagccccagggcatggctcattcctgtggtccacctgttctagggaatccgaaaggctggtgtagggacccatttctgtggcatcctgagccaggcgaggaattggttgagtctccagctgccctggctgggacccgtccctgagtcccagcccctggtcccctactggggacagtttggggaaggacaggagtgtgacgagggaaccattgcctcaggcctcctcagtgagcaagcccggcccccgctgccgcttctctccaaaccaagtccctgacccgtggagaactctggggcgtgagctggggctcccccagcatggagaatccaaagctgacaaccagcgtcctggccaaggctgcccgaacactgcctctatgctgagcgtttcacacatgcagccagttcatcttcaccccaggctcagagaggtgatgtgatttttatctctatggccaaggaaactgaggcaaggagaggtttggttacttgcctgccactcacccatctctgatgacgcctgttcctgagatgg

SEQ ID NO: 8209 - DNA, 2727 bp, Artificial sequence
  DNA replication origin
ggggccaatggggacgggtcgagcgcctcgggccgggccgagaatgttgacagatgcagagctgggctgggataggccggccgcgctagtaacaatttagaagcccgagcttagcaacagcacgtggtggcccggcccccgcgctagctgactggcggccgccgtgcatgttaagtaggcgccgcgcgccgattggccagagcggcctatgtaaaacaggcactgcgagccaatggccggtggcggggcgcgcggccaatgagggcgccgcagccggacgcgttgccgagaggaagcgcagcgcgcggggaccgcccgccgtcctgggggcccgttaggacgcaggagcgtctccgctacgagagcgaagcagggcgctccggggcgtgcgccgggccgggccgggccgccgggtctgagcgcgacgaaagcagtggctgcgtggggggacgaggcctcgcgctctgcccgggggtcttgcgtggggccgtgaacgactcccctccccgccgggcgcagagtggccccgggaagggccgggacctcggagagggacgcagacgctctgatcctaagagccaggcgtctctgagggtgtcagtggggaaacaggcccagagcgggcgggctcctcagatcgcccagtggacgccggagctgagggagggcccaggtctggggaagggacacagacgtgcggccagagtcgagaggctccccggagtggggggctgcatgctctgtgtctggcctgaggggcagggacgttcctagaggcaggcgctggccacctctggccgaggacgccctaagtggggacgggagtgaacccttcatcaaatcccagctggcgggtctccctagtgacccctgaccctaaggctggcccagactggcctcggcaccccccaccctctcgcagattttttttttttttttttttgagacggctctgttgcccaggctggaatgcagtggcgtgatgtcagttcactgcaacctccgcctcccgggttcaagcgattcccctgcctcagcctcccaagtagctgggactacaggcgcgtgccaccacgcccagctaatttttgtatttttagtagagatggggtttcaccatggatggtctggatctcctgacctcgtgatccgcccgcctcggcctcccaaagttctgggattacaggtgtgagccacctcgcccgacccatctcactgatttgatttttgaggttggtggcctggatgtgccaagggccaggccccgcaggctggagagtgtggaggcataaggtggctggacccctccagaagtactcagtgggacacaggggctgctgctggcaatgaaactgaacaaaaaatgcaaaacctcagcaccaggactcctgtgaaagcttcgtgtgcatctccctgtgttttgcatgcccggcttgcagatcaggacatgggactagacgctcagggatttgctggggtctcccagaaatctcagcagaatggagattagtgctgccacacacggctcagggctataggaatgcagaggccagagcctcctggcctggctggtcctgctgggtgtaagcctgtggtgtgggcttcagaataatgtgtgttcccacagagccctgcaggacccagtggggaactcggacactgctatgagacagccctgcatggacattgagacaacccccttgatgttagcaggggcccttcctgttcccgccccacagtgacgccagggcccaaggcagagcccctcacaagaactcagcactgaggccctccaggtttgtctgcatggctgctcagagctgtgcatggtaaagaaaggtgcccaagtctggggaggagcagggtgtgtttgggctctggggacccagctctccacttggggatgagcattttgcaaagttgccccatccctgctttggccactgggtgagttgctgccgacagctaaagcggacacctggcctagtacaagtgcacctgctgggcatagtgcacgcccccttcctgccatgggccaagagatttgttctgtgtggcagtgggcagcacaggtgcgcaggtgtgtctatggggaggcacctgcatgctaccccagtctaagagatttttagcctcaatttaggccatttaaggactcaccctcacctccccaccacactgaggaccaagcacttccctggtgtccctgggctcaaaccttgcctggtagtgtgggcaccactgcctgggggagcaggaaggagttggggttgggaggagaagctgcaggaggcgatggatgactgagggctgagctgcagctagggagggaggtactggaggcatcggccagcaatggcaggaggagagggaaggggagggagcagccaggagaggcctggaggtgatgttggcctggcccagatggctgcaggtgggcctggagccctgccaggagaggtctggagcccctgggggataggggcactggtcccacctgcagttggcagggtctctacacccacgggtctcaacttgtccttcccaagatgggcagaggcatcttgggtcagtgccggcaggcaccagtgcccatggagtctcaggggtggttgaggagtggggaggacgtggctcaggtcagccagttggacccaagccctgcagggcatgggccatgtccccttctgtagggcaggtcccccgcagggtgtggcatctccaggg

SEQ ID NO: 8210 - DNA, 1397 bp, Artificial sequence
  DNA replication origin
gcctctgcttagcctcaacctctgcctggtctctcccagcatcaccagggggttccctacagtctgtcggctgcttcccacctcttggctttcattcaagctgtcctcatgctgcgccttccaggaaccctccctggcactccagacctctctccagcctgagtgaggagtctcccctctgacctcccacaacaacacccttgatggttcctctgttacactttccgtgtgtgataattaactgttcacctattgatctctgccatcaaatcgtgagctccttagggctgaactgtgcaattcctggatcatagttggtgcttagtgcatgtttgtagggcaggtggatggatggatggatggatggatggatgggtggatggacggttggatggttggatggatggatggatggatggactgatgattagatggatgggtgggtggatggatggatggcaaatgaatgagtggatgggtggatggatgggtgggtggatgggtggatggatgagtggatgggtggatggatgggtgggtggatgggtgggtgcatgagtggatgggtggatggatgattggatggatggatggatggatggatggataaatggatgggtgggtgggtagatgggtgggtggatgagtggaagattggatgatgggtagacggattggtgggtggacaggtgggtacatgggtggatagatggatggatgattagttgggtggatggatggatggatgcatggattggtggatgggtagatgaatggatgggtggatggatggataggtaaatatatggatgggtaaatggatgagtgggtgggtgggtggatggatggatgacttttacaagaagcagccagcccaccatttgcgtcagggcccaaggtggctcattagaattggtatgtggttgtacaaatgcccgagctgctaattttcccacatccaagcacaattaaaccttgcctctggagcctaccagtcactcttgatgttctttgtttttgttttttatttatttttctttagagatagagtcttgctatgttacgcaggctagccttgaattcctgggctcaggggatcctcctgcctcagcctccccgtagctgggactacaggctgtttttctcttcattagcctttgcaaatggtttcaagagttcaaaaattaatgtatctgatgtcataatgagaaacatactgtgatgctgttagtctttccaaagttggcattctcttctttcacagactcctagaggttcaaggtggcaaagtcctgtctttctgtttgcatactcacttgctaaatttgctgcatcagattcatttgggctttgctatggtctttcttttccatagtaattggaattaaaattataag

SEQ ID NO: 8211 - DNA, 1039 bp, Artificial sequence
  DNA replication origin
aggtgtaatgactgtcattaagccaatcgtttataagtgacggggcctcctgggctgacacggtgagtcggggataagaccagggctggtccgccgtgcacaggcccaggtgagagggcagggctgggttcttgctctcgctggccccaggcatgaaaccttagcaagctcggtgatgcctgtgtcaccagaaccccacaagggacagtgatcgccctgcaaggccctgagtggtggcctggatgcagtaggcacgcaggccagcaaagtcctgggaggaggtgccacccttcttgcagatgggcctcctcccaattcacagctggcctagagctggagagaaggccccagcctggctgtgctctcggggaggcctggctgaggggatggtcattaccgcaggtcccccacatgtcctcatgaccccacccagggcccatccttacaggccctctgttccctggtgaccacagcttctcccctagcctctggaccgcaccccgcacctcttgcgacatctgccaccctgatccttccccaccatcaccatccactcaagggcaccacctgcaagcagctgcggctacatggaaggagcccctcaccatcctctctccctcacgccccctacctggtcctctggccagtgctggaaagaaattagaattgtttcatgaggtgaagggtgccagtgaggcagctccttttgtgagagcaatctggggaggcctcctgcaggcgctgacatttgctgaggcctgaatgaagggaaggggctggaggaaaggtgcccaggtggcaggacctgtgagggccgaggtgctgggaaggagcagaggggacagggagcagggcagaaggaggtcgggggtggggagcaggaaatctcagagagctttgtgggcagggtgggcaggaaagacttttctgagagaaggaacggcatcagaggcggtaacgtgagcatggcggtgaagtggtctggtggtttaaaaattgttgtaaatgctgggcatggtggctcatgcctgtaatccca

SEQ ID NO: 8212 - DNA, 928 bp, Artificial sequence
  DNA replication origin
tgtcaggtgacatgggcgcagtgccaagccctcagctcacctgccgcagccccggcccatcccgcccctggtgtgagccgcgtgcctgtgcggggcagtgggagcgggctgtgccagcgccgggccccttgccctgagccgcatccgagcgcactgcccacttctctttgctgaccactgtggctgcctggctcacaccgggctgaaacgagacgcagacccgtggccgtgggcgcggagactggggccatgaggggtgctgagaccacccatgggcaaattcccaggggtgttcccagggcctctgcccctcccaggactctctcctccttgccctgcactggggggagatggggaggtctcctatctcttctcatgggctcccatcccccactctggagacagggagggaaaggcaggggctgggcccagcccagggtcactcatggctgcgttgtcagggccattgaccccctggccaggaccctgccctacagggctcccactctggctgtggccgtgtctataggcctcgctaactggaagagagacggaggacagggaggggacgaggttcaactggagaccagaaaagcccccaccaggagccgtgggagccgggcagcagatggggatgaaggtggggggcacagatgcaggagtgaggggctgcgttgaaggatggcaggcaggcccaggagagggtcctcacactggggaagggggttcttggtggcgggcagacgcctccttcttcccgtgctcggtcctcccaggtcgtgagctcgctggaggagtgggagtgaccagggtcccgtgacggtcaggccgttcttcctttccgctgcccactcaggactcagggcctccctgcagctctttcctgtgctgcgggctgggtgggctgggcctggttcccggtgtccct

SEQ ID NO: 8213 - DNA, 2191 bp, Artificial sequence
  DNA replication origin
agagtgggagccctgtagggcagggtcctggccagggggtcaatggccctgacaacgcagccatgagtgaccctgggctgggcccagcccctgcctttccctccctgtctccagagtgggggatgggagcccatgagaagagataggagacctccccatctccccccagtgcagggcaaggaggagagagtcctgggaggggcagaggccctgggaacacccctgggaatttgcccatgggtggtctcagcacccctcatggccccagtctccgcgcccacggccacgggtctgcgtctcgtttcagcccggtgtgagccaggcagccacagtggtcagcaaagagaagtgggcagtgcgctcggatgcggctcagggcaaggggcccggcgctggcacagcccgctcccactgccccgcacaggcacgcggctcacaccaggggcgggatgggccggggctgcggcaggtgagctgagggcttggcactgcgcccatgtcacctgacaggcacccggaacatcagaaacagggaagcgggcccgctggcgcacattttctggtgcatgacgccccacagggcaggtgcctctgcagccagctcctgcccctgcccctcctcacacacagaccccacactcggccagggcccagcacctgccggtggccaagatggctcaggtagaaacactgcaatgcttggagaatgcgccagcacctgccccccagtgcagagaggacaaacccagtctctgggccagactggctcttacctggagcccgacagggcctgaggcgcctcgtgagccgaggggctcccagcatgcagctctctggcctctggctcctgctgacctgcaaccccagcctctccttgcagcccactcgctgtgtccacctgggaacctgaggtgtgaggcaggcacttgtcggaagtgggggctttgggctcccgcccgttggaggcatcttctgagggtgggggcgcctcctcctgtctctcaggggccctgtcgctggccttggctaagccggcagcgtacgaggcaccaatgacgcctcccgggctgcacttctcccgcagacgctccaccacgtcctccctgctgtccccgcagctcccacagcacacgcaggaatgcagaaggcagttggtggccccagtgctaagcttgtgggggccgccatccatcccctcggccacgggctccgaggcggcctcctgggtggcgaccgcagagtccagggaagtgggcgatttggggttgaagatgaccgtggctgagagcttcatgccccctgtccggtgggcgatcatctcagccgtctctgcgtcatccgcacccacctcccagccgtccaggtgcagccgcgagtccaggcagctgcaggagctggtgcccgcgaggctggccccatctgtgccctcggcctcgagattgttgttgctcaagtcctcctccttttccgaggcgggcaagctgatccccgccgctccgcctggcccaccctgccctttctcctgggggtcggcccaggtactgcctgcccacccaaatgggccagctggggactcgggcctggccagggcttctgccgtcccctccacgtcatccatgaagaacacgcgctcctcctcgtcactgcctgaccgcaggcgcggtctacctggagaggcctccccgcctgggctgccctccgctcctggcctgtgagctggggactggcaggcaatgggcggtgaaagcaaagaggacatctcgtcccccgccctgtggaccatgcggctgagctgctccagctcctggtcgtcgtactgcatggagcaggccagctctgcatccgggtctttggccttagctgagagtggcccctcaggggggagaggggcagagagggcaggcgccagggcagcgggtccctgcacgtctgcgcggatggggaactccacgtcttgggaaatgcagaggttccgttccagcgtgtgcagctcctcctccgtcagcgtctgcagcaaatccctacgaatcaagacaaaacccaagggtgagggtcccaaaagccacaccagcctccttggccaggagtggacgcagcaccctggagtctgcaccagcagaacaacagccaggcactgaatgcttgcaactgaattctcaaggcaccagcacgtctcctccaccacggaaca

SEQ ID NO: 8214 - DNA, 1293 bp, Artificial sequence
  DNA replication origin
tggggatgtttttgcatagcattaggagatttttctccatcattatttaaatggctacagtattgtttttaaccaatcccttaattctggatatccatcccttctcaaatttttatgattacaagtaatacttcggggataatctttgtggatatatatttgtgccccctcagatcaatgcaacaaaattctgcaaaagtccaccacactatgacatgacaggcactcaggatgcatccgtgaataagagttatagtctagtgggggagacacaaaaataacagaaatcccatttatatgaataacccaatagccaaatctatagaaacagaaaatagatttgtggttccctagggttaaggggcaggatgaaggataatagggggtggaggtgaccgctcaggagtaagagacatctttgtgagtaatgaaaatgttatgaaatttgtggtgatggctgcacaattctgaatgtaccaaaaacgactgtgcactgtagatgggtgagtcatagggtaatgaattttatctcagtaacatggaaaaataaataacagagtaagtcacgcaacctgctggtgggagagggcttgggtgagcggtgcagtggtggggacatcgcagagggaggtacagcagggagtaggggacagtgcagaggagaggacagcacggaagaggggacatcatggaggggacagcacggaggagggaacatcataaaggaggggacagcatggaggaggggacagtgcagaggagcacaggggagaggacattgcagaggaagggacagcatggaggaggggacagcatggagaatgggatagcatggagaatgggatagcatagaggagggaacagcatagacaaggggacagcatagaggaggggacagtgtagtggaggggccagcaccatggagaggacagcatggccaagaggacactggagcagaggggacagcgtggaggaggaaacatcatggaaaaggggacagtgcgggggaggggacagtgtggcagtagggataggacagtcaaggggaccctgagcgaaggggacagcatggtggagacccagggcagcgggtgcgtggggactggggagagaggactggtgtgggcacggtgcaggcagatcacggtgggagctccggcaagggtctgagcagggcagagatgacaccttgttttgacacaggtggatgggtgagggcccctgaagaggatccggcaaccatcctgcaggccacgtgggcggtggctcctgcacgtgttctgggatgggctg

SEQ ID NO: 8215 - DNA, 1402 bp, Artificial sequence
  DNA replication origin
ggtgtggcaccaagccacccgcccactcatgcccgtgtcaatgagccggtgagccctggctggacttcctcttaaaggtcgggcctggagtgtgcaggtgaccccaggtgaccctccccgcaggccgcaccccaggcatactgtgtttcgggactttcacactgagtctgctgcccgtgtttgcccgagtacaggcgaccgcagaacagcagccacttcccccaaccagtatcatctgtgtcctgcttgccgacctcagtccacctgctggtggccaaacctctgctcctccttctgtcctaggctttcatcctgggaggcaaggggaggcgggggctgggggatcagggtaggggaggccagaggagggaggtgggggggcagcttggggagggaggtgggggagtgtggggggtcagggaagggcagcagggggggtcagggaagggcagcaggggaggccagtgctgcgggggaggccaagggagggaggttggggagggaggctggagcttctgttggcagaggctttgtcccgcgggtcccctcctggaggcactggcgtggggtcccctcgggctcaggacagtgggagagcctggaaagggagtgagggacccccaggaggtgaagggggcttggattgaaggagggaggaagggcgagagggcataagagcccaaagccagagtccagggagcaggcctgtccaggggggtggccagctgtgagcccccacagaggcaggcatctagccacagagccaggctgtggatacgaggaaccgtggggtgcaccaggctgccactgcaaccctctgtgcagcgagcctcgagcagggcgggtgagtgctgagcgggtgagtgctgagtgggcagctgttcctaaggccgcccctctgggatgctcactggggccctgcagccctgcaccaccagcggatcccgtcttgttcctcgtcatccacagcgaccgctttgagccggacaggcagaggccacagctgcccgtggtggggcccagaacctgctccttcctgtgttcattcagtgagcaagtattgagtgcctactgcatacctcgccctgtgcttgtaccagggagatggacagatgggctgacccacagtgctgtggaatgttctggatgctggaagggggactcagtgcagggaccccatggggtggacaggagctgaaggcgtgagggagaggctccccagggcagccggcccagaggtgggagctgtgcaggtggcaggcaggggcacgttggtgcaggtggtgtatgctcaggggcaagtccagggctcgagcaaggaccagggggccgcaggaacttctgcagaaatgaagacccctctagcctgcattcctgggcccacaccctcgcaggatcctgc

SEQ ID NO: 8216 - DNA, 952 bp, Artificial sequence
  DNA replication origin
gtctggctgatggaatacctgtgtggaacctttcctgccagcggggccgtctgggagagcagggaactcaaggcagcctgtagggtcctgtggggctcaaggacgtgaacacagcacatggaagctcaggcctgaaatccaccgaggcaggatgcgcggggtcacctgcttagcgtctctgagctgtctggggccaaggttagagcccaggggtcaggctgctcatccacaccctgactccagacggggattccccatgcccctgccaggcggatggtcacgggggcggaggagtgagtggaccacagagagcttagtggagcttgcagctgggggggaggcggaagtggggagggggaagaggggagggggaagaggggagggggaagaggggagggggaagaggggagggggaagaggggaggcggaagtggggagggggaaggggagggggaagggggagggtccagtgggcagcggccagcaggtgtgggactgggcagagtaggggatggggagcccttgagagagatgcccgtggagatgtggatgtcagtgaagtggtcggggagtggggggtgggcacagaggccacgactggtccaggctcaggctggagagacctcactgaggccatgctgaggagccccaggggaccccggggcacaggcacacgtggcagtgcactggggttgagcatggatacccctcccgtgggaaatgggggtgcagaggtgggagcacgcggggcggtggcagtgcagtgggctagggccagcggcggggcctgcaggggacagaagtgcttaaccccaggatgcgccgaacaccccttgttggagtggggagcaatgggggctgctgccggggccagtctggacacccctgggccaggccgctcactcccctaggtcctggtgccacctcctccgggagggctccagcgtggtct

SEQ ID NO: 8217 - DNA, 1162 bp, Artificial sequence
  DNA replication origin
tgataatttgaaatatctctcaaagcacaaagagtaaaaatttgctttttaaaaataacaaacatacaatgtgataatagtcaatttcaaatcttccaaacaccatagtaccacttgaacaagagaaacatcaaggttacatcttaaccccaaagtccattgagaaaaccagactccaaattactgtacaaagcctgataagaatattgatggcttccccctgccccccccactccctaaaaaagaaacacttgttcaacagacttaaaactcagcaaaaactcattcctggactggggaggtggggagtgaggattgaggagtgaggatgtgaggattgaggaggtgaggagtgagaatgtgagaaataaggagctaaggagtaaggaggtgaggagtaaggaggtgaggaatgatgaggtgaggagtgaggaggtgaggaggtgaggagtgaggagatgaggaggtgaggaggtgtggattgaggaggtgaggagtgaggaggtgaggagtgagaaggtgaggagggaggaggtgaagagtgaggaggtgaggtgaggagttaggaggtggggaagtgaggaggtgagtgaggaggtgaggagtgagggggtgaggagttaggtggtgaggagtgaggaggtgaggagttaggaggtggggaagtgaggaggtgaggagtgaggacatgaggagtgagtaggtgaggagtgagggggtgaggaaggtgacaaggtttggacgtccaatccatcatgccagagccttccagcttttgtcctctgacagtgacttcacctgcaggatctgaccttctggcagacagaaaagcgaccgtggggcggtggaagggggccgggcagaggtaaaggcaggggtggcctctaccctctgcccacctgtgaggagaagccggatgtagtgtgggaagacacgtctggtgccttccatctggggcactcccgagacacagcaggttcccccagagctgccctctgccccgggcctggagtgaggcagggactccccagatgctgcccccagcccctaagcatccctgtgctcacctctccaccgtctcgcagaagagcacgatgacctcctgctgcacgtagtactccctgggggacttcacaggcaccatggccgagacgtagctgca

SEQ ID NO: 8218 - DNA, 810 bp, Artificial sequence
  DNA replication origin
tgttttcagtagatacagggttttaccatgttggccagcctggtctcaaatgcctgacctcaagtgatctgctgctggccttggcctcccaaagtgctgggattacaggcgtgagctactgcacctggcctagagttggtggtttagaaggaaagaaagtgctctcatctggggaagggttggacaagccttcacgtctcagagccactggcaggcctcctgcaagccgctgtgcccagcctgggctggcttccgtggctgtggaggtccacgtgcggaggttcatgtggggctgcgggttgttcacccacccgtgcacgtgttcattcgtttctctctcgccccttaaggctggtgccaaggtgggggatggtcccgcacatgggcagcactgggtccagggtggtcaggctccagggtgagccctgggagctggcacaactgtcccgcatgggcagggctggggtttcaagggaaggcctggggtaggcctggctggcaggagctgtgtactatgaaactgccgaaatgggatggtggtgtagggtgtgtgtgtgtattttaagagaaaaggtcttgctttgtcacccagcctggaatgcagtggcaccatcaccattcactgcagcctccaactcctgggcacaagtgatcctcccacctcagcctcccaagtagcagagactgtaggtgcctgccaccaccacacccgacttttttattttttgtagagatgaggtcttgctgtggtgcctcgaactcctgggctcaagccatcctcccacctcagactcccaacgtgctgggatt

SEQ ID NO: 8219 - DNA, 1442 bp, Artificial sequence
  DNA replication origin
aggctgtgctggggacactcaccatgtaatggggttgaggggaccacggggatggtgatgagcccagggcttggtgccacgtgtgggcccgaaggccacagggagggccagtaccgagtcctgagagagagcaggggtgggtggggtccgcaggaggccaaggcaggaagtgagcaggaccgtcccatcctcactccctgccaggcctcctgctgacccagcgtgcccactgcagctccctgaccccagaggagggcagagaaaggggacagatggatggggagggagacagtagcaacaatagtaacattggggtgggtgtggcagcacggctgtgcctgggaccacaggagtgtgtgcctgtctggggccccagatctgctgccggtggctggtggtgctgccaggtcagtgggcccccagcctggcagcccctggggtgtctgctgtggatgaggcctgccttggggacatgggtcatggctgcccatggacgtctggcctcagtgcggacaggaggggttgggcatgtgcaggaggggctgggcctgtgattggcagcagtgaacaattctagccccagtggtggaggggtggaggggcttgctcggccattagttggtcatggtgagggctgaggaacagctgctgtgggggtcacagctgtggggccgcatttgtgtgtcccaggcagaggctcttccctggcttctttgcgatgctcttggattcctggtgctggagcgagaagtcccaggctttaatggaaagctggccctggagaggcccaggcggtgcctcagacacctggtcctcacccctgcatgctccagcctctgtccagctgaagtctgcatgtgaccactgtctcctggagatctgctgatatctaggaggcaaacacacctgggtctccacggctgagtgtgggggctgtaggggtagggagctggctgcctggggtggtctgtcttgggaactggagcttagagcccagcttatgtcctgggttcagctgtgtggggagggaggcagtaggagctggactgggcttccgtcccttgttggggcccatggggcggggctggtcctctctggcctggctgtgctgcctgtcctcccatctgtcccgccacctgcctgctcccatcctccctgccgcagctcggccaagactgtgatgctgctgccctggagtgacaaggtgtctctttaaggtccccacctgcaggatttatgtcatatttggcaaacaagagtgtgaaagggatccagtcctgggcccttacccccttaccgcacatagatgccagagagtcctagtgacacctgggctgagatctggcgccttggcatccagcgatgtggtcttggccatgagttaccttcaggagtgtcagtctccttgtctgggtggaaggcgtggtgtgatgggctgtgct

SEQ ID NO: 8220 - DNA, 1526 bp, Artificial sequence
  DNA replication origin
caggtgatgagcataacgttgtgcattcccgccgccgcgccctcgtcaaggcgcccacggcctccgagcgggtgactgggaatggcgggggctgtgttccgcgataccgcgataaaacccccacgtcgccgcggcaaagtcgcgagagtaccgtggaccccggaagaggcggcgcggagggacagtggaggcgggggcggggcccagcaggggcggcgcagcctcagccacagagccggggtgtcccgggcgcacgcgggggtcactccctaggcgtcaggccccgcacgcggaagtgggggagggaggtggaggggggcggtccaggctgaagggcgagcagtggagctgggccaccccgcaggcagtgggcagcgggcagcgtggggagagaggggccaggtgtccctgaatgcggcggggggacggggagggggcaggggaggcgcgggcggcaggggtcagggtctccacatctccccgggtgggccacgcggggttcgagagcgcagtgcgcggaggccacaggcagcaaccgggacagcaggggacaagggcgtgaggaggggccgcgcggcgcctgtcactcgagcctggagcgctgcctctgggcccgcacgtgcactcacaaagggcgtgtcccccccaactacctgcacgcagcaggggcctctcagtgcacgcagggtaataagggtaacaacaacgccagcctccccagggtctgcgccagtcacccaggcccaccttcccacctgcagaaatgcccccggccctgcctccctggcccacagactctctcctgtcccttcttcaggtccactcccaaatctcccaccctttggtgggagccctgagccctggcccaacctgggggcaaaggctcccgctccggcctgggtggaacagctcgccccactcatgctggaagacggccagcactggctgggcctgggttctgtgcctggagctgggctacacggggaggacgtctcccaggccctccagctcgccctcagctggactttgggttttcaagctctgagagtcacccctgataccagaaggccccaactggaccacctgcagaataaattctgaaggaaaagggagcacacaagcacgcatgtttgttttccaggccctgaggttcagacactggggactgggggctcccctctacctacaggaggggtggaggtggcagagcacggcccctgccccctaagggcaaggtgaaggctgacccatgtgacctgctcgtaggaagccagggcaagatacagccggcctcactgtgaactcaggtggcccagcgcagctcccccagcgcagccagtgaaggaaggaccctgaggctgaatgtggatgtccccaggaggccacctctcaaagagacttctggggggagtgcgacgcagaattacagcacccagttattccagcaaaaaacataggcgtgaactctacacgcaccaaaaacattcacgtgtacattctgagatggaatttttaacctcactaaa

SEQ ID NO: 8221 - DNA, 1808 bp, Artificial sequence
  DNA replication origin
ggaatgtccttcctttttaaggctgaataatattccaccgcatgaacacaccacatcttgtttatttattcacccactgatggacatgtggctattcggaatgacattgctgcaaacacacatgtgctcctggagacactttggaggccacgcctacaggatgtgcggaaggatgtgcagtgagaaactaggaggagagctgaggcgggtttccaggtgtgaggcccaggcacccatagaaacagagatggaggagaatggagggggcggggtgggggcaggtgagatgggagggggggtcctggcagacgtccacatggagacaataaggaggcagctgtcccaacaagtgcagcgtcagggcagaggtcccggctggagatacaagtgtgaggcaccaagggcaagggacctagagctggtgccagtggatggcctggctccacaggaggccgcatgggtggggaaggccagtgcccgtgccagggtgcagggcaccgacacgggaggccattggtgacccgatgggtggtcatggtgggctgcttgggggagcgaccagaacacaaagcagtgggcttgcatgagggcacccagacagcttcttcaaggacttctgctgaaaagagggccaggagctacggagtggcagctcgagagatggcagccaagcggggctgctacatggttgctgctttagagacaggagaggtcatggcaggttttcacctatatgggagtcacagactgggagagaccagtacaagagaggagcactgcaggaagctcttgagaaggaaaataggtgagatccagcacaaggtgtggcgagatccagggcacaaggtggagaccgagatccagggcacaagagtggggcaagatccagcacacaaggcgggggcgagatcgagggtacgaggaggagcgagatccagggcacaatggggggtcgagatccagggcacaagcgggggcaagatcgagggcacaaggggggtatgagatccagtgcacaaggtcagtggcaggggcaagatccagggcacaagtgtggagctgagatccagggcacaagcgggggcaagatcgagggcacaaggggggtatgagatccagtgcacaaggtcagtggcaggggcaagatccagggcacaagtgtggagctgagatccagggcacaagcgggggcaagatcgagggcacaaggggggtgtgagatccagtgcacaaggtcagtggcgagattgagggcacaaggaggggcgagatctagggcacaaggtggggtgagatccagggcacaagcgtggaggtgagatccagggcacaagcgtgaaggtgagatccagggcacaagctggggcaagatggagggcacaagctgggtggtgagatccagggcacaaggtggggtgagatcgagggcacaagggtggaggtgagatccagtgcacagagtggggtgataaccagtgcacaatgtggggggttgagatccagccctgcattggggggtgcagcaggggtgtggctaactacaaagctgcaccaacagcctgtccgtctgtccagtcctgtgtgttcacgcctctcctcctgtccaaaggtgaaatctctgcccctctttgcggagctgggctggcccgtgacttgcctagactgtgagaatgccagcattcccctaccacgcccctgaccgtgctgcccccaaccatgtccccaagccagctataccctcgcaagaaagcacccaggaaggccggggcctctgacatctggttttctgccaagtcccaagctcaaag

SEQ ID NO: 8222 - DNA, 2018 bp, Artificial sequence
  DNA replication origin
acagataatcaagggaaaaggtgttttgcccctgaataaaaaaaaataggaaaataggcccagagccatggttcctgagtttggctttctgcgtaggcagctgacttgggggctttggaaagcaccctgccagcctggcccgctgactgtggccacctggcgggggcatcttcctggtctctgaagatggatcctcaagtcccagcccagcctctcctcccaccctgtgctgctggcagggcccttgtcctggggcttccagaagacagcgtgaaggagttctgtgtctgggattgatcgtggttgggtagttctgacaaatttctcaaaccgacctcctcccacagagctgcccgcaggggtcagcccccccaccccaccgtgggtgtactggactcagccttctcacagcgccggcatgggctgctcagtgggaatctccaaggctgtcaggccatgtgggccttgcctgagccagggatcggagggacagcgagcagccagcggagtgggggcgagggggctgctgagatgtgagtggcaagggggtgtgggtcgcggagcctgaaaggctgggtgcacttggagcacaggggacaaggtggggtcgctgcagatggggttgggaggtcgcctggggatgggtcacaggcaaggaaggtgggggcatgatggggtcagcactgctgtttgcggggtccttccaggcctgctgtgggagagacgagattggaagctgggactggtgggtggcggggattccagcgagaggatggcagcaggcgactctggatggagaaagtagatggatctgggcctggtgggggtgggacctggctgggggagaggtgctgtttggggatggggagctcaggagaggagctgcgaggtggagggtggagatgggggtgcagaagtaggggtttggacagtgtgtttgatggccatgcaactccacggggaatgtgagggtggggggccaggggcgttcagggctgtgtcacagaccgcgtaaaggcagacctccccactgcgagatgcccaggcatgttggataaaatcacaaaaacatttttaaaagtactgagctggcaagagagaaggtgtaacccctagtgccagaaataagaggaaactaaaacctaaagctgagtgcatgggaaggtccacttagaaaccgccgggaactgagagcttcaaaccatcactgctgccccacgtcaggattgggtggatcagcccgtggggcggggctcacctgggcgtggcttcatctaggtggggcttatatgggcaggactcacagtgtggggccatctggatagggctgcatctgggcggggtggcatctgggcggggcttcatcatctaggcaggcttacctgggtggtactcatctgggcgggactctatctggatggggcgccatcatctaggtgggcttacctgggtggggcttcatctagatggggcttacctgggcggggcccaactgggcggagcttcagttgggaagggtcagccagctgaaccatctgcggcctttggtccaccccggctggtgcagctgtcaggcaggccccctccaggctttctccccgatgctgagtctcagggcagtggagcagagtggcaaggtgatcctgaggcccagcctggaagtcacatggcatcacctccacagtgtccatagggccagcccccattaaatggggggggctgtcacctccacttctcggtgcggggagtagcagagtcacatctcaaagggcaggtgtggggatgcagggaaatgctggcttggtaggatgttcttgggagcactcacagggaggcccagggcatggtggggttaggggagatgtgttggtccaggactgggtgaagcattgctgtccagtgagggcaggttggagcaagggtcagacaggaatctgtggccttgaggcctggaggccagggggccaggaaagccccataggccacttcagcacagggtcacctgggcagcctggccg

SEQ ID NO: 8223 - DNA, 986 bp, Artificial sequence
  DNA replication origin
cgggacaggtcctccgcccggcccttggggcgagcgcgcccgtggccagcagcctcggcggggcgggaggtgcggctctccagccggcgcccgcgcctctcctagcgccgcggggtcggggtccgggcggcgcgccccgtgcctcagcggctgcgccagtcgcactgcgggcgctgcgtccccgccgcccgcctggggctcgtgcccgctgcagccggagcagggccgggcgcgctcggcgcgggatgaaggcgcggcggtgttcaggatcccggcgcagggtccagggcgcatctgggcgtccgagggtggcaccctggggccggcgcagcggggaggcccgggccctgagatcttgggggaggtcacggctcgggtggggtcaccgcggcgaccaagggcgggagtggggccagcgcttcgtccgggcagctcggacgtccgaggccaccgcgttgccgacctacccctcctccctccactggccgcctttctccgtccagcgtcccaggcctccgcctccaccgtgggtgagctgtcacggcagaggtttcctgaaatccgtgcctcgcgtgcgcccattccaggaaggcgggaggtgggtttggaagatcggcacggaggtttgagggctcactcagggccccgaagggcgcgtgcttcacggcctttgaggtcggggaattctgtttgtcgttgccggagtgttgggttgagggcttacggtacatggggcgccccttgctcggccttggcttgattgggaggggactcggggggattcagggttcctgtggcgtcactccctgctcccaacctccctgtccctagcagcgacttcttaagggttcgtcccgagccttgcgtttcctggcgctgggtgtggtttggggccgagccgtctgcgcccagcctctcctcctgcggcgccttcgagcccctctcggtcctgcctgctgcccccatgtgcctctgccggggtaggg

SEQ ID NO: 8224 - DNA, 1158 bp, Artificial sequence
  DNA replication origin
gggaggaggggtaggtcggcaacgcggtggcctcggacgtccgagctgcccggacgaagcgctggccccactcccgcccttggtcgccgcggtgaccccacccgagccgtgacctcccccaagatctcagggcccgggcctccccgctgcgccggccccagggtgccaccctcggacgcccagatgcgccctggaccctgcgccgggatcctgaacaccgccgcgccttcatcccgcgccgagcgcgcccggccctgctccggctgcagcgggcacgagccccaggcgggcggcggggacgcagcgcccgcagtgcgactggcgcagccgctgaggcacggggcgcgccgcccggaccccgaccccgcggcgctaggagaggcgcgggcgccggctggagagccgcacctcccgccccgccgaggctgctggccacgggcgcgctcgccccaagggccgggcggaggacctgtcccggattccagaggacgtgggtggggaagggacaaggatagggacaagggaggggacgcgaactgggccgaggtgtgggtcagtcctggttcgggaagggaggccgttggcagggccatcaggatcctctctggacatggaaggacgggtctgccctggacccagggattgggaaatgtgggttctctcagaacctggggaagtggggagagggtctgttctggagtgcggagggagatctattccgggcccaggacaatgggggtgggggcaggacgggaatgagggggcattcctggtgcagggaggggagacggagaagtagtagggggtctgctccgggcccgcgggctggggaccacgaagtgtaggagggcaccgtccaggaccgggatgaggagggagaggggcccgttgtggccctggatagagggggagggaaagtgcgccccggcccgagaggaggagcaggagggtcagtcctggacccgggcttaggaagccgggagggaggttcggatccgcctcagagacagggcgatgaagatctgtccaagtcttggagtggagggaaggatgtcggcggtgggggaagaggccggccacggacagggaaagggagtccgtcttgtagggcggacgggcggtcctggggaagggagaggccgcgacgcggggggcgtc

SEQ ID NO: 8225 - DNA, 955 bp, Artificial sequence
  DNA replication origin
gcgcgcggctcctcgctgctcactgacacccagcgctccgctggtcacggccgccccgcgccgcacatgcgcctagggcgccgcgagccccgggcccaccgcgcgctgcgggcggggcgggcggggcggaggcggcccaatccctgcgcgggcgccgcaccccgcccgaggcgcgctccctgccggcggggcgacccgccgcgcccgggtatccaagaaactacaagtcccgaaaggcatggcggggaggtggcgcccagggcttggcgtcccgggccgcgccgcggcgctgtgtattgtgggagttgtagtccacccgatggcggcggagcgtgccgccggttgctaggtgacgacgccaaacagccgcggcgtcctgcctaccgggagctgacggacgacgactgccaacaccttagccccagctggcccaggaaactgctgcggtggcaggtggcggcggcaggagggctcggctgccccgagcgcccgccaggtacgggggcgggacaggtgcggggcgacgcgccgccgattttcatgacctgccggccggttccctctcgctcgctgctcatcttgcttctcccaaacacctcttctgtcttcttcccagctccccgatgaaagtgaacggtgcctctttttttttttttaaatcaccactatcagcggtgcgttctaaaaagatactcttccgccctcgctactccccccagtggtgccctaatttgtaccttaaaacgctcacctcaatctgagtacctgctatgtgtcaagcagagagctaaaaacccacacgtggcctcacttaaacttcccattgacagccagagaagcaggcacaacgaggccggcgtgccctggctgtgggggttgcatccagatcacggcggatctgggtcggcctgaccccacagcgctgcacttttccctgccgcaccaccaccacgtc

SEQ ID NO: 8226 - DNA, 1710 bp, Artificial sequence
  DNA replication origin
atattttatagacacaaatgagattatatgaggaggtttaaattccatcagacacaaaacagctcaacactctcaaccactaggagataactcatttacctaagatctcaaatgtatgttaattaaaatatagtcttttctcccgattaaagccagtctcctaagggttgctaccaagtcatgcccctatggcttgtgcttaaagcacaaccccacgtggcagcttttgctagttgcttttcaatctccactacccctttcctcccaaataagaaaactctgatttttagctgggtctactgctgcccaattgaaagatggcatttcccagcctccctggcagctggggcatggttgtgtggctaagttctcccaccaccttcaagaagtggaaaggtgtgagacttctggaaagtctccctgaacgagagaggcatatccatcttctcttttgcagctggttcctgggccgaggaggtgatggcaggaatgtgggcagccatcctggatcatgaagaaacgtgaatggcagatagaaaagctgatccttgaggactttagggctgccataccaaccacgattgcctctccatggacctcttttataaaaatatgagtaatattcttgtttaggccactgtgatgttgggatttttcaatacatgcagctaaacctaactgataccccacttccccaagttcagccttcatcccatgcacaatttcaaactataaaacacaggaagggagcctctgagcagatacaactgctccaggccttggagttggccaaggatagacccacagagaacagccattcactcagtggacaagcccatcaagtgtctaccccaagatcctgtgctgaagaaatgatggctttgggagcagcaggttttatgggggaagactgagagtgtggtttgggacacgttaaatttgagaggatctgttaggcgtccaaatggtgaagaacaggtaaacaggtctggagtttcagggttgaggctagagatataggttttgagaagtttgggagaaaatggttgtttataaaaccatgtaactgtaggaaatcccccagggagggagtggatagagtaggttccaaggactgagtccagggtctccagtgttgagaggtcggtgagcaggggaggcatccagccaaggagatcaagcaggagtggccaggagcgaggaggagaagtggacagtgggatctgtttcagccaagtgaggatgctgtgtcacggagagggcacagtcggctgggtcacgtggtagtgacagttcaaggaagagatgagcgctgaccccgatcatcggattttgcaacatcaaggtcaaggatgactttgataaagagcttcagaggagtggttgggtgaaaatctgatgggagtagtttccagaaagaacaagtgggaaggaattggagataaggggaaactccagaggggttttgcccttcagagggtcgactgggtggtaggaagaggagagtagggaaaatcaatcagttactcaaaaataaacatggaccctacccccaactaagagaaatcttagatgccagcgcgcctaggctcacatcgcgtctgttggaataaagtggtcatggagcccacggacctttctgagcacctggcactggccagtgaggacaagcaggaacaggtcagacttctcaattctgaaccgaggggg

SEQ ID NO: 8227 - DNA, 1158 bp, Artificial sequence
  DNA replication origin
ctggagcagagtgcacacatggcagagtcgaaggcagagctgatgatgaacagatgtggtctagaggaatgggggtgcccaggaggcgccagggttcccactggagcaaggggagacggagcggctgccggctgaactggggatgcccggatcagcagctctgggggaggtcacatggattcattcatctactgacgtgtcacacgggaggtgcccactggacacccaaggagatgtgagtccaggctcgggagaggtcaaggatggagggaggagcaggagctgtcagcaggcgaggggaccaggagtgtgtatagcaaagagagcagagagcagccgctgagcccgtgcaccccgcacacccgacaggggaggcccgagcctgagaaggagtggctgccaggtgagatgcaggcctggcgcagggggtacccaggaagctgatcggaaggccccggagctgggggcggggtcagctgggtcagaggagctgaggctgccccactggatttggcaacaagggggtgcggggtgacccagactggcgctgtgggtggaggggtgggggaagtccgcagggaggggtgtgagggaggatggaggaagagctgccgctggtggcagggacttcgaggaatctgttagatagaagggaaggaccgcgggagcctcaggggagtacagaggacttaaaaaaaatgtttttagggtgagagacgtagcagcacgggtggctgacgggaaagatcctgagggaaatgagggggacggataggaggagctgctggagctgctcttgggctggccagaggggccgggctacaggtgggcccaggcagtggggtgggtgacgccagctcccaggacgggcttctggccaaggggacctgggccttcgctattgtctgttttggacgtgcaaggcgagggcaggccggcgggatgagaggtgtgcccgtcgtgctgaggccttagctgggaagaggagtgtggatgaacctgggcccgagctgtttgcatcacttccccacagtgctcaggggctcagggaaagagctgggggccagagggtgctgaagtggagggagaggtgcccacggaggcctgcagctctgcacacaggccctgctcccctctccagcccctgctggctgccag

SEQ ID NO: 8228 - DNA, 1362 bp, Artificial sequence
  DNA replication origin
gtgtaactgacaacatcttgtcagaggagcccaggagccaggacagacccttccgagagcagtgagtcagcgtggccgctgagggtgatgactttgcgggactatgctgacaacctcctctggcctccccggctcaggcaccggcgactccgcttctcatcaatgacgtctgtgtttgggaagtgtgagcatgcatttttcataaggtcggagccttgagccctatgccatcagccccaggcaaggcgggttgggcagggccactctgggccggagggtcctggaagctgcagagctgagtgaggagccagtaaatgacatcccagtccacgccaggctgggccgggcccacggccaggtccttgccactgatgctgggctggcggctgccaggacacgtggtgtccagcctattcacagagaggggcctggggcctgggggtgggggcaaggggtgacacatgcctcaggggtgctggaccaggtccttctgaccaggccagcagagatgggcctaggccgggtgggttctctctcccagaggaggcaggagaggcccttgctacaggagtgggctcctaatggggaaccagcctcagtcactgagaccggcctgtggctgcccaagggtctctgagtttgtgataaaatcttgggccttggtcaagctcagggctcctcagtccccaaccagggagagcagcaggcactcaatagcaaagggtccagcattcacaatcgctagagactgctgcaggggtttctcagcacctccagaagtgcacttgtctgctggactcacagggttggggaagagctagaccaggtccaggccggggcaggttgggggaggggtgtggggccaggaggctaattaacaacaggatttgtgattcatgtcaccaatacctgctcatcagtaatgcaaagcctgaagtcagttagaaaagtaggcaaaggaaacggaggctgcagggccgcacttctcacttaacagaaagaatgccgtcctgttgggcatggtaatatgtccagctaaaaccatattttgcaactctccttgatgatagagccatgtgacagttttaatcagcaaaatgtaatgacaaattgctaggtgtggcctccaagaaagcaccttgaaaggaaggtagattcagctggcacatgccttatactgtttgcctttctcctctcctcacctgggatatagatgcaatgctggaggtagggcagccatttagtgactatgaggcaacagtacatgttaaggatggctgcatggagaggaactgaatgagttcttcatggcatcatggagctgctgaacccactctagactgcctgtctgcagactgcttc

SEQ ID NO: 8229 - DNA, 1224 bp, Artificial sequence
  DNA replication origin
ccgtgcctcctcggccacctcccaagtcaactccctgcccccaagaccaccattcaggatgtgcttctggggccgtcaccatggagccccggaccctcggctccccatccaactggctttcgggaagttgactggacaaggccctccaagctgaggatgtgccgccagcttctcaggcaccccctccccacggcagcccacccagggaccccgggggctgctcctcccagctggaaggggagccaaggtccaggcctccagcaccagcatcagagttccgtggtgacagtcccagaagcacaccctgcgcggtggccttgggggcagggagctcactgggggtgctgggggccttgggggcagggagctcactggggtgctgggggccttggggggagccactgggggtgctgggggccttgggggcagggagctcactggggtgctgggggccttggggggagccactgggggtgctgggggccttgggggcagggagctcactgggggtgctggggactttgcccggtgaggggttgggcccagggctccggccccctgacagcccccgtccaccccagttcctcaggttcttcttcaaccccctgcacctgtgctcatggatcaaggatgagtggagcctcatctacgagccagcccacgtgaaggagaactggatcgaccccctgatgaggtaggctggatggggggctctgggggccctgaatggcatctgcaccccattccaggtgcctccacgggcacgggagctccacgttccccttcctgctcccagaagctctatgagtgtcagtaatcactccgtgttcggatgagatcttcggagaagccccaagtcccaggctggccccacagcctcgcggggaggaaaagacgtggtccaactgcccaagccccagcctgggctccctccatgccagtcagctgacacgtggcgggtggctgaaggccatttcaggactggctgagtgaatggggcagagccggcccttctgtgctggagcctacatgctggctggggctgcgtcagtggttctagtcctgtggggactctgcagggcctttggcctctctgcagatcccaagagtgcggagtaggggtgagggtggagggagctgaggaagccacagatcagttcctggtggattctggggtctagatatctctcggggtccccaagcctgctgccctcatgctgccct

SEQ ID NO: 8230 - DNA, 894 bp, Artificial sequence
  DNA replication origin
gtagatggatggattaatggatagatggatagatggatgaacagatgggtggatggatgatgagatgagtttatggatggatgaatggatgaacacatgggtgagtagatgaatgagtgggtgaatgaatggatgggtgggtggatggatggatggatggatggacggattggatgattggatggatgattaaattgttggatgggtgggtgggtgagtgaatggatgatcagatggatggatagatgatcaaatggatgaatgggtgattagatggatgaaaagatgagtgggtaggtgaattaatggatggatgggtgggtgggtggatggatggatggatggatggatgattagattatggatagatagatggatgatgacatgggtgagtagatgaatgagtgggtgaatgaatggatgggtggatggatggatggatggatggatggatggatggatggatggatggatggcttcatggaaggataagtagatggatggataagtggatgaatggatggatggatggatggatgatcagagggatggatagatggatagacaaatggatggatgggtgggtgagtgggtggatgatcagatggatggatgattagatggaggtggctgatggatggatgatcagagaccttgttgctgagcaaccccacagttgccccatctgtataatcttcagcatttctgaccccatctcctcagggctcagtgtgtttgtctcaggtcatgctgccaacttcatctctctctctgtctctgccaagcacagcccctgcctgggccctcaccatgtcctcccatgctctatagctgtgtgcctctcagtacaatctgtgagatgtttgtggacatgtaccttctctgcatccacag

SEQ ID NO: 8231 - DNA, 787 bp, Artificial sequence
  DNA replication origin
gctgtgctgaaactatcctctaccctccctgccctgccccatgcctaagacatccttctgcttcagggttgagggcccactgtaattcactcattcattatctcagacaaaggagataagacgtgttggagcggttgtgattctggattgtgtggcctagaaaggcctcccgagaaatgccatggagtaaaaaaccagaagtgagcaagtcggccatggggtgtctcagagaacagcatcctgggcaggagcaaggtgcaggcaaaggccctggggcagtgcccaccctccctcaagtgtttgagggtggccaggaggggctggagtggagtgaggcagggaagagggaaggcggggtaccggtctggtcacacatccactggagggagcagagacaggacacattgaggcaggctggcgccaacacagggtccctccagctgccgtggccaaggagggcagtgagaggcagttcctggagatggcttgaagcaggtgggcaggagatggatgtgggtgtgagagacagaggtgacaaggaggactctgaggcatgggtgaggaatggacagcggtcgtggtcagtgaggctgagggagggctcgtttgaggaagatgagggtttgaggtttggacgagttgattttccatgactgttagatgtgcaggggagaaggcatggagttaggagggtaatacagcagtctggagctcagggatatctaggccggccccctcctgctccttcatggacacagctccggccatattatcggagcctcctgtg

SEQ ID NO: 8232 - DNA, 1610 bp, Artificial sequence
  DNA replication origin
ggcaggcggccttgctgcacgtgtcggcgccgcggaccgcgcgccccaagccccgggtgagtccggattggtgggaggagcccgggcgactgaaagccggggccgggtggggatggcgggcgcggcgcgcagggaccggcgtcccggggcggggatggcggggagatcgggtccggtccgcggccgggagatacgcagcggcgggcgcgggaggcggtgggggcgtccctgcccgcgccgacgcgttccccggcctgcaggcgcagctagaggcgcagcactggctggagctggagcggagccgcgagcgcaggctgcaggcgctgcagcagggaggctcaggacccgggcccgcgcgccgcctggaggccgcctgagccgggccgagcgcgccccacccgcttgcgggccaccccctacacccgccgccccaataaagagtgcggcccgcggtgcgcgcctcctcttccttggccgggcccccctcggccccggcccccctgcctccgcaccccgaccgcacccctctcccttcctagcccccgtctgcccagaaaagcattgccggataaaaggcaggacgcccagttactgcgtggggacaaacttaggctaaaaatgtatcctctccttatcgggaattcaactgaactgggcatcctgcatttttataagcgaaatctggccaccccggcccaggtcctagcacttccctacagcctagcataaggcattcctggtgcgcaccccttcgaaactcccagaaccccttcagatgtggaaatttggaacacccaccctttgccggcatccaggtggcttcacctagggaacccccgagactgagtggcgactgtgagtgtacgtttggctggggaagtggccaggattcttgagcgccaacgttgcactggcccttcacgcgcctccaccatcctcactacggtccagggacgtaggaactggcctgcccctgttctgctgatgaagccacaggtgctcaaagaggcgatgtgaccggcctagagggccaaaacccagagctgcgcctgggagcaccccctcctcccctttctctagcatcagaagcagcccagatccaacaagatcagggccaatggaggcaggacttcacccaaggcagggaccaagatggattggttctgcagtgtcccgggactccgtgggctacagaaggctccaccttgaggacaggcttgctgagtgaacgcctgctggtgacagcctcaagaagaaagtacattaagccaccttcttcccaggaaagagagaaaagcgtcaagtccgtggggtggtgagcagagcagtaaggggttggggagtggaaactgacagataagctagatgtccaggggagatatatttccttccccaactcccaatatcctccttgggcctgcagaggagatggtgcctcagatgaggaggctgagtcccagggtacactcagaccaggaaggcaggcatctcagcagtgacaagaacaggctaaaggacaagagccctactccaatattctgagtttgtgagaaccccaggattttaccacccaggtaggtaaggagaagaatttccacatctctgtagaa

SEQ ID NO: 8233 - DNA, 973 bp, Artificial sequence
  DNA replication origin
ctgttaccactttaaaacgcgcctctttccgcccccgcccacaatcgagcgcactaactcgcaccttccggcaagagacggcgcgggcgcgccccgcccgcaaggtttttcgggagtcacggtctgagggcgacccgggcgacccggtcgcccgtgcccggctgccactgaccgctccaacgccgccagggacgacccgccagctgcctccggagccgagcaggccccgaaccttcccattcctagatttccagccgcacaacagccgcggtgcccctggctcgacgcagctggccggaggcgcggagctggtcgttcgtcccgcccgccgttccgcgcccctctcccggctcttgtttcctcgcctcttaacgaggcctttgtgaggaaggttgctgggccttgggactctgacgatcggctggaaaccaggcctggccctgtttcagcatccccgcgtgccaagccctgggccggcgtgcgggtccctgcccctgcgaggaagctgggacttttgcaggcctgggtggagacgtgtacataacagaggaagagtgtggaggattggaggactcagggcagcacggcagaggtgcatgcaggtccccggtcggactggagaatgggcggtgggtttcttgagctccagtccctgagctcgactttgacgtgggtttagcaaccaggaaaaaagcccaccttgtccctgctgcctgagaatacccagaccttagtccatggccagcatctctggtccctcggcaccctcaggcaacgtgaaggtcaccccaaatgccttgggttacattgtttccttacagtgagtttgtttgttttagtggcgcgatctcggctcactgcaagctctaacctcctgggttcacgtgattctcctgcctcagcctcccgaatagctgggattacaggcgcctgccaccacgcccggctaattttctttgtatttttagtagag

SEQ ID NO: 8234 - DNA, 1106 bp, Artificial sequence
  DNA replication origin
gctttgcgggaaagcagcggtaagtcagggccttgcagatgcgaggtttaggcagcttcgcggcctacagaggcctcggcccgcgcctcttgggggagccgcgctgcgcggcttgacccagccgaggctttgcagcccgggacctcgagccagctctggtcgctcgcactgccgtccgcgcgggcgcaccgagcccggcttggcgcgggcaacagaagttaggaggtctgcgtctgggtctcggctcaccctggggggccgcggccatggggcttagttcctagcctaggaagggaaactgagactctgggaggggcaggaacgcccccaaggtcacttggaaagtcgggcaggatgtgctgttagggggaagacccgggcagggtttttgttccccgctgacgacgcctcctttgtgtgttcgcgccgccgccccgccatcgtggggcctgcgagtttgccggggtgcgtgggccgcgtggcggggccttttgtaggtcgggaggatctgagtacgggtgcgggcctgaccgtgggggcgccgaggtcgcagtctaaaacttagtagggcctcgatttccgggcgcgcttccgggccccggctggtggttggtggaacgtgcgactgtgaggcttgcggcccagccctgcaccgctcgggcccttcaccgctctggcgcgcctatagacaggtgtatgaagattctcacgacccgaaacagagttgctagtaaacaccgcttttccgcctttgatccatcgagggaagagggaaaaggatagagcttgggcaagccgttttggtagggatttcagcttttgtctttcacttgtcagttcccatagacgttcacaaacttaataatcttcgttctgtttctgcaccaagttcttgagccagacgtagggtctcagctctggagcctggcttagactgtccaactgactggggagactgaggtccagaaaagtgaagtggtctgcccaaggtcacatagccagctatttggcagcagatgaggttaagtcctacctgcaagatttgggttttgaattcattgaccaggagttttgggaccactgtcaataaaagagacattgaaggg

SEQ ID NO: 8235 - DNA, 1725 bp, Artificial sequence
  DNA replication origin
agtgaggaccacagaatccctgcctcgtgggctgggcgggggttcgggcagcgctggaaagccgggcgcggtgcggtggggtccgcctgggtgcggaggcagcggcggagccggcgaatcttggaccgggcctggggctgggacacgccggtcggttccccgagaacccctcgcctaaagggtgctcttcccgagcccgccctctccctgctatcccgttaagccctctccagtggtcccggtgccttgctaatccacggggccctaggacgatccggccgtgtcccacaccctcgcactcacgcacctcggggacgactagccgggtcagaccctcgcagacgtccagatcagaaataagggcttgcgtctggaccctcctccctccgcggccttgcagacatctgcgagccccaggcagagctctgccctgagacccgggccacggggggaccctgccggcggctccgccccctggagggccccgcttaccacagacacagaggcacaaaggacatgatttcccctttttggttccaccggtggtgtcaggccgagaggcggcgggcttggcattgggatgtacggcctgccaggctccccttgcagcgttaaccgagctctactgttcgtcctgggtccccgcaacccgccccagctgcagccacagcctcctgatcctctgacccattcttcatgacacaagcagaaatctcatgtgatcagaagaaagctacccttaaagccattcagataccatcctagacgaaaaaaggccccccgccccatcagggtcttggatgatcctgccactgaacatggattttgagagagcgggtaggaatgcgtttctggcctctttttcagtgtcataggctgtccctgccccttgcctcaacccctgtcctttcctttgtcatagcacattgcacaggattgggattcatgatgtcaccagtatccccaaagacaaaaggttttattgggcaggagagaacctgagaatgcctgcctcacacacctctgacacccaagctactgcaaagcaagaggctgagcacccagcactctactatttgctgaatcaatgaatgacaataatgaccattaggcctgggtgccttggctcatgcctgtaatcccagcagtttgggaggccgaggtgggcggatcacctgaggccgggagttcaagacagcctggccagcaaagcgaaaccccgtctctactacaaatacaaaaattagctgggcatggtggcacacacttgtaatcccagctactcgggaggctgaggcaggagaatcgcttgaacccgggaggcaagggttgcagtgagccgaaatagtgccattgcactccagcttgggcaacgagcaaaactccgtcaaaaaaaaaagaggccgggcacagtgtggctctcgcctgtaatcccagcactttgggaggccgaggtggggcgggtcatgaggtcaggagattgagaccatcctggctaacacggtgaaaccccgtctctactgaaaatacaaaaaattagccgggcctggtggcggatgcctgtagtcccagctactcaggaggctgaggcaggagaatggcgtgaacctgggaggcggagctttcggtgagcccagatcaagccactgcactccagcctgggccacagagcgagactccgtctcaaaaactcaaaacaaaacgaaagaaagaaaagaataaaaa

SEQ ID NO: 8236 - DNA, 836 bp, Artificial sequence
  DNA replication origin
acccgggggtggaccacgattcccgtcaggccttgcgaggccgagggcccgggcgctgggaggagctggggccagggagctggatgcggcggtgatgtcaccgcctcgctcgtcgccgcaggtcccgcccgcgccgcgcggccttctgggcgttgtggtcgggcgtagggctaggccggcaggaggccgcgccgccgcccgcgaggcaaactacacggctggcggcagggagttccgcctctctgaccggtgtccgctgcccgcccgccccgcccgcctcgcccgcgcccctgtccgccgcccaggtgccgcagaccggcgcggctcccgggatgcaccaggggcggcgcggcgcggccctggcctcgccaggaacgcccggtgaccttgggctagtctagttctggtccagatgactcagtgaggaccacagaatccctgcctcgtgggctgggcgggggttcgggcagcgctggaaagccgggcgcggtgcggtggggtccgcctgggtgcggaggcagcggcggagccggcgaatcttggaccgggcctggggctgggacacgccggtcggttccccgagaacccctcgcctaaagggtgctcttcccgagcccgccctctccctgctatcccgttaagccctctccagtggtcccggtgccttgctaatccacggggccctaggacgatccggccgtgtcccacaccctcgcactcacgcacctcggggacgactagccgggtcagaccctcgcagacgtccagatcagaaataagggcttgcgtctggaccctcctccctccgcggccttgcagacatctgcgagccccag

SEQ ID NO: 8237 - DNA, 917 bp, Artificial sequence
  DNA replication origin
ggcggcgcggcggcggccaacgggcctctcggcgcgggcgcgagcgcgggcggcgccgcccccggaggctacttcgaggtaagcggcggcagcgggcaggggtcgatggcggtacgcggttgccgttccctcgcgccttggcggagctcggcctcccgctgtcggccccgggcctgggagcgggatgctgcgggcgggcggataacgggtcctgcggcgctgcgcttgccgaggtcccggggcagggcggcaggtgggccgtgctcggcgtgacgcggcctctgtcagcctcttgagaggagaacctgagcagaggcggcgggagggctacaccggggccgccgctcacggcgacgggctggtccgcaggctggagcagcccctcaacgggcggggacgtctccggggtgcagctccgcgcacggcgcttcgccttccgctggacccggcgggtgatacccgcgaggcccgggcttctgtcgtggcgcctcgcccgctgcggcggttccagagcgactgcgattccgggagtgagcaaagctgccctttcgctcccagggctttgaaatgtttctctggccaccttcgttattccgtgcgcgtgatgattgagaagggcctcccggaagttttcctttggtcctcctatgtggttatttgaaatctacctgacagccacctggagctggcagccctggcccctcctcccccgctttgttaagttttcaggggtatttagtggtttggttactcaggtatgtatttagggttcgaacttaaggaatttgaaaggtgatttttttcagttttgtttatgaagacagctagcacacattgcacctaccaattatggattcctgccacttttattcaaccgttggtcacaacatttcagagggtacactatttataagtgg

SEQ ID NO: 8238 - DNA, 1621 bp, Artificial sequence
  DNA replication origin
ggtgggaggggtggggccgggcgagaaggggctgggcgggctgccgtcgggcggggctgcgcggggaagggcggggctgcgcggggggcggggctgcgtgggggagggcggggccgggctgttgtgggtgggcggggcgcaccggggaaagttccgggaagggcggcagccggcggggcccgggcgcggaagttgccggcggccgcgcggcctcccgggcgggcctacagccatgtcccgggacccggggtcgggcggctgggaggaggccccgcgcgcagctgccgcgctctgcaccctgtaccacgaggccggacagcggctgcgccgcctgcaggaccagctcgctgcccgcgacgccctcatcgctcgcctccgcgcccgcctggccgcgctggagggggacgccgcgccgtccctagtggacgcgctgctggagcaggttgcgcgcttccgggagcagctgcgaaggcaggagggcggcgccgccgaggcccagatgcgccaggtacgagggcgggtaccagaggagctgcgggagcgagagtgcgtgtggcggccgccgggtcctgggtgggtgagcgagcgggccccgggtcctgaggggttgagggggtactgggtcctggggttgagttggcctcgggtcctgaggggttgggggagcaccaggtcctgggagttgagggggtgccgggtcctgggggtgagggggccccggctcctgaggggttgggggagcatcaggtcctgggggttgagggggtgccgggtcctggggttgagggacactaggtcctgggggtaaggggccgtcgggtcctgggggtgatagggcaacagcttctggggggtgaggggaccctgggtcctaggggagagagggggaccaggtcctgagtgggataaggggacaccacgggctgaggtgtgctgggtcctggggggtttgaggcgtcaccaggtgctggtggaggtgagggggctctgggtcctgcggggtgagggtgcaaggttctgaaggggataagcgaatgctggatcctggggggttgggagggcactgggtcctgggggatggtgaggaggcactgggttctgaggaggggggttggtgcagttcttgggttctgtgtgtgtgtggtgtatgttcaggtgggctcttaggggtattttgaggttcgtgtgtgggaacacattccgaggggggtgtgtgtatgctgtgtgtattctgtgtgtattgtgtagtgtgtatgttccggttggttcttaggggtgttttgaggtgtgtgtgcgggagacacattctgaggggtgtgtatggtgtgtgtgtgtacgcacacatgtgtgtcttgggtccaaggtcgtgtactcatattgtgttctagagtcccttccagccctcacccatgcatgtgtctttcactagtggcgcttcaactctatgctgggagcaatggcaaatgcagcccgtgtctgataaaggacacaaatcctaggctgggtgcagtggctcacgcctgtaatcccagtactttcggaggcaaggcgggcagattgcctgagcccaggagttcgagacaaggctgagcaacatggtgaaaccctgtctacaaaaagt

SEQ ID NO: 8239 - DNA, 887 bp, Artificial sequence
  DNA replication origin
gaagctgctcaggggcggagcctgtgggcaagtgcacacacagggaagacccctgccctatcctgagtagggaaccttggaaagaccccatgtgtgcttgggcatcattgtggggaagactgggctgtggaaaaacactagcgtttgtctgggaattttggggaaggaaagggatggaaaagcgaaagggtgggaaggggctggtttcctgctgcttctgctatataagaacagcatctagcaggaaggttgtcccgtgggcccatactagccaccttacaaagcagcgtctgcagtggctgacgcctgtaatcccagcactttgggaggctgaggccggtggatctacctgaggtcaggagttcaagaccagcctggccaacatggtgaaacaccatctctactaataataccaaaaaattagcagggcatggtggcgggcgcctgtaatcccagctactcaggaggctgaggcaggagaatcgcttgaaactgggaggcggaggttgtagtgagccgagatcgcgccattacactccagcctgggcaacagagcgaaactccgtctcaaaaagaagaaaaaaaaggaaagaaaaaagaaagcggcgtgcggggcagggggttggagctctttctgggctcagtgtccccaggtgacggaacacatgccacgtgcttggtgcgctgcgagctcagctcctggagcttctgttgctgctgtggccgcaaggcctggaccctcgcggggagattcagacccacacttagctccagagcttgggggttgtcgttaagcccttcctttccatcagaggctgatgaatccccaaactcctgggctgagttcgactctccgacaactcctcagaggcggatgtttggggcca

SEQ ID NO: 8240 - DNA, 1037 bp, Artificial sequence
  DNA replication origin
gcagctccaaaacctggctaggatgggcacagtggctcatgccagtaatcccagcactttgggagctgaggtgggtggatcgtttgagcccagtagttcgagaccagtctgggcaacatggtgagacgctatttctacaaaaaaataaaaaatataaataaataaaaattagttgggtgtggtggcacatgcctatagtcccagctgaggtgggaggctcacctgagcccaggaggttgaggctgcagtgccactgcactccagcctgggcaacagagtgagaccctatctcaaaacaaaagaacaaaaacaaaacctacctagccccttccttggggctgccccttgaggcctttgtctgttcattcaccaatcatgcactgggagtctattttgtaactcaggtgccctggaagcagagcccagaccaagggaagcgaggggtccaggcacacccgccaagggtgatctaggggcaggaatggcaagtgcaaaggccctgaggtgggaatgtgtctgcggtgctggaggagacaggaggccagtgtggccaatgctaagcggggctatggagagagaactcagggagcaggcaggtggcacaggctcggtctgggccctgcccatgcaaggatagaaggcatttgccttgggggaggtgggatctacagaaagttctgagtgaagaagtgacatgacctgactcacactgtgactgcacccctctggtgtgatgatggacactgccaggcaagcgcaggagagggaggatgaggcaggcaggggctgagaaaggcaggattccaggtgtgctttgccaacagaaccttcagggcggacgggatgtggggcgagcagagaggcatcagtgcggacgactccagggttgctggcccagggaaggaaaaagagacttggcaggcgcatgaagccccctgctgggacgcctgtgacacgtagaccagcggcagatcttgccctcgccatcctaaccgtcagcctcaccctcagcaggtcctgccctaccccccagacag

SEQ ID NO: 8241 - DNA, 2199 bp, Artificial sequence
  DNA replication origin
gcccatacctgccgggaccctgagactcccccgagacctgccaagacctgccgggacccctgagactccccggagactcccccgagacccccgagacccgccgagacctgtcgggaccccgagactcccccgagacccccgagacccgccgagagcccccagaccgccaaggcccgccgagccccttccagacgcggagaccgcccccccgcgagacccccgagacccgccgagacccgccgccgaggcttacccgccgagcgctctcctggcccgcgggccctgggtcgaggcggcggcttgactcggccgccaggcgctcccgcccgcgggacccgccgccgccgcagctccgtcccgcccgcgcccgcccagtccgccctcctcctggccccgccccggccccgcccctccccggcgggtcccgcaatcctggaggtccgagctgggcgtggggcggggccggtacctcagggtgggcggggaactgcacgtggcctccgcggccccgggacgaggcccctggggggcgaagactggcgttgtcgcgggcctagacgccgggtccacagtaggtgcttagttctcgcccgtgagtgaggtagcgtgtctgtccctcctgcgtgtccctcccagtgacaccccagtgcccagcgacccaggtggaaagggcgctgtccacccccccagccccgtggtcctgatcctgggcggccccacccctgccccgtgagtgcgacttaggccctggccaagacaggagcaggggaggtgggggagggcttgctgggcaccaggaaaccttgtctttgtttccaaatgtcctccagggtacttttcaggcacttcccagggggacctcgcctcttggaccaggtctggactccggtggcccagaggtcgtcttggggctgggaggcacaggagaccgggtgctttacacttggcctcctctgaggctccctttcctccaccatcaccctctccctaagagtaggcccagatgccttggtgtaagggcaggggcgagaagaggaggggcttcctgggaggaaatggcttccctggggagctctcagggccaggtaggtggagggagccgtggagaaagtgaagaggctggggagaccaagctgggcctgcagagcttgagggcgagcggaccccccaccagtgcgggagtcaactgcttggggcgtggggggactcctccccatgaggagtggggactggaccccaggtcccagagcccaggaagctgtgagtagaggaaggacaggatcttgctgggaacccaagggagctgggggtgggtggtggtgacctggccctgtccaggcaggcggccaaggtctgaccctctgtactgagcacaagaggccagagtccaatgacaggggctgaattggctgctccaaatcaggcaggggcaggggtgtccagggctggccctgcagcaggtgaaggactgggtttgggtcctacaggttgaaatacctgagggcctccaggagacacagccaaaccaagcgggttctcagggttgcagctggaccgagtgtgggccaagtcaccgtccacctgtcccagagctgcccaataatgggtcccaagcctcagaaaggggatccctggctgcaatagccctcctccctgctggagagacacacttgggatcagagaggttaactggggaggggagtaagtgggaggagtcagaaaactaggtggccaggccctgagcccaggcatagaggaagagccagtgcctaccaggaagtgaccaggaccaaggcagggcctctggaagggaagggacaaagcaggggatggcagaggcaggggaggatatgggagagtcttcagacaacagggccccttttccccatctgtgaaatggagggggtcctctactggggaggcggcagaagtggatggggcatgacagcaggcagatactcactctacctggcccagggccacccctcacaccggcgctggggctgtgactctacccacctacagcctagctctcggggctgaacttagaccccagtgagggagtagatgggtgctggctggctggggtgctcactctctggggtgcctgctcacatccccacctgtaagtgtcctgggcctggctccccaggtctcaactctgctcatcccagcattgggtagcctgcaactcttctg

SEQ ID NO: 8242 - DNA, 1213 bp, Artificial sequence
  DNA replication origin
tggacttcccgtctgtgggcctgcttgtgtgcgtgcatccctggggggtggggagctccagctgactcagcaccctgcttcctctgtccatgtgggcagaaagggccaaggcaggcccagagcctgtcctccctctgtctgcctcttcaggccagcctccttggtgggctcccccatgatcctggaggcctggggactccctgaaaggccaggtcccctgtcagcacccctctcaccagatggccctggctggcagttcctagacacggctgcctatctgtcttccttctgcctgccccctccagggtgtgcctaacgcagggcacagagccaggcaaagggagcctggcgggtggcagggagaggggatagacagaatcctcactcccttgcagccctcgtcccaggcctcctgtcctgccaggagtggagtgcctggagtggggccctgaggttgggctccaagagggcccttcgacggtgtctacgtagaggagacagtggacagagtgggaagaaccaggagggggtggagcccagcccctcctctggtcccacagggcctgagccagtgagggcaggagcttgtccaggctcatggagttggtgcagggctgacctgaacccagaggcttgcttcggcaaggaggaggctgtgggccctgccttcaggcggttgtggaaacaattctacacattgcatcaccggcccatgtcacctgcaaggccacacacatgtcatccaggcaggctgtccaccccagcagcccacacggagtacccgcccctggccacagccaattcgaaggacttaagtgtggccactagaccaggaggcacagctgtccccagtgtcaacagatgagcaaactgaggcacagagaggggataggaggtgctcacggaaaggagcaccagcagaaggctccccacagcagggctcaggccctcaatacccccagggagccgaggcccagagcagcgggaaagtgctgggctgcagggaggccagcgtacaggtggaaggggctgtccccgccccctaactcctccagtccctctgccacccctgagattccctgttgcccatgagagtctcagacgcccggctatcagtcactcacacttcagtgtgaatcagcgccagtgggcggcttttcttgccctccgtgaagcgcggccgctgcagagggaagtttggattccgggaagg

SEQ ID NO: 8243 - DNA, 1601 bp, Artificial sequence
  DNA replication origin
ctcctccttgccgaagcaagcctctgggttcaggtcagccctgcaccaactccatgagcctggacaagctcctgccctcactggctcaggccctgtgggaccagaggaggggctgggctccaccccctcctggttcttcccactctgtccactgtctcctctacgtagacaccgtcgaagggccctcttggagcccaacctcagggccccactccaggcactccactcctggcaggacaggaggcctgggacgagggctgcaagggagtgaggattctgtctatcccctctccctgccacccgccaggctccctttgcctggctctgtgccctgcgttaggcacaccctggagggggcaggcagaaggaagacagataggcagccgtgtctaggaactgccagccagggccatctggtgagaggggtgctgacaggggacctggcctttcagggagtccccaggcctccaggatcatgggggagcccaccaaggaggctggcctgaagaggcagacagagggaggacaggctctgggcctgccttggccctttctgcccacatggacagaggaagcagggtgctgagtcagctggagctccccaccccccagggatgcacgcacacaagcaggcccacagacgggaagtccaggggcccagagagacgagatggccagccttggttcctgaggggcagggaggaagggcgcaaactcagccaggatcttgggtgtgaactcagatgccaccagtttccagctgtgtgatcatggccaggaggcttccccctgccacccctccgttttctcatccatgacctgagggctgtgaagcactttgtacctggtgggtggctatgagtgtccgtaggggggatggtggtggtggtgacatgtgcttggtattcagtgacagtgggtcgctgagggtgctctccctggtcctcagggccgctgtatgtcctgttttgggtgggggcagggactggcctggagaggcctgggtaaaggccaaggctcccaggttcctgcccacattggactaaggcctgagtccatcaggagtggccagtgttgggcagcccctgggtcttcctgcgttctgtcctcaaaagctcccttgtggggacaccccaggtcagtgactatgtgtggcaggctctgccctcctcactctctgtcctctcttgacctcatgatctgcccacctcccaaagtgctgggattacaggcgtgagcccccacgcctggcagagtatatagttctttaataaccgggtggcttggccatcactgtgcagcctgggtgggtgaggagaagggcaggctggcggggaaaagacggggaatttgccacaaggtgagagctgtcctaccccagacgcagtggagcggctcccacccctcgggccaatgaatacagggtgggccgtcaggaggagggatctgagccgggcgggcagccatgcaggtacagacagactaagccaaaggcgggcggtagggagggtgggagaccagtttgacgggagtggcctttgcatgccaggtgtggtgagggtatggaggggcctgggaggcaaggagaaggggccgtgcag

SEQ ID NO: 8244 - DNA, 933 bp, Artificial sequence
  DNA replication origin
cttggggcaggggctctctgagatcaaccttcccattttcttgaggatgtgaccaggagggtgatgttttgtggtcggggtggctgtgcctgcctctggggcaggaagttgctggggaaggaagaagattgagaaaggacccccaacccccacctctgcagaggatctagcgggccttgccccatgccagggttcctgccggctggcatcaaggggacagctattccagggctggtgtcctgagaagcaggggggacccacttgggacccaggccccctcgaagacctacccagagccacccttgcggcaggcagggtcctggcccttccagtacgaagctgggaaaaggcagcaccaaagatgccaggggcgcctcacggatccccccgggggggcctccttgagggggagcaggaggaggggccaggctgagggctcaggctgtgtgaaagacaccctggttttgaaaagggagaggggctagagaggtggggcccgagggcctggtggggcttccagcaggggctggcttatgttttcaagcttactctggggtctggagaccactgccgaacatacgccctccaagcagtggccacaagaagaccatgaggagctcgggcggggtctggggaaagggtgggggctgccacagacagaagtgggttcgtcgaggctgcagaaggctgggtgggagtggaggaggtgacgtgaccaggatggggtcggtgacccctgcacaggggctacaggggatgaaaggggagggagcagcagactgctgagattggggtggcattggccctggtgggactgactgtccccggctcagtctccctcctccttggctggcttttctggcagacagtggcatggtccagagctgcctccctggggagggaaagggcatccccaagtcactcctgaggctg

SEQ ID NO: 8245 - DNA, 852 bp, Artificial sequence
  DNA replication origin
agcctgggggaaggcgggcactgagccctaggagggtgggtgggcacagagcctgggggaaggtgggcactgagccctaggagggtgggtgggcacagagcctgggggaaggcgggcactgagccctaggagggtgggtgggcacagagcctgggggaaggcgggcactgagccctaggagggtgggtgggcacagagcctgggggaaggcgggcactgagccctaggagggtgggtgggcacagagcctgggggaaggcgggcactgagccctaggagggtgggtgggcacagagcctgggggaaggtgggcactgagccctaggagggtgggtgggcacagagcctgggggaaggtgggcactgagccctaggagggtgggtgggcacagagcctgggggaaggtgggcactgagccctaggagggtgggtgggcacagagcctgggggaaggtgggcactgagccctaggagggtgggtgggcacagagcctgggggaaggcgggcacccccagggaaaatctcaagctctcaaaataagatgttttgcatgagcccctcccatggggcctgggtccgctccacagccatccctgggaccctcccaggctctccccagccagaagccccttccctctatgccccattctgattgctgtcccatgatgcaggactgggaggattcccgggaactcggactgggcactacccaactgggatagagggagagggaaccctagaaagaaggaccctgcctggggccacatgttgtagtgggctgaaaggtggcccccaaaagctttgtccacatcctaatccccagaacctgtgaacacgaccttatttggaa

SEQ ID NO: 8246 - DNA, 1875 bp, Artificial sequence
  DNA replication origin
tttttagtagaaatgggggtttcaccatgttggccacgctggtctcgaactcctgacctcaggtgatctgcccgcctcagcctcccaaagtgctgggattacaggcgtgagccactgcgcatggctattctaataatttttaagtggattccttgggattttctgtatgtaaaataatctaatcagtgaataattgttctttctttccattctggataccttttatttctttttattgcctaattactctggtgagaatctccagtactatgctgaatagaagtagagcagacatcctttccttgttcctgttcttgggggaaaaactttcagtcttttaccactaggtatgttagctgtgggtttttcatagaaccctttatcagattgaggaacttcccttctattcctggtttgttgactcttcttatcatggaggagtgttgaattttgtcaaacacttgttcttcgtctatcaaaatcatgtggttgtcctttattctattgatatggtgtattacattaattgttttgaatattaaaccatccttgtattcctgggataaatcccacatggtcttggtgtagaatcccttttatatgttgcaggattcagttggccagtattttgttgaggatgtttatgtctatacccataagggatattggtttgtagttttattgtgatgtctttgtctggttttggtattgggataatgctgctctcatagaatgagttccctcctcttctattttctggaagtttgtgaaggatccatgttcttttgagccaactcttgatggctgggttagttcagtttcaactttaggctgtggcaacagcaggggctgaggcctgcaagtgggtgcttgctcgattcaggtaactggagccatagggtctggctggcgtaagagcacagaaggtagagggcaggagtggctgaatcaggaagggccaggttggcatgaggaggccctagaggtttagcactgagcagtgatgggaatggtgtgcgtgttgattctgtgctgggtggagggggctggaggcagaggaagcctgaggagaggaagtggagggggttgccaagaggcaatggagaggggcctggcagggcggctggaaggaggtgggatccttgaggcaggccagacaagggcactgagaacagaggcacagagatgggacagagcctcgaaggctgggtgcagtgggaagaagtccagatagcgggcctgaggtggggccttgaaaccagggtgggtgcccaggatggacagctaggtagggtcaggcccaggctgttagagccacacctgcatctggcccatcttggtggcagcttgtttgcaggtggaagatggaggaggcaggatgcctgggaggccagcaagggcctctgccggcctttggccaccccaggggactctcctgggtgaggtgcctgcgtttgggcaagcaggtgggaggtgccaaggaccagacccctggctccttggagaatccggggctggaggcccatggagtcccgcaggaaagtggagaaggtgagggcggggcacgtgcccgatcccttgccccgttgccgccctccatgcaggtgccgttttgcagaggccactttcccgagggagctggttgcaagggcccggcgggatgggacctgggcggggcctcagagccgaggctcccgcgccggccgtggatttccaaccaagctgtgtggactggcaggtgttgggggagtggagcgggaggcctcgtttgcatcgaaggcttcttgattccaggctgcaccaacagatgtgggcctcctgtcccaagcgcccaccaacctccttgcagcgtggggaaactgaggcccgcagggg

SEQ ID NO: 8247 - DNA, 930 bp, Artificial sequence
  DNA replication origin
agctggggccggcgggaggcgggcgcccgggacgaggcggcggcggccgggggacgcggcccggggccgtgccggtgctcgcaggggaggcgggcgtggatcgccccggggaagccggccatgcccgccgcgtggacgccgtgagtaccgagccccggcccccgagccccgggacccgggccgcgagcttccggctctggaccccgcaccccgagcccctggaccagggccgcgagccccgggcgctgctggtcgcccacgcgcttcttgggggaacaaaggcgggcgtggaccgtcccggcgggcggatgggggactcaggccggcacggggcttgtcgatctgcgggcagctccccgcgggcggactgggcacggggctccctcctccatccccactgcggggctccttcgggccgggcgcggttgggcgggcggcggggtgtggcggcgcctttgttccaaaccttggcctgtggttgggggtcctgcggctgggacccgcccctgacccctccctgcccagaggggctgtctttgggtgcagaaggagctggtggggtccagccgggtgacccaggccgaggccggcagaagacagcctgatgccttgaagacttcctcttgcacttttgttggagggtgctggtttgctaaaagcagagagtatttttctttttatttattttgtttttaattttttaattttagctccagctcagttgcccagactggagagcagtggccaatcatagcttactgcctcctggaactcctggctcaatcgatcctcctggataagcctcctccgggtactataggtgtgcaccaccaagctcagctaattattttttagagatggttgtctctatatgttgcccaggcaggccttgaacgcctgagctcaagtgatccgcctgccttggcctcc

SEQ ID NO: 8248 - DNA, 1585 bp, Artificial sequence
  DNA replication origin
tcccagcccctgcttcctacacacccagagctccccgggcccacccgccccacctaccctcaagccttccgggctccggggagtcaggctccaggtaggagtcatcctcatcgtcgtgctcatagtctgcatggggagaggggggtggtgagagccaaaccggcccaggcccagtctccgagcaatgctccatgcatggggctgagtccaggaggcaaggggcaagcacctgctgggaggactgtgagtccagaccctgccgctgaaggccagagcccagggatgctactgcgcactgccaaagggccagagcaaggagcacagccgaacacacctccctctcctccacagcggccaagaggaggccaggtggggagaggcaaacgggcagtggatgcggagaaagacctcaccttcattgtccgtggggtacggggaaaggctgatatccacaggccgctcaactgcgccgtagaagctgtctgtgtccgagctggagtcgctgcaatgcagggtgcgttggggcggacggtgagcaccaggcctgggaggtcccttgatgctcacacaaaggtacacacaggcacacgcggatacatggacagatacacagatgcacacacggatacactgacaaacacatgcacacatggttaagctgacagacacacacatgcacacacggatacgctgacagacacacacatgcacacatggatacgctgacagacacacacatgcacacatactctgacaaacacacaaatgcacacgtgcacacacaagcacacgcaggaacacaggcacacaggcatggatatatatacacaaagacacagggacacgcgcagacatgtagacacacagacacaaggactctgtcacacagacatggaagtatacagataaacacagatacaggacaagcacacatgttcacacacagacgagcgacacacggacacgcacacacaaacacaagcaacacgcggacatgcacacacacagagcaacatgcggacatgcacacacacacagagcaacatgaggacatgcacacacacagagcaacacgtggacatgcacacacacacagagcaacacgcagacatgcacacacaaacacagagcaacacacagacatgcacacacacacagagcaacatgcagacatgcacacacacacacacagagcaacacgcggacatgcacacacacacagagcaacacgcagacatgcacacacaaacagcaacacgcggacatgcacacacacagagcaacacgcggacatgcacacacaaacacagagcaacacgtggacatgcacacacacagagcaacacgcggacatgcacacacaaacacagagcaacacgcagacatgcacacacaaacacagagcaacacgtggacattgcacacacacacacagagcaacacgcggacatgcacacacacagagcaacacgcggacatgcacacacacggagcaacacgcggacatgcacacacagttacaaggacagacagaagaactggaggctgtggtgcctccactaggtgccccttctggcccacaagg

SEQ ID NO: 8249 - DNA, 951 bp, Artificial sequence
  DNA replication origin
tatccagaaagctgggagatgccaggggatgcggggtcagggaatgtgtgcagagttcaaaaatccaggctggacatgactcggagcgggcagcctgcagatgacccaggctgtcacccagggaattcgggagaggagtgaggtctgagtcccgggtatccctcatggggccagcacaggagctgaggagaaagaggaccccgggagcacggggcgcctggaggacgggctggcaaggaacagggcaggcgccaggctggtgtggctcaggactgagcgctggaactgggaatggggaggccacaggcgtcctggacgagaaatgtctcggggagaggatgaagggggtacagagggagggtgagtggagcagtagcatgcaggagcactggtggctccccaggcccatctctagcctcactgggctgcagctcagggctgggcagacggagtctgagttcaccaaggcttggccagccaggctaagacggaaggcagtagtgtgtgggcgaagggacaggcatggtgaacactgtgagacaagagctctgcatggaaggaaactgaggcaagcggcccgcagaccctcgtgggctgaaggactgttggcactgggaccccagagggaaggagggagggagcggcaggagaagaggggctggacccgggagcctgaaggtgggagtggatgggaggcagagaggatacggggtcaggggctggggtcggcagaggccaagtcagtgagaacaggaggctggaaaacaaggaggcagggcggacgcagggaaaatggaaggatcaaggatcagccccagacatgaggaaattgacaagatgagggggctggagagacaatagggagggaggaagggagggaggcgacagaggaggacagagacacgtcctccccacccagctcgtgcttccgtcatccacgtgtgaccacct

SEQ ID NO: 8250 - DNA, 695 bp, Artificial sequence
  DNA replication origin
cagcagccaggccaacatctgggaggccgtgcttagggggcgggggtggcagtaggggaccggggcccttggaggtaaaggagtgggcccggggcatgtcagagaaggctggcttcctgggcgtgggcactgggggtggtgggtaagccggtgggtgcatcagggcatctgcagagcaaagagacccgggttggaccctgacagagactgggccaacactatcctctgctggcagtggtcagccaggccaaccaggagtgcaacccatggtaggcccaccccacagcctgcccacccagcagcccagcacccagcactcccatcctgccttccccagggtcccagaccacccaccacccccagccttccccattcatcctccctatggcagcctgtggacgcttcctgaagcctagaggacacctgaggagcccatcaggttcccagaggtggaaggaagagaaaggaagagaagtcaagaaggatctcagggctcggctggagcgagagggaggacggaattcccaaggacaggggaggggagcagctgggaggaaggtgaaggcccgtgtttgctcagaacatatccagaaagctgggagatgccaggggatgcggggtcagggaatgtgtgcagagttcaaaaatccaggctggacatgactcggagcgggcagcctgcagatgacccaggc

SEQ ID NO: 8251 - DNA, 1433 bp, Artificial sequence
  DNA replication origin
ccgcccctcagcccctccgctcgcccccaccgcccgacctgggtgcggcctgcggcgctgcagcccaacaacgcgccgtcccataggccaagccgcgcagcactgccgagcaacgtaccctgcgattggcgggacccatgaggggcgggtcccctgcgggcagggcgattggactcgccaggcccgcctcggggcgaccccgccggggcctgcggaggcccagggtcccgcgcggagtacaccccggccggcagcttcgggcgccaggtcatggcttcacggtggccaggtagactgcggcgagcccctgccgggtccgctggacacggtttcattgtgattgacctccgccggaggggctgtcggagcccagggaccctgccctcccgccgccgcccagcgcactcccccagcagacgggccctgccccgcgtagccccgccttgtgcagtccccaggccgagttttggggcccgggtggggtcaaggcagcagggcctgtgggccccgataaggctccacagaggacaactgcctggcccccgggcccggcctgcgggtgctgaggagaccagcgagcaccagccacctccgcacgaccagggagtgagcctgcggggctttggcaggaccagcctcagaccagcaccttcccgcacactgtccctcctgctggcgcatctgacacccaaaaaaacaagcagcgagacaaatgggcacggctgcttgtcctcttgacacccatagaaagcttaggtccagagctgggcagtggcagaagagtgtggaatccagacctccctgctcagcaggagcctctgtgacattgccccaacaagggtcagggatactgtctggatggaagccagcgacccctgttctaaccatttctgttggacgttggcttttccaagacgatttttctgacaagatcacaattctgtctcattcacttctgcttcccatagttaatcactagggaaacgcaaatcaaaaccactgtgggataccacttaacattcattaggatggcagttgaagaagcagggagttgggcgcagtggcttcagcctaaaatcccagcacttagggaggcagaaacaggaggatagcctgagcccaggagttggcagacttgactggacaacataaggagaccctgttctctacaaaaacgagaagaaaacaaaaagtttcaaggggggagaaggaggaagaagaggaaaaaaagaaaataagtgttggcaaagatgcggagaaattggaaccctttgtgcatcgctgacgggaatgtaaaatggtgtggctgctgtggaaaaccgtagagtggttcctcaaaaaattaaacataattaccacataatccagcaattccacttctggatatataccccaaagaaatgaaaacagctatttgtaccatgttcatagca

SEQ ID NO: 8252 - DNA, 1468 bp, Artificial sequence
  DNA replication origin
gcctggcgagtccaatcgccctgcccgcaggggacccgcccctcatgggtcccgccaatcgcagggtacgttgctcggcagtgctgcgcggcttggcctatgggacggcgcgttgttgggctgcagcgccgcaggccgcacccaggtcgggcggtgggggcgagcggaggggctgaggggcggagaggcctggcgggccgctgctgcgggccaggggacgggggcggagccggagccggagccgacgggcggtggccgcactgggaccccggaatcccgcgcgctgcccacgattcgcttctgaggtgaggctagctagcgggggcggcgggggcccggttcgggctgaggcggcggcgggggcgcggggaactgggccgcggttgcggcgggcgggggccgcggggcctgcggcggcccgggcagcctcgggggcggggaggccgctgcggcgccgagggcgtcttggaggggtccccgcggggccttcggcctgggccgagccggggagcgagggcgccgcagatctttcatcgggataggaccccggggactaggcttttcccgggccgctcgttcctggccggcttgtgggctgcaggggtgggggcggaggaggacgaccctggctggacgctggtcagcatcctgcttgtgagaccggttccgcggtccgcagcgctggtggctgcaaggtttgtgtacggacgcatctgtcggctctcgtatttaaaaacgacggcttctgccaaaagagaaaagccatatctgccgacggacgctcgagagataatcgtggaactttatcagcgatggggctgttggtcacctttgccctccctctcttttcttttttcttaatcttttattttcgttttttgggagatgtcagagggcctttccctgttaggatgacttttatctttgctcttgtaatggctcaagatagttgggaggtaatttgcattcactttatgcatacccaccttgaaaaacgtattttggttcgcctgaaactgttgttggtttgagcataatttatgtttagaaagacaaaaagcaattgtcatatctccaaagaccaaagacatagctgatagctgtatgcattactggtaagttaaagaaagattttttgtgtgaaaaattgactgagatcttaatggggataggaaatagaatgctgataggtcgactgtgtctatgagtagaggcgcctagtgaaaacaagcttggagtggatgagtaggagttcaacaggcaccagagagaggagggcatttcaggcagagggtgtgaattgtatgaaagtgagtttgtaaactttggagccttgaatggacaaaggcccgcgatgataccttttttttttgagacggagtctcgctctgtcgccaggctggagtacagtggcgcgatctccagtcactgcaatctccgcctcccaggttcaagcaattctcctacc

SEQ ID NO: 8253 - DNA, 795 bp, Artificial sequence
  DNA replication origin
agtagactaggcccaggcggcgcaggctgctgagccctggggagaggtggcgcgtgctgagaaggcgaccacagcagggaagggcgccgcccggggaagcccaggggagagcaggctccacgcttgggttggtcgagtccttactgtctccagagggtgggtcctggccacgagcgacagccgagaagcgcagcagggccagggggctgagcagatcagccgcatcacggaaccccagggcgatagagggcgcctgtggggatggcattggagagcctgcaggagcggctgctggcctggcaacccacggactgtggcctcaagggtcccaacaccaagagagcggcccagcctccctggcatctggggctggcacacaggggcactttacatcgctatggaatcaagcctccagcccctaggcctgtgggtcccagaccacagccctacccgtttctccaggggcagcgtctctggcaggaagcagaagatgaacagcaggtcggaggctgcgaagagcagggcaaaccagggtgccatttccaggggcagggaggctccgagcatagggcccagggtgaagcccagtgagaaggccaccccaatgaccgcctagggaaaagaccacccgagctgcacagggagacccaggcccagaagtcaccaccaggaccccaaaggcccagcctgtgcacttaccatgccttgactgcgggccagaggcgagcccaggtcagcaacgatggccgtggagaggctgacgttccctttgctgatgcccccaatcagcctgga

SEQ ID NO: 8254 - DNA, 2042 bp, Artificial sequence
  DNA replication origin
cacaggggcactttacatcgctatggaatcaagcctccagcccctaggcctgtgggtcccagaccacagccctacccgtttctccaggggcagcgtctctggcaggaagcagaagatgaacagcaggtcggaggctgcgaagagcagggcaaaccagggtgccatttccaggggcagggaggctccgagcatagggcccagggtgaagcccagtgagaaggccaccccaatgaccgcctagggaaaagaccacccgagctgcacagggagacccaggcccagaagtcaccaccaggaccccaaaggcccagcctgtgcacttaccatgccttgactgcgggccagaggcgagcccaggtcagcaacgatggccgtggagaggctgacgttccctttgctgatgcccccaatcagcctggaggccaggaaggccgcaaagctccgagaggtggcccagactgcatatgaggtggccacacccatctgcccaggggcaggggccaagaggcaggggcggtcgcttaaggccaggagtggctcagagtagggcttggcaacccagacaacacccctcaaccctgccctatttcgaagcatctgagggccacttgcgttctcagtgccttcctaggggccaggagcagctccttgaaagcctggctctggaacaggagccactggtcccccgagaaccccctccaggatgcgatgagggccaaccagtggccatgaggggcccacagccacctccctctccccacctaaccccatggggctactggctgggtgggaggaggcttccccatgggcacccaggcccaggaacataccaggcacagcagcatcaccgggcgcctccccaagcagtcagaggtggccccagtgagtggcgcacacagaaactgcaggacagagaatgccgagccaatgagacctgagagacagatgtcaccatcatggggctgcctggcaccatgagctgtggtcttggggccctcaaggccaatgtccagccccgtcctgagggtccagtcatgctgggccctacactcacaggccatggcccttgagccgagggggccccaatggagagatgaggaaggatctgaacgtgacacgcggaggcaagggatcatgcccagaagccaggacatgtgggcaagggcaccagacatgccagcccagggagtgggaaggcaaggaccgagaattggggaggggcctgggctggaccacgtccaccaaacataggaccgtagagagcccgccaagggcacagagccagccatacctccgaacaggacactgttgtacctcttctccactggcatcccgatggcggtggcaaaccagtccaccccgccctgccaggagccatagagggggtcctaggggatgaggaatcacgataagggctggggaggtctgatgggcctggggggcagggggcactgtgggccgcagggcaaggactcacgtgggcacggccgtggctctccaacagcccgggcagcaggggcagcagcagcgtgaaggccaggaggtccagcaggaggccgagaaagacaacggtgaccacgcggcgctccggcggctgctggtggatgggtgggcgcggggtgcagcctccaccccctccccatcccatggtgggctgctctgacctggcctgggtggggtgcggcgggtcgggttagcggggaagccgagtcctccggggcctggcatacccccacacccgacagccggcgagcaccctaaaggggctgatggcaggggctctggcctacggacgcaggggccgttctggcctgcgcgatgcccccgccccgaacccaggcagcaggaaacgcaggcttcggggattgcacaaaaaatagccgcaaaggcaacggtcctgagagaccagggtgagcacatcgcggacctggccccaccccaccccacggccgcgcctcccacgccctcgtaacagcgagagaaaacttgaagccgcggggaacccggatcccgatcccgatcccgatcccgatcccaacccc

SEQ ID NO: 8255 - DNA, 1093 bp, Artificial sequence
  DNA replication origin
tcccgccccgcacctgccgcggctgcgcgctcgggacggacggtcgcacagacgcggaacagggcaccaggcacgccgccaggggcgggacggccacgcccggccacgccacgccccggaagtgacgtacatctctgcacgttctcttccggccggagtcagtggcggggttctcgccggtcctgcgggtcgctgcttggctgtgggttagcagcaccctgagcggagcggaagagctgcccgccgccgcgtaaccccgaggccgagactcctggcctggcctccttgggcccacgacgcctgccccgcggagcggacccatgggcctgaggtttgtgtgcggggcctcaggcgagcgctggcgcagcctgtcccccatcgtctgcgccctgcgggcctggccctccccgtggaaggaccgcgggcttcggggccccacgctggggggctgactcctgccacacacacagcggtggccgcgggcctggggcggcagcacagccattctgctcgggctgcgtgagctgaccccgctctctgtgcacctacttttgctgcgtttggtgctgagcctgaagtcccaggacaggcggctgagggggaaagatggtgtgaattgggtgggcagagacaactgaaagccacaggacccggttggcacctttttggccgcctgcgcctttgcctgcagccccgctccctgggtcacccgaaggaggagctggcgctctttccgggcgcagaagcacccgacccacgctggaggaaacggtccctctgggcaggagaagctttgggcctggctggagcacactcacggaaccacgccaacgcctggcctgtagccagctcccacctcccctcccaccttctaaaatgcttgcggatctcacgtggccgaccctaaccagatacacatggggaaaggaatcaggtggcacacataccgcctttactccatagagaacttccaattgtgggtaagaacaaagccccacctcttcctaatagatgcagttttccacctgcagccaaaaagacaacctgttattagcttttttcccagaggacaggcatctctatgaaactgcca

SEQ ID NO: 8256 - DNA, 1091 bp, Artificial sequence
  DNA replication origin
cccctgtcggggagacaggcagtgcacagcacccagaggagcaaatggaccagacagaacacgagaaaggaaagtggaggggcaggagggagacaggagagtcagtcgggggtgacggtggagggcgggagaggcctgaggggcagacgtcagcaaaggcctgtaggacgcaggagtcaattcactcgccacggagaagggcaatccaggccgagggtgtggctacacggggaggggtggagagtgggtacagtggggcagaggtgccgggccaagcgagaggggaaggcgtgggtcaggccccgccccacacttccccaaagccgagatgcccaccccttccttgactccacctgtgcccagcctgttccgtcacagcccttcacacgtgggactgcagctatctacaggtggctctcccggaggcagggagcatgtgggcggccgcgcccctctggcgcccagcaccgagcctgacagacaggagccttgggaggcaggtggtggcagaatgggagcactgaaccggaagagtgggccagacccctcttggaagggactctgctggtggtgtgaatgatgccacagcacctgctcctcaggtcagtcccctggacatgcaggcgcttagcactgcacggtgagctggaaatagaggacaggggtctgagccttgaggtccaacctctggtcaggctgggagaggcgtccacagacatggaagagctcaggaagaggctgtgcagctcctcaccccccagagggaagcagcaagtgctgaggaagcatccaggagcagggctggcatcaggggaagggggaggagcacaggggctggggtgagggcccaggagggcagccagtgtgcagactgctcctcatcccaacactgctcttgccgccctcgctcctgaattcagagcgttaagagaagcgacacagcagcgcggcctgtgtgagctgcacgagaactttcacactgccttgtcgtcacgtgagaaaaagtaaaaagttaagattgattttaacaatagaccttatctaaccccaaataccaaaatattatgattttaacacataatacaaaaaat

SEQ ID NO: 8257 - DNA, 1097 bp, Artificial sequence
  DNA replication origin
ggttcttcttggccccatcgccctcgcctcgcgcgcgcaactccctcctcagtgccctgcccccgggcagccccgagtcaatgccgtggctcacttcggacaggggctcactggcaggggcgcccgccgcggccggcgacccgctcccgggcgggctcggcgctaacggcttagctgaagagggagcgcccctcgccgccgcggccggggcactacagctcccagaaggccctgcgccaagagtacacggcgggccgcggcgcgtggcctgctgggagttgtagtcgctgagcctatcggcgagtaagccgagcctgcgggcgcggtgtttacttctcgcgagtcggaggtgctgcgctgttctcgcgagacgaggaagcggttccgcggcccggcacgtgtcttagggtagcgcgcgcctgtctctcttcgggtctcgggcccttgggcgcagcggggcgcgcgccatggcgaaggcgaagaaggtcggggcgcgaaggaaggcctccggggcgccggcgggagcgcgagggggcccggcgaaggccaactccaatccgttcgaggtgaaagttaacaggcagaagttccagatcctgggccggaagacgcgccacgacgtgggactgcccggggtgtctcgcgcacgggccctcaggaaggtaagcggggggcgcacggggagccggaaggcaggatctggaccccacgctgctctcggccggctgcgtccttctcggtgcgtcggtttcctcgttgagcggcacaggccgtgacaggcacacggcactgacttgatagtccgaaagcctctgctgttctctgagctggagtgacctggaaactctcgccgtcttggagaccctgcactcgtgttatttcggcgactcctccaaccgggtcaggccgagtcagtcacttcgggcggcgccctggaccaagctgcttgttaacccttccgcgtttactttgagctctgcaggtttggggacggtggataggggctgtgtaggatgctgcgtttgatgtttcatcggctctctcccgaagcgcgtaaccttgttccttgggaagtaactctatggaaactcattgct

SEQ ID NO: 8258 - DNA, 959 bp, Artificial sequence
  DNA replication origin
gcattgactcggggctgcccgggggcagggcactgaggagggagttgcgcgcgcgaggcgagggcgatggggccaagaagaaccggggcgatagcgcggcagcggtgacagctgggacccgccgcggtcgggctgccccctcccctcgccccgaccgctcccctgctggtgagggcctgcggaggcggcggcggcggcgcccttggtggcagtggtggcggcggagcagcctcccgggatcgtgtccggagctcgaggagagggtggtgcccggcgagctatgcacgggggcggcggcgtctcctcctgttccgcctcctcagtctcctcggtctcgcagaatccgccggcggcggcggcgccaggacatggagctcgagaacatcgtggccaactcgctgctgctgaaagcgcgtcaaggtgggtgcgcggcaggcgcccccgaccccccccccagagaaccccgaatcccggggaaccctggcccccctgaaggaacccgacatccccggagaaccccgatttccctggagagccccgacacctcccactgggggaacccagatctgcacggagccggagccggggtctgtgcagtgtggtcaggctgcccgggccaggtcccagtccccatctcctggcccagatgagagaagtctgcgctttgctcttcttagtcttgccctgtgtccttgtcctgtcctctcggtgtgacctcggtgacagtgttgcttcaggatgcggcaggcagtgtcctgcttgtgttggacaacctgtcccaccaaaaaagaacggcgtctttatggtcttaagggggacaaagaatagcagcctgggaactactctgggcgagaaccttccgataatgattgtagggcaatgttatttttaacatagctgcttggttttgaggtttgatctgaggctctatggtgtgtcaagtgtgctttagcacgacg

SEQ ID NO: 8259 - DNA, 1224 bp, Artificial sequence
  DNA replication origin
cgagtcacagcaaggagatgagccccaagcggtggagacctggtccctggtcccagaatgagccagtggctgtcagggtccatctgcctctgggactggactgtgttaccacccctcactgcccagacactcaatcagtgagggaaactctctttgttacttactttaaaccagtatttttttagcacattttttttttcatttattttcattcaacaaggatttattgagcatcttgtatgttccaggcaccgtcctaggcattgggggaaacagcagcaaatagaacagaagtccccgccctgccagcgagaactgacaggaaacagaacaaatgcatagacgtgtgggctgtggggaggacccgcactctggaggacggggaactgcctggaggggcggcaggctctagggggtgagagggggtcggcctgctgggcagagcagacagagattgtctgcaatagcaaggccacagtggcaggctgctggcaagagcaggagggggttagagggggacgggacagagagcaggaagcccaggccatgctgaaccacctgtcacttgttattgtcatcattgtcaagccttgagtgttgcttcctctgatggccatgaagccatcgcagggctctgtgaagagtgatgtgatgagactgggcttgccggccactgggagagaatgaatggacagggaggaggaaggccattgggggctttgcagcgattcaggtgagagtaaaggtgacgcagacctcggtgatggcagagcaggtgtgagaagtgatggcagatgaccgctgtcagattcaggatggatcctgaaggcaggtggtggagaagacttcaggctgactccaagatgggctggagggaagggggcactcgctggagccaagtccttgcagtggggaggacagcagccagcgcacggggagtgtgtgggcagttcctccagtgaccggagaggaggcagagtctgtggccagtgcagcacagctggggagacgtgagcagggctgtgaacggtctcttatggagcttctttttctcagatggtcagcccctagtggggagcaaaggtgggaggcaggtgtgaggaaaggggaggcttgaaggcttggaaagcaggggtttcctcaacagcatcaagagcccatgcggacctgaagggaggggagtggccgtggttgtgtgctgggcttctgccacacctggacggt

SEQ ID NO: 8260 - DNA, 779 bp, Artificial sequence
  DNA replication origin
gggctggagggaagggggcactcgctggagccaagtccttgcagtggggaggacagcagccagcgcacggggagtgtgtgggcagttcctccagtgaccggagaggaggcagagtctgtggccagtgcagcacagctggggagacgtgagcagggctgtgaacggtctcttatggagcttctttttctcagatggtcagcccctagtggggagcaaaggtgggaggcaggtgtgaggaaaggggaggcttgaaggcttggaaagcaggggtttcctcaacagcatcaagagcccatgcggacctgaagggaggggagtggccgtggttgtgtgctgggcttctgccacacctggacggtgcaggctcagagccagcagggagctgcactcgcccagctctggtttgtccagcagctagagagaggccggggagctgggctgcatgccagggagtgactagaggacagaccatgggctcgacgctggctccagtggacgaggaaatggacacagggaacggcaggttcaacaggatgggcaaagcatggtccaagttgggagtccatacacctccaggccagagttagaaagatgagagggacgctcagagaggaagctgcttggagtggagctgacagagtgcttgctggccaagagtctggggtgtgaccagggagagagtggctgggggtcactggggggatggaggatgaagtcactggagaagagaaggccacaggaccaagcagccaggcataggcccctgcctgggtgtgggc

SEQ ID NO: 8261 - DNA, 978 bp, Artificial sequence
  DNA replication origin
cgcccagccggggggtgatgcaggcagagaggagcccagtaaagcctactttagccaggccacacctgcaacccagagtcccctgctctgtggccacaaacagcacctccgccttgtctcagagcctgtcctaaagggaaacccagcattgtccccagtggggtagcagtagcctcccttttcttgagaaggacagcagagaaacagctgttagttcccagttcttgggaggctgatgtgggaggatcacctgaacccaggaatttgaggctgcaagtgagctaggattgcaccactgcactccagcttgggtgatagagcgacactgtctctaaaaaaattaagttccagcgaggtgcggtggctcacgcctgtaatcccagcactttgggaggccaaggcaggcagatcaccagaggtcaggagttcgagaccagcctggccaacatggcgaaaccctgtctctactaaaaatacaaaaattagccgggtgtagtggtgcatgcctgtagtcccagctattccggaggctgaggcagaattgcttgaacctgggaggtggaggttgcagtgagccaagatcatgccattgcactccagcctgggtgacaagagtgagactctgtctcaaaaataaataaataaataaagttcccagttctctgctgttaataagggcctttgtccactgtgtcaggcctcaaggttgttagttacctcagtgggcagactcataagatggccccagcacccctcacctcctggtattgacacccttgtatgacccctccccgtgagcttgggctgtacctggtggcctgcttctaaccaatgggcaaaggtgatggaatgtcaccccatgactaggtcgcaaaagggtatgacttcagtctccctggccctctctgttgccttcttggcatggatgctctgatgaagtcagctgccatgttggagaggcccacatggcgaggacat

SEQ ID NO: 8262 - DNA, 1561 bp, Artificial sequence
  DNA replication origin
gacggggcgtggtgagactgtaatggggtgaggcgaagctgtgtgtgaagtgtcgcggcgaggcgggacgaggaagggacggggcgggactgcatggtaagggaggcgtggcgatgcggggggcgtggcgatgcggggggcgtggtgaggtaggggcgtggcgaggccggggcggggcacagcagggaggccgcctgaggggcggggcgagacgggggcggggcggggcgatgctggggacggggacattaggcaggccggctgaggggcggggcggctgaggggcggagcgggataggggaggggactggccggtgaggggtggggaggctgggggcggggcaggaaggtgagaggtggggcgagggaggggtggggcgcggaggggcagggccatggaggggctcgcccatgaaggacggggccatggacggggcggggccgtggagggggcgccgagcgcgggcgcaggcccatgcggaaaggatcccccgccgacgcctggagcggggcgacagccggccgtggactctgagccgaggtggccttggggtttgccctcccgccacactggcccgtggccagagccatactcacccggacagccctgcggggagccagctgcggggctctctgcacggggagagggtgggcgagctcctgcgcagagcgcagagaatgcgcgtggtcggcacgacctgaggaccccaagtgtgacccccaccccacccccagtgagctggagaggcccctgcagggcggtgtccacaggcctggcgccccccatcggtcccagcgcagcgccccggaagggaggagagggtctggggcaggcctgggtggtcagcgcctgctgcccacagaggcactgtgattagtgcagcgagaagcagctatggccacaagatgccgcccacaggaatgagtcccgacctgggggcgtttctttatgggagtgcacccctgctctgaccttccggcaggacccccaaggggcgtcattcagcagcagctcagcagaggtctgtggggcaccccctcacgcctgggacacaggccgtggcgggcagggtcctggtctccagagcctcctgccttttgggtggtagaggggcaaacggagagggcagctgtccagcctgcccagcagggagtaaggttggcctcagagacaaccgcccagccggggggtgatgcaggcagagaggagcccagtaaagcctactttagccaggccacacctgcaacccagagtcccctgctctgtggccacaaacagcacctccgccttgtctcagagcctgtcctaaagggaaacccagcattgtccccagtggggtagcagtagcctcccttttcttgagaaggacagcagagaaacagctgttagttcccagttcttgggaggctgatgtgggaggatcacctgaacccaggaatttgaggctgcaagtgagctaggattgcaccactgcactccagcttgggtgatagagcgacactgtctctaaaaaaattaagttccagcgaggtgcggtggctcacgcctgtaatcccagca

SEQ ID NO: 8263 - DNA, 1809 bp, Artificial sequence
  DNA replication origin
ggccggcgtggccccgcctccgccggcgcggccccgcctccgccggcgcagcgtctgggacgcaaggcgccgtgggggctgccgggacgggtccaagatggacggccgctcaggttctgcttttacctgcggcccagagccccattcattgccccggtgctgagcggcgccgcgagtcggcccgaggcctccggggactgccgtgccgggcgggagaccgccatggcgaccctggaaaagctgatgaaggccttcgagtccctcaagtccttccagcagcagcagcagcagcagcagcagcagcagcagcagcagcagcagcagcagcagcaacagccgccaccgccgccgccgccgccgccgcctcctcagcttcctcagccgccgccgcaggcacagccgctgctgcctcagccgcagccgcccccgccgccgcccccgccgccacccggcccggctgtggctgaggagccgctgcaccgaccgtgagtttgggcccgctgcagctccctgtcccggcgggtcccaggctacggcggggatggcggtaaccctgcagcctgcgggccggcgacacgaacccccggccccgcagagacagagtgacccagcaacccagagcccatgagggacacccgccccctcctggggcgaggccttcccccacttcagccccgctccctcacttgggtcttcccttgtcctctcgcgaggggaggcagagccttgttggggcctgtcctgaattcaccgaggggagtcacggcctcagccctctcgcccttcgcaggatgcgaagagttggggcgagaacttgtttctttttatttgcgagaaaccagggcgggggttcttttaactgcgttgtgaagagaacttggaggagccgagatttgctcagtgccacttccctcttctagtctgagagggaagagggctgggggcgcgggacacttcgagaggaggcggggtttggagctggagagatgtgggggcagtggatgacataatgcttttaggacgcctcggcgggagtggcggggcagggggggggcggggagtgagggcgcgtccaatgggagatttcttttcctagtggcacttaaaacagcctgagatttgaggctcttcctacattgtcaggacatttcatttagttcatgatcacggtggtagtaacacgattttaagcaccacctaagagatctgctcatctaagcctaagttggtctgcaggcgtttgaatgagttgtggttgccaagtaaagtggtgaacttacgtggtgattaatgaaattatcttaaatattaggaagagttgattgaagttttttgcctatgtgtgttgggaataaaaccaacacgttgctgatggggaggttaattgccgagggatgaatgaggtgtacattttaccagtattccagtcaggcttgccagaatacggggggtccgcagactccgtgggcatctcagatgtgccagtgaaagggtttctgtttgcttcattgctgacagcttgttactttttggaagctaggggtttctgttgcttgttcttggggagaatttttgaaacaggaaaagagagaccattaaaacatctagcggaaccccaggactttccctggaagtctgtgtgtcgagtgtacagtaggagttaggaagtactctggtgcagttcaggcctttctcttacctctcagtattctatttccgatctggatgtgtcccagatggcatttggtaagaatatctctgttaagactgattaatttttagtaatatttcttgttctttgtttctgtt

SEQ ID NO: 8264 - DNA, 1305 bp, Artificial sequence
  DNA replication origin
acagaacaaaatggagtgtcctatgtctacttctttctacgcagacacagtaacaatctgatctctctttcttttcccacatttcctccttttctattcgacaaaactgccaccgtcatcatggactgttctcaatgagctattgggtacacctcccagatggggtggcggccgggcagaggggctcctcacttcccagatggggcggccgggcagaggcgccccccaacctcccagacggggcggcggctgggcgggggctgccccccacctcccggacggggcgggtggccgggcgggggctgcccaccacctcccggacggggcggctggccgggcgggggctgccccccacctcccggacggggcgggtggccgggcgggggctgccccccacctcccggacggggcggctggccgggcgggggctgccccccacctcccggacggagcggctgccgggcggaggggctcctcacttcccggacggggcggctgctgggcggaggggctcctcacttctcagacggggcggctggtcagagacgctcctcacctcccagacggggtggcagtggggcagagacattcttaagttcccagacggagtcacggccgggcagaggtgctcttcacatctcagacggggcggcggggcagaggtgctccccacttcccagacgatgggcggccgggcagagatgctcctcacttcctagatgggatgacagccgggaagaggcgctcctcacttcccagactgggcagccaggcagaggggctcctcacatcccagacgatgggcggccaggcagaaacgctcctcacttcctagacggggtggcggctgggcagaggccgcaatcttggcactttgggaggccaaggcaggcggctgggaggtgaaggttgtagtgacccgagatcacgccactgcactccagcctgggcaacactgagcactgagtgagcgagactccgtctgcaatcccggcacctcgggaggccgaggctggcagatcacttgcagtcaggagctggagaccagcccggccaacacggcgaaaccccgtctccaccaaaaaacacgaaaaccagtcagacatggcggtgcgtgcctgcaatcccaggcacttggcaggctgaggcaggagaatcaggtagggaggttgcagtgagtagagatggtggcagtacagtccagccttggctcggcatcagagggagactgtgcgagggcgagggcgagggcgagggaattccttaatttcagtttagtgatactaattttggactctggcctct

SEQ ID NO: 8265 - DNA, 1189 bp, Artificial sequence
  DNA replication origin
tgaaggttgtagtgacccgagatcacgccactgcactccagcctgggcaacactgagcactgagtgagcgagactccgtctgcaatcccggcacctcgggaggccgaggctggcagatcacttgcagtcaggagctggagaccagcccggccaacacggcgaaaccccgtctccaccaaaaaacacgaaaaccagtcagacatggcggtgcgtgcctgcaatcccaggcacttggcaggctgaggcaggagaatcaggtagggaggttgcagtgagtagagatggtggcagtacagtccagccttggctcggcatcagagggagactgtgcgagggcgagggcgagggcgagggaattccttaatttcagtttagtgatactaattttggactctggcctctaaaactgtgaaagaaaaaattttttgtttgtttgtttcttttaagccacatagtttgtggtaatttgttacagcagctgcaggaaactaatttatgctgcatgtgaaatggtgtaataaggtagattgtgatgaagatacatagtataaacaattaagcaacaactaaaagcacaacaaggaattatagctaatgaaccaaaaaaggagattagaataataaaaatggtgaatcccaaagaagccagaaataggggaagaggcaaataaaggaaagaaagagcttgatggtagatttcaacctaactatgtcaaaaaggacattacatgtaaaaggcagcgatttttcagattgaatggaaaagtaagactcggtatatgctgctgcctgcaagaaacacattctaaatataaaggcaaaaataacctacaggtaacagaacggaaagaagttcactgtgcttacaagaattagatgcaagctagactggttctgttaatatcagacaaagtggatttcaaagcaaaggctcttgcccaggatgagatggtcatttcataatgatgaaggggattcgttcatcagcctggcatagcaagctgaaatgtttatgcaccggactacagagctaaaatacatgaagcaaagcctgacagaactacaagtagaaacagacaaatccacagtgatagagatttcagtagccgctctcaatgatttgtagaacacgtagccataatatctggatctagaacacttgaccaacactgtcccctgtgcaacctca

SEQ ID NO: 8266 - DNA, 861 bp, Artificial sequence
  DNA replication origin
cccaggccctccacagaaaggcccctcagctgcgaccctcctgccatacaccggcccctctgagaggccctggtcagcaaatgtctggacgtgctcctttctgtacccctgtcagcattttacttccctggggctgagggcctgtcaccctggcatctgtggggtttttgcaaaggttaggtttcaaaaccttatcatgaaacatgagcctcggtgttgacaagggaaacggggccagcaccagggacccagagaggatacatcgccgcgacccacgggctggtggacgcgctgacaaagaagcaggagaggctccacgtggccatggcgaccggggccctctgcgtgaagttggagagggacagcatgacccagtcccggaccatggacgactgcccggtgctgtgcagagtctgaaacacctgcaaggagcaagcaggtgcctgagtgtcagggctggggggacgggaagcacctgctgcgcctgggtggcgggggtggggtgggggccagaggcattgctgctttaaagcggaggagctgggctctgctggcgaatctgctgggaagtcggaggcaactccacctccaggctttcccactccatccccatcccacatgcaacctcaccttatacaccacggtggccatgaactgggggtatggctgctggttggacagaaactctccgatgactttgttcatgatgtcctggggtgggaagaagtcgtctagaaactggggcaggatcctggccaccactctggcttcacaaggaaagcctttcctgatcctgggaggagggacgcaggtcagagactggcaccagctcccacagctgccccacctgcccgcggaggg

SEQ ID NO: 8267 - DNA, 861 bp, Artificial sequence
  DNA replication origin
atacccccagttcatggccaccgtggtgtataaggtgaggttgcatgtgggatggggatggagtgggaaagcctggaggtggagttgcctccgacttcccagcagattcgccagcagagcccagctcctccgctttaaagcagcaatgcctctggcccccaccccacccccgccacccaggcgcagcaggtgcttcccgtccccccagccctgacactcaggcacctgcttgctccttgcaggtgtttcagactctgcacagcaccgggcagtcgtccatggtccgggactgggtcatgctgtccctctccaacttcacgcagagggccccggtcgccatggccacgtggagcctctcctgcttctttgtcagcgcgtccaccagcccgtgggtcgcggcgatgtatcctctctgggtccctggtgctggccccgtttcccttgtcaacaccgaggctcatgtttcatgataaggttttgaaacctaacctttgcaaaaaccccacagatgccagggtgacaggccctcagccccagggaagtaaaatgctgacaggggtacagaaaggagcacgtccagacatttgctgaccagggcctctcagaggggccggtgtatggcaggagggtcgcagctgaggggcctttctgtggagggcctgggtgaggggagcgagggtgggcggtggtctctgcagacgtcccgcccactcgcgggctctgtgtggctgggcttctcctgacactgcttctcattagctttggtcattgtgcctcgatcgccctctcggggaaaggcttaagtaaagatccagttcccacccccagatgctggctgccaggagtttccctttccacagc

SEQ ID NO: 8268 - DNA, 2281 bp, Artificial sequence
  DNA replication origin
ggccgcgcatctcggcgtccgtccagttgcgggcccgccggtgcttctccgcctggggagacacgaggtagccgggcccctcggccgccgccatgccggaggcgcctgtggggtgagagagcgcgctcagcgagggccccggcccggccccacgcaccatgggcgggaggcgccgctcacgctcgctcgaaggcagctccacgctcaaaatggggcctacatctgacaggcaggaatttagttaaaagcttttaaacgggaaacgtcattttgatgtcacgtttccatagcaacagagcaactgcataagctacaacaacagaaaccttttaactgaaagcacaggaatcagggctgcactgacgggccatcaatattgcggcgagcgggccaggcccaaacccagcggcccggctcccggccctgcctctcaccgccgcccaggcggatcggcccccagttcagtgccgccccggctcacgcaggccaagagggggcctcgggtgggaacaggcaaggagaaagggggcaaaaggtgggagaaacagagaggacgagcgacgaggaggctgagtcccccaacgctggccactggccctggtgggggtcctgggctgtgggacccttaagctccctcagaaggcccctgccttctgaactggggctgggccctggggctcctgggtgtcctggtcctggggtcctggggctgggccctcacaagaaccccaaacccccacccttggctccttttgcttctcttgctccagcccccaggcgccctgggccttaggtctgtggacactggaagcccgggttggtcagagccaggccctgcccagaggtgcagacacagggtacacagacacgggcctctggcaccggccggtgaggacagcagtgatggcaaaggtgagctctgtttgagacacaggagggaatcagcccagcaagccagggggaggccacagggcactcctgggaagagccacgggcatggcagggcacagtctgggtacgcagggagctgatgggcagccagattcggcacagcgtgcggagacggggctcgaggcccaggctgcggggcaggcccctgtggggctgagggactgagatgcccccaggctggccggaggaccacagcctgccgagagccccagatgcagcggaaccggaaccggagcggtggcctgggggttctgcccggagaagtgccgcccaagggcatcggcacccgaaacgtaacacatgcatgtcaggcagggctctgtggagcccacggcacctgtgcagcatggactgtgctgggcgcggtgcccaggctaaatgccactgtggtcagcagagggacagcaggcacccccctgccctcctcaggcctgaccaactgcaggagactctcaggtgtgggctgccccaagaagggcagctgagcctggaatgaggaggcatctcggcctctgcccgctgcccctgctgtcctctgaggcaccttggaggtgggaccgaggctctcaggggaaggacagggcaggggcatggcgggggtgcccagccccactgtgggtgcccagcatagggaaggcgaactggggctccctcttgcccgcagtcaggataggaagtgtatggggagggccccagggatgtgtgaggaactcagaggggtctctgcaccccctacactgggtccctggtcaaggcctggccccaccatcagccccatgagactagtccagtcccttccatctgggcctcaggagacatcatccctactgcctggcactggggcatctccactcgactaaggtcagccctccgtgctgggggctggcacagagagctctgtggagtgcctgcagatgaaggagtgactagaaggcctacctcctctaggaagccctggctcctcaggaacagggttcggccctccccggtgaggtcagggaccggtccgaatgccctttccgtagccatgactccaagggcagaggtggggctggctcccagcatctcttggcatctcccggcacaaggggtaagcagaaaggcatggggtcccagcagtggttctgggtgcagctctagcgactcagcatggaccttagtcatgtcctccccactaacctgtttcctcacctccacaacaggggtaacaggatctgactatatcacccagcatggtgctggctaagggggcacagccctcccagaaccctggggaggtcatggggcctctacgtgccctctacccccttccacaaatccaccttggagc

SEQ ID NO: 8269 - DNA, 891 bp, Artificial sequence
  DNA replication origin
cgtttcccgtttaaaagcttttaactaaattcctgcctgtcagatgtaggccccattttgagcgtggagctgccttcgagcgagcgtgagcggcgcctcccgcccatggtgcgtggggccgggccggggccctcgctgagcgcgctctctcaccccacaggcgcctccggcatggcggcggccgaggggcccggctacctcgtgtctccccaggcggagaagcaccggcgggcccgcaactggacggacgccgagatgcgcggcctcatgctggtctgggaggagttcttcgacgagctcaagcagaccaagcgcaacgccaaggtgtacgagaagatggccagcaagctcttcgagatgaccggcgagcgcaggctgggcgaggagatcaagatcaagatcaccaacatgaccttccagtacaggtgggcgagcgggcagtgtgggccccaccaggacgggcgggcccgggcgtggcgggccgctcctgactttcttggagctctgagtcgggacgatgtgtgggtcgtggcctgcctgtcggtctcctctggccgggtatgggcagaaccccacggggtgagacggggcccacggaaaccgtgtgtgcagccttccattggggaagtggggaaactgaggcccagcaagggcaggaaaccagtctaagagctgaggggtagcaggggtggggctggtgctgggcagaggccaggatggctcccaggacgtatgggcggtctgggcactgtccctcggaggcagcaacactcatggtggtgcccactgacctcacaccctgctcccccatagggaggcggcggctgccagtgccctccccaccaccaagctcccaagctcagcaggggtttcaggggcctactgcgtcat

SEQ ID NO: 8270 - DNA, 827 bp, Artificial sequence
  DNA replication origin
tggctcccaggacgtatgggcggtctgggcactgtccctcggaggcagcaacactcatggtggtgcccactgacctcacaccctgctcccccatagggaggcggcggctgccagtgccctccccaccaccaagctcccaagctcagcaggggtttcaggggcctactgcgtcattggggaaattgagactgcaagtgagaaggaggctcagtgctctgcgacttggagcatccactgagcctctgccatgagccggtgagccccactggggctggccctagggtcacggtggggtatttccagaaatcaccaggtgaggtgcaggaccagccagcgcatgggtggggcttacggtgcgaagaagaaagaggtggaggcctgccctggcccaggactcccagcgtgggggctcccggcctggccccacctctgctcctgctacatggcaggtgggcccttcctgccctggcaacctgcagggaaggccggaggggaccacccagccagggagatgttggcgtctaggaggggacaggtgtggtcccacacacccagcatcttaaagtgcgtgggtccccagcccattaggacagggtcccgggtgggcaggggtcatggtggggtgaaggtctcaggcacaggcaaggtcacaggtgcggtgagggtcttgcagggtgtgaaggtcataggtgtgcggtgaaggtcacaggtgtggggtgatggttttgggtgtggggagggtcttgcacggagcgagggtggcagcaagagctggaagctgcagggggagaatggcagcagagagcacccggccctgtgggcggcct

SEQ ID NO: 8271 - DNA, 1280 bp, Artificial sequence
  DNA replication origin
ctcccagcgtgggggctcccggcctggccccacctctgctcctgctacatggcaggtgggcccttcctgccctggcaacctgcagggaaggccggaggggaccacccagccagggagatgttggcgtctaggaggggacaggtgtggtcccacacacccagcatcttaaagtgcgtgggtccccagcccattaggacagggtcccgggtgggcaggggtcatggtggggtgaaggtctcaggcacaggcaaggtcacaggtgcggtgagggtcttgcagggtgtgaaggtcataggtgtgcggtgaaggtcacaggtgtggggtgatggttttgggtgtggggagggtcttgcacggagcgagggtggcagcaagagctggaagctgcagggggagaatggcagcagagagcacccggccctgtgggcggcctggacagggctgggcctggggctgccggagagcctgtcagcttccaggatgggagtggcctcactcagctgctccacctccgggtcaggcaggtgagcctggggcagagaggctgagagcacctgagccacttgtgggagaggccacccccactgcccccctcaggcgaggagccggcctccagcacagcagaagggaacccccagtccccagccctagtgggagtggggaagaggcccagcaaggccccggacagaccgccagcctgtgaggtctccgctttcagttgcgttgatttgattttttctgagccttgaaggaggggtccggggcctggccctgcccaaaggcccctaggcaggccccaaagccgggacctagggtgctgagcatgacggatgttgggtttgagcggctggcttgcgacgtgagggctgaggtgtgagcctgggtatcttcagaggttcggtggacacaggcagctgcccgcggccccactgttcccgtggcctcctagtcctgctcaggcacctggtgaggaagggacgcagagggcagtgggaggtggccacgactgttccagcaggctcccctctgactcaggaattcacgggcaccacctccctggctggctctggttggtgtctggccaggttattcattatttatgctgaaagcctcttcagagtcccaggggagggtttctgtctccattcctggaggctgagagatgagggtgcagcagagtgggggcctccactccagaccctgcagtctgggctggccaagggctgcaccggtgcactgcacgtcatggctgatgaagcacttccacaccgcagcccctc

SEQ ID NO: 8272 - DNA, 1930 bp, Artificial sequence
  DNA replication origin
cgcctttgacagaaagtaacaggggtggccgggtgtggaggcttatgcctgtaatcccagcactttgggaggcagaggcaggtggatcacctgaggtcaggagttcaagaccagcctggccaacatggtgaaaccccatctctactaaaaatacaaaaattagccaggcgttgtggcgggtgcctgtaatcccagctactcgggaggctgaggcaggagaatcgcttgaacccacgaggcggaggttgcagtgagccaagatcgcgccactgctctctgcacaagagcgagactccgtctcaaaaaaaaaaaaaaagaaaaagaaagaaagagaggccacaggcattgccgtcctttgcgactagcggatgaccccaatgaccagggtcccaggacaatccacaccccttcggtctggaaagggtgggatgttctgggctgcagaggggcatatcctgccagggagcacccttcacccaccaaactgggcaggtgggggctcagccccagttgggggccaggggtggagagaccacccccagggagagatgaaggcaggggtggggggtgctgggtagtgcagagtactcaggacccctgtagggaagccaagaccaccagccccacccggccttaggcagatggggaaactgaggtcccagaaggaagggcctgagatgtgagcccccttatctcccggcggcctagaaatggggccggcacaccttggtagagaggcagaaggacaggcacctagagggtgtggggcccacaagaggcctgggctctctccccaggacctcagagctctggtagaggtggtgagtaaaggcagtccagccctgtgggcgcctcctgagagctctgctgctggggtaggggccacccgtggtctcagcagacctccctgaagggcagggagctgccaaaacccacagaccccagggccctgctccagtgcctgctcatccctggcccacactctgctctgagctgagagggtacagccaacctcaggggcgtgagatccgcgctttgggcctgatcagggagggcagcccccacgccccagtcctgtgcaaggccccaggcagctgagtctgagaactgggctcagtccacgggaacaacagccacaaatctcaggcctcctgctggttccttctagctgccagcaaaagcgtttttgtctcaggtcttcaatgagaaatcctgagtcaagcagcggcccccggcatgagagggaccctcctcggagacgccttctctactaaagatacttttctgacacctcctgtcagaaagacttgaagaccagggcaggggagaagctgtgactcaaatccacaatcttcctgttcttgcctccaaatggccaacttctattttaccttgaaagcccaccccaaatgtcccctcctcaaaagcaccttctctgggctccccaggcccaccccgcaggtgtctgtcctgcatgctgcctggctcccggctgccctgtgagcatcttgcaggcacagtcacgtggccagcacgggacgggtctgaggtgtgggatggatggcagaggggacgggtcatgcccacggcaacacgtgatgaggtgcagcccgacaccctccccagtgctgagagggcagctagcctgtgagggtggggtctgtgtgggctaagggaggccagggggcgcattctggggtctggggcttggtctccctccgtgtgccgggccccatgctgcgtcttctctcctgtgatgctcccagccaccctctgagaaaggtactgatttacccccattttataggagggagactgaggccagagaagtcaaggaactttccgtgcagctcaaaagtgatggagctgggagacaaactcggtctgcctgtggacactaaagccctccctggtctgaggccgcctgtcc

SEQ ID NO: 8273 - DNA, 1753 bp, Artificial sequence
  DNA replication origin
gtgacctgactccctggggcctcagtttccccatttgcccagtaggattgtcgggagggtccggtgaggcccctggtgtgcccaggctctgtggccagcacgtccacagccggcactgtccttccaggtcggaggagcggccggtgaagaagcgcaaggtgcagagctgccacctgcagaagaagcagctgcggctgctggaggccatggtggaggagcagcgccggctgagccgcgccgtggaggagacctgccgcgaggtgcgccgcgtgctggaccagcagcacatcctgcaggtgcagagcctgcagctgcaggagcgcatgatgagtctgctggagaggatcatcaccaagtccagcgtctaggccagcaggcggcggcggcggcggggccgggcggctggtggtactgctcaggccacccagggcaggccactcaggccaggcgggcaagggggccgccccgcgagcggagaccgccttccacctggcctctggcaggatgtcccttctgaggggtattttgaggaacccccaggccctggggaccgtgaggctccagtctccagcatgaatgcccttcctcggacacaggccagggcctctggggttcactccgagtaagaacgtcctagagccactctccagtgtcgttactatcaatgatacttgacgtggctttgatattaaacgtatactttttcattcttgcctggaacgcacagtttgctgttgctggcttggtgaggatgccctgattgatggatcccgaaaatgaaagcagatggaaacgggttggggcaggctggagctgggggagctctctcctgaagggaaccctgtgtcctccctcaccaggacctctgcgtctctccttaaatggcctctgacgcctgatgaaaaccccagcgaccttccaggaggcttttattcagctctgtttggagcatcaggtgtttccactgcctccttagcaatgacactaataaaagtcgtaacacctgttcacatgcacagccctgttgagtgttctgggtgctggagatatcatggtggatgacacaaaggccctggcctcttggagcttatgctcccatgcggggaagacacatgggtcagtagagaaatggttgcaggttgtgataagtgctggaagggaggggttggcctgaggacacggaggcagacatacgtggagctgggaacagtggccacacagggaacggccagtgcgaaggcccagaggcagaggacactggagcaagcccaggagcagctaggaggctggtggccagcagccaggccacggaagcccgtgcagcccgtggggaggagtgttcatgcttttcaagcttagtgggagtcttttggccagtgcagctctgggtctgacatcggtgggggacagaggggtggtggagcggccacagctgcaagctcacctcactgccggcccttccaccagtttcaaactctttctagaagctccagctttcccaaagctgaattctctatgagcctccttggccgggactcgggcgtctggttgccctggctgcaaaggaggctggggccaggtgtgtttgagtcacctcctggaattaggcaagttgctgcccaaatagaaggttgttggcaggtgggtcagcaggtgaacagcatggtttgactcagggttcagaaaaatctccctctggctgccaagcgagcaggccgtggagacaggtgcagaggcaggtgtggcagcaggc

SEQ ID NO: 8274 - DNA, 827 bp, Artificial sequence
  DNA replication origin
gttcgagaccaccctgggcaagatggcaaaaccccatctctactaaaatacaaaaaattagccaagcgtggtggcacgcgcctatagtcgaagctagttgggaggcagagtcaggagaatcacttgagccccggaggcggaggttgctgtgagccgagattgtgccactgcactccagcctaggtgacagagtgaaactccatctcaaaaaaaaaaaaaaaagagccaggaaagaaactgcccccaccctggcccccccaaaactgtggaccttcttggctcctgcctatgcgcagatggtggaatcttccagagcagcgccaagccagaaggaagcaggccgcagagctcagcctcctgaggctccagggcagggacaagtggccctgagtgagagatggggaaacaccacctgcaggtctcttctttccctttggctttttcctctacacttgcccggcctccaggtgcctcatggacaggggtaggggaagaggacgagcagctcatacgaggggtcaccgagcctgtgagagaactcatgcccagcaggggggtggcccaagaagctgtttctgtgggaggaagcaccctagtccatccccgtgaaagccagggcccccagaagtggggagaaattgcctgagacggagagaaggtgtcaagtgtcatgctggaaggttttgaaaaggtaggtcttgccaattaagcaaaactcattcagtccatctggaggggctagacacagaaccatgcccaagtctctgggtggtcagtccctggcccctgtggttctcctcctgtaggcttcactcttgggcccagac

SEQ ID NO: 8275 - DNA, 1378 bp, Artificial sequence
  DNA replication origin
ctctccgtctcaggcaatttctccccacttctgggggccctggctttcacggggatggactagggtgcttcctcccacagaaacagcttcttgggccacccccctgctgggcatgagttctctcacaggctcggtgacccctcgtatgagctgctcgtcctcttcccctacccctgtccatgaggcacctggaggccgggcaagtgtagaggaaaaagccaaagggaaagaagagacctgcaggtggtgtttccccatctctcactcagggccacttgtccctgccctggagcctcaggaggctgagctctgcggcctgcttccttctggcttggcgctgctctggaagattccaccatctgcgcataggcaggagccaagaaggtccacagttttgggggggccagggtgggggcagtttctttcctggctcttttttttttttttttgagatggagtttcactctgtcacctaggctggagtgcagtggcacaatctcggctcacagcaacctccgcctccggggctcaagtgattctcctgactctgcctcccaactagcttcgactataggcgcgtgccaccacgcttggctaattttttgtattttagtagagatggggttttgccatcttgcccagggtggtctcgaactcctgagctccggcgatctgtccgcctcagcctctcaaagtgctgggattactggcacgagtcaccgcgcctggcctcttccctggctctctctgctgggtcatcaagggctggctgtgtcccttggccataggtcgcagctcctgttaagtatctctctctctttgtctggcttcctgtaaccgctctggccgcgctccttcagccctgcaggtgaaaacagttccctccctgctgttacctgtcccaattcagcaccgccctgtggcttcccggctcccggaccgcgcctctgccagcgggaaccctgctggactcttaattaattgtcccactgagaatgccattggtttcctcctgggatccaaactaatcacacaagactagatgatggagagctgccaagaaaccatggggcggtggcggggacggaggggaagcgttttgagcccatcaaggcaggtgacaggaaagaagcaaacccgagaggggccgagtccctgggcgggcggcagggctggagcgtgaacagcagcgacggatgcgtctcgagggaaaaacgcggcgggagagaatgaggggaaggcaggaaggaaggggcagggagacccagcgccggggaaggaagacacgaagagggcgaggaaggaactccggcctaaagggtgaaggcggcggctgggacagggccagaggcgcaggccggggccgggcagctcctcc

SEQ ID NO: 8276 - DNA, 1209 bp, Artificial sequence
  DNA replication origin
gcggtggcgcgggccgaagcgcccggagcgggagcgagcggcgcggcccggtaggtgtgcggggccggggccggggcgggggcagggcgcgccgcctccgctctttctttcgtctccggggcgcgcgcccgcgccctccgcctcccggccgatcccggccagccctgcgcggcgcccgtcccctcggggtcgccgcccgcccgccctgccttttgttcgccggcctgactcaggctcctggtcccgggcccggcgcggggcggggcggggcgggggcgggggcgggcggcgcggggcgcgggcctgtggggcctccggccgggcgggtgcgcggcctcctggggccccgcgctgtgaggcccgcccgggcccttggcgggacccgcgggggcggcgccgggcagggggtcccgcgggcgagatgcgcccgggagcgctgggagggttccctcgtcggactccacgagcggccgctttgttagggcagaagctgccttccgagacccgaactccagacgcactgcagcgacctggggtcgcctcagccgcggtgccgcgattgtgcagtgtagacagaggggtcccagagccgtgcggtgtagacagagaggggcccaaagctgtggaatggggacagagaggggacccagagctgtggagtgtagacagaaagggcgcccagagccatggagtataaacagtggagtgtagacagagagggggcccagagctgtggagtgtggacagagagggggcccagagccgtggagtgtagaccgagagggggcccagagccgtggagtgtagacagagagagggcccagagccatctagtgtagacagagaggggacccatagctgtggagtgtagacagagtctcatagccgtgcagacagagaaggggcccagagccatggagtgtagacagtggagggtgaacacagagggggcccagagccgtggagtgtggacagagaggaccacctggcctctcacctgcttggtcacttgctgggaatgtgtccctgggcaggtgaccaccttctctgtgcctgagtttcctcattggacctgtctttggagctgctgcaagggctaagagtgtctttgtctgaagtcctcagcgtggtccatgccgtcctgtgcagggcccttctgaggccacagggacgtgcaggatggccggcaaggcctgcacagaaggggcg

SEQ ID NO: 8277 - DNA, 1157 bp, Artificial sequence
  DNA replication origin
caaggagggcagagaggcggctttgggcagcaagggctgctggggtggagtcctgctggccttcccctagagaaggcgacgtggggagggcagagcaattctgagtaagggagaaccagtttatatttcactttagaaagtaattgtcacagtgcgaagtttcttcccctgaaaaagcgatataaaaaggtccatcgtggccagtgcttttggggacttgagatgatgggtatccggtgcccgggccctgcgtggtgcctcagctggatgctctgcaggtgggggaggccatgttggctgagggcaggggctcaggcaagggcagtggggtggctgagcctgcacaagttggtgcacccctgtctgggtctttttcttaaaactgcaagtccagccttatctctgagacctcctgaggctggaacctgccatcagacaggcttacagttctagccctggtaactgcaatgatgcggatgcctctgtgactggcagagcagagggaggagcgacagggcagtggtgaccggaggtctcagggaggttgacaaagacaagggcggaggaaaggcccctcacgtggactggaggtacagtactgacctgtggagtgctcaggagagggcaggggtggcgcggcctgagggcatgtcctggggagggtcaggaggtgggagggaggcactcgacaggcactgcaaagaggagggaatccagggtcaagggctggctccctttctgccctgtttaggatgagggtctcggggaagaaggggtggccaggccgaggagacctgtggcgctgggagctgggactcagtgaggtcctggaggtggtgagggcccagaggtgacagctggtgacccagccggcctggctgctgctgtgggaaggtcgggggtagaggagatggaggacaggctgaggctgccgctagtcagcgcttccggctgatagaagggggctgagtgggctctgcaggcctggttgacagtatgtggatcacattgactttggacctttatttttgtctgagactgaccaagcaaaataatcaggctgggctgggtgcagtgacttaacgcctgtaataccagcactttgggaggctgaggcaggtggatcacctgaggtcaggagttcgagaccagcctgg

SEQ ID NO: 8278 - DNA, 2508 bp, Artificial sequence
  DNA replication origin
attcgtacttatttccgcgggcggctggggtgcgaggtgtatggggagaacagctggtctgtggtgctgcgtgctctgggtggcctgtgcagccctgtgatggtctccccaggccaccacctggctgcctaaggcccacgcacctgcaggctctgtgttcttaggtgtctggtggcagattctcatgcctttgtgtgagacttgtctttttcttctgaaagttttgtgggacttttttcatctccctgctcagggcttggtgggccctttgcattcgaagattcttgtctgcctttagctctgggaagcggctggcgccgttcagggctgggagccgctctgtcaggattgtgctgtcatctgttgcatcccgggttacctgtgccctcccaggccctttgttgaaggctgagaggtcttcctggaagggactgttttccttatgttgcagcctgagcctgcgtggagtcccagacgcggtcggcactcgcagcactgctgaatggcaggtgtccgctgaggggaaccgggcaggggaggagctgggacctgggaatggcaggtgtcctctgaggagagctgagcaggagaggagctgggactcgggaatggcaggtgtctgctgaggggaaccgtgttgaggaggagctgggactcgggaatggcaggtgtctgctgaggggaaccgtgttgaggaggagctgggactcgggaatggcaggtgtctgctgaggggaaccgtgttgaggaggagctgggactcgggaatggcaggtgtctgctgaggggaaccgtgttgaggaggagctgggactcgggaatggcaggtgtctgctgaggagaaccgggtgggagaggagctgggatccgggaatggcaggtgtccgctgaggggaaccgtgcaggggaggagctgggaccctggaatggcaggtgtccgctgaggggaaccgtgcaggggaggagctgggacccaggaatggcaggtgtccgctgaggggaaccgtgtgggggaggagctgggacccgggaaatggcaggtgtcctctgaggagagctgagcaggagaggagctggggcctgggaatggcaggtgtctgctgaggggaactgtgttgaggaggagctgggacctgggaatggcaggtgtccgctgaggggaaccgtgtgggggaggagctgggaccctggaatggcaggtgtccgctgaggggaaccgtgcaggggaggagctgggacctgggaatggcaggtgtcctctgaggagagctgagcaggagaggagctgggactcgggaatggcaggtgtctgctgaggggaaccgtgttgaggaggagctgggacttgggaatggcaggtgtctgctgagaactgggtgggagaggagctgggatccgggaatggcaggtgtccgctgaggggaaccgtgcaggggaggagctgggaccctggaatggcaggtgtccgctgaggggaaccgtgcaggggaggagctgggacccgggaatggcaggtgtccgctgaggggaaccgtgtgggggaggagctgggacccgggaaatggcaggtgtcctctgaggggaaccgtgtgggggaggagctgggacccgggaaatggcaggtgtcctctgaggagagctgagcaggagaggagctggggcctgggaatggcaggtgtctgctgaggggaactgtgttgaggaggagctgggacccgggaatggcaggtgtccgctgaggggaaccgtgtgggggaggagctgggacccgggaaatggcaggtgtcctctgaggggaaccgtgtcggggaggagctgggacccgggaaatggcaggtgtcctctgaggggaaccgggcgggagaggagctggggcctggaaggccaaggcaagggctgtctccagtccacgctgcaccccaagaagggaagtgtggagaggtattgactggtggctcagtaaaatggcctggaagtggccttggtgattccagaatctgccagctcactccctttggcaccgtgtcctgctgtgtccagggcgggcaggtccatgctgctctgggtccagggaaggtctgggaagagtggccagggacttggagggcctctcaggtgaatgatgggaggtggctggatgcagggatggccagtgcgggtctgcatggggcgggtatcagatcgtctggtgtgtgtgtccctgatgaggtgggaggggggtgccaggtgggtgttcggcagctgtgggcactgtgaggtggtggtggggggaggctgctgggacatgatgactatgggagggtgtgaggtgggcaggcgcctgcgggggcaggtcccaggtggagaaggtggcgtggtgtcttgctgtctcaggcccttcctctgtgcatccacgtaagtgtgggtaagccaagaatagcctgggttcaaatccacctttgccgttaattggctgtgtgctggtagacaagttacttagcttctctgtgcccccactccctcatctgc

SEQ ID NO: 8279 - DNA, 1332 bp, Artificial sequence
  DNA replication origin
aggggacaagggtagagagatggggtatggggggagggagggtggagagatgggggtatgggggaggaggggacaagggtggagagatgggggtacggggggagggagggtggagagatggtgtgggcggaggggagggtggagagatgggggtatgtggggaggggacaagggtgtagagatgggggtgcggggggagggagggtggagagatgggggtatggcggggaggggacaagggtggagagatgggggtgtggggggagggagggtggagagatgggggtgtgggcggaggggagggtggagagatgagggtgtggggaggggacaagggtggagagatggtgtggggggagggagggtggagagatgggggtgtggggggaggggagatgggggtgtggggagggagggtggagagatgggggtgtgggcggaggggagggtggagagatgagggtgtggggaggggacaagggtggagagatggtgtggggggagggagggtggagagatgggggtgtggacagaagggagggtggaggatggaggtgtgggcggagggtaggggctgcagaggccccggggtgtggggtggtgtggggctgggccgtgacaatgggtggggtaggaaggacttttcagttgaggaggagcagcgcagtgcagggagacccaggcgggaatgggtctgaggacatgatggggtgtgtcagcgtggtggtcaaggagaggggagaggcgggagggtggcctgctccatctgcttccagaaaggtgcaggcatgctgtaggtttccctagggactctcaaggaattgtggcaaggttttctacaagactcttatgcaggtggagagacaaaagtagctgcagagcctcaaaatcttgacataaacaggttcccttccttcaagcctgaaattggtcacttaggattccaagtcctcaggaaagcagagctcccaactgtgatgctttttgtttttaagaggtggcgactgatttgctggagccagcttctcatctggggaagtgtctagcataatgatgggcacaacatagatgtttgtcgaattgaattaattctggtcatttcctggaggaggagagacaggatgttttaatagccagttatttcctgcgccggagttggttgggtcttcagacaccagctgaatgcttagggattctttcatttcctaaagtgcttacaaaattatgaaaaagcacgactttgctgaaaacctgccttcatctttactaatcatcatactagtcatctttactctcagtgtactgtgtccactttccaagcacccttgcacg

SEQ ID NO: 8280 - DNA, 1643 bp, Artificial sequence
  DNA replication origin
ttgcaggggcgagttttgtttgttctgcaagggaggcagtgacaggcctgttgaggaaggatgcagtcagaggggacgtctctgccttccaggtgttaagtcaggttcagacagagatggtctaaagtgttggcgaaatgtcttcgagctacaccaagggcctagaagacaggcccacgtgcatcagtgcctctcacaggacaggctcctggtagagctgtgttcttgggactgaggcttgcagggaacaatgcccccaacctgcctggggaagtcagtgttgggagccaggagccagcgtgtagcgctccccctcgtcaccctcacccacagcaggctgcggccccgagggggatggagggcggccgtccgctgtggatggagctgggctggtgcacttgggttttgttcacaggtttctccacgtgtgttccctgtctcaaagggcagcggcagtgaaggaggggtagggtgctggggaccgaggtgggggacatggggtgtgggtggggttccagaccctgcccaagccaggcaggactgggtctgcaggacctcctgcgagtgccaggttgaggggcacattttcccttagctgtcctgaccagtgtgtcgcctcatgtcatgaagagtgagagtgtgtgcgtgtgagggtgtgtgtgagggtgtcagtgtgtgaggatgtgtgtgaaggtatgtgagggtgtatctgtgagggtatgtgttgtgcaagggtgtgtgtgtgagggtgcgagggtgtgtgtgagggtgtgtgtatgtgagggtgtgtgtgagggtgcgaggatcagtgtgtgtgagggtgtgttgtgagggtttgtgtgagggtgtgtgtgatgtgagggttggtgtgagggtgtgagggtgtgtgtgagggtgcgaggatgtcgtgagggggtgtgtgtgaatgtgagagtgagggtgtgtcagtgtgggactgaggctgagtgtgagggtgagggtgtgtgtgagggtgtgtgtgaggctgtgtgagggtgagggtgcgaggatgtctgtgtgagggtgtgtgtgaagatgtgagggtgtgagttagggtgtgtgtgagggtgtgtgtgaatatgagagtgagggtgtgtcagtgtgtttgagtgtgagactgagtgtgagggtgtgtgtgtgcgagggtgtgtgtgtgtgagagcatgtgtgcatcagtgtgagtgtgcatggcaaggccatttggaacgcgaaggggtgtgtgtgcacgtgccagtgtgtgaaggcatgtgtgtgagggtgtgtatatgtgtgagagtgtgcacgtctgtgagtgcatggcaaggccatttggaacgcgagggtgtatgtgtgtgtgtgtgaaatagtgtgtgcgcatgtgtgaaggcgtgtgtatgtgagtgtgtgtgtgagagtgcgcatcagtgagtgtgggggtgtgtgtgcgcgagggcgtgtgtgtgagtgtgcgtcagtgagtgtgcatggcaaggctgtttggaactagcagttctgtccctcttcttaccccataaatcctagtgtttttggaattatttctgcaaagtggcattatgttaaaatggaaaaagtgatcggcgattataattttctattgtttccgtcatcaaagagcttcagctgtt

SEQ ID NO: 8281 - DNA, 1870 bp, Artificial sequence
  DNA replication origin
agccgggcagaggtgaggacccacgtgggctatgtcctggggccaggagaggcctggctaactggaaagttccagtgaaggcaaaggggcctgtgggtgacccagggtctccaggacctgccaaagagctcctccttgactctgggcctccttacagactcacctgtctcccaggcctctctcaccagttcctgcgcccacccacaccagtctctgctagaggacacatcccgtgatgccccagcctaaccagggcctcctgagctttccggccatgcctggcgcacagctcgacctggagggaacagaagcactctctcctgaaggtttctcaacagcagaaaggagacgggcgcggaacacccaggaaccgggacggccctggtggatcccggccgcaagccctgctgcctccttcacggggccggaccacctcactctcagctaggagggcgtgcgaggcagagaggcgggaactggaggagcgcctctgctgactgtgcccgggagacatctgcagagctcacagatatgagcacaggccctgattctctccctgctcttaaccctggaggcctctggtcgccaagccaaaggcccaggtgtggctcctctatgggcagggccctcaaatctcccccagctgggctctcccatcctcctgccctccacccctgaccccgcataaccaactagacagctggccgccatatgccagtctgaccctttgcagtctgcccagcacccgccccagccctgtgcctaacccctaacccctaacagtctggctgtcctgcctgcctgccttccttccccattgcccttctcgggtgggtcatggtgctgcccaggccagcaccccccagatgaggtcccaccactgcctggcctgcagctgctcacagccgtctccacctcgagcacgccccacgcaacggtgccccatgcagcccatccaggaccagctccacaaggcagggaggggtcaacactgagcatgttccccactgcctccccagagccaaaataatgtcgggcacatagtaggtgttcaacaaacattcactcaatgagaaggccctgaagcactgaagaatcctattacatgtccggagttcacaggatcttaaggacagttcagaaaatttcccatataatgggtttaaaaagcagactggtgtgtgaaagaccaagacaagcaaagatttctaagttaaattctgaaaatagcaaagtcgcaaacctaagagacagggtaaaaggagcttattctgaaaggcctgtgaggatctcattcctacacaatgtgacgtgcggcacgtcgtcccagaggtgagtgggaggccaggaagaagccaacattatcaacccaacagccaagaaggccgtgtccgactcacactaaggcttaggtcggactcagggctccgtcggtttttgctgggatttacagctctggatgggcaagatcacagtacaggcctcaagatggaatcaaggcaactcactggggacagacgcaaaagctcctgccacctccctccctcctccctccctcaagacctgtcctccctccctcctctcacctgtctccctcctccctccagactccctgtaaagggccaagagtaggcactgcccgctgtgcaggcgacaccacgcactcgaccccactctgccgctgtagcatgaaaacagcagacggaactgcagcccagggagactctatttacaagaacaggcagtggatctggccggggactgcggtctgccatccctggccctgaacatcccctctctgcccagtccctgagtccaggtctctcccaggctccagcccaggctcctggctccaacagctcccggggaa

SEQ ID NO: 8282 - DNA, 1253 bp, Artificial sequence
  DNA replication origin
agcaacaggcggacccctagcagcctgggctgctttgtgggctttgcgaataaaccacgtagacaatgtgaaattgtgtttcttcctttccgtcctcgatggaacacaatgggatgaagatgtttctgtctgaaagaactgaggtgaaatcagtttagcacttaggtgataacccctcagcagaaggccccacgcatgcccaggctgccttcggttctcaggcgctggtggctgttcccagggtctgggggccctggggggccaggatgctgttgtcctctgctcccgcctggagaccactgtctcctccaaagctctgtaaactgtcagtagtgcaggcccctcagaagccaatgaggttaacgggcaggtcagcgtcaggggctcacccagccaccccagaaccccttgctgttgttccagaaccttcagattgctttctctgaaagtgtgcctgtgtgtgtgcctgtgtgtgtgtgcacctgtgtgtgtgcgtgcctgtgtgtgggtgcctgtgtgtgtggggtgcctgtgtgtgtgtgagtgcctgtgtgtgtgtgggtgcctgtgtgtgtgtggggtgcctttgtgtgtgggggtgcctgtgtgtgaggtgcctgtgtgtgtgtgggtgcctgtgtgtgtgtggggtacgtgtgtgtgtggggtacgtgtgtggggtgcatgtgtgtgtgtgtggggtgcctgtgtgtgtgcctgtgtgtgtgtgggtacctgtgtgtgggggggtacatgtgtgtgtgtggtacgtgtgtggggtgcatgtgtgtgtagggggggtgcctgtgtgtgtgggggtgcctgtgtgtgttgggggtgcctgtgtgtgttggggggtgcctgtgtgtgttggggggtgcctgtgtgtgtgtggtggggtggatgctgacgggaaggcaggggacgaggatgctggttttgtctgagagatgtggcttagcccaggaatggtgatgtggtctggtctatacgtgctccgccttctgtcatactgcctgccatgcctgtcgtacctaatgtagaccctctggcccagagcccaggggaagtgggtggggccatggtaggtagaggcggggccctgtcgaggaacagggcttctgaggccactccagacctatggggctgaccgggggtcccggtagcttgggcgggagccccttcctgggctggtgacagaagtggaggtggcacccctttcagcgaggagcagctgtgcagagggaggtgtg

SEQ ID NO: 8283 - DNA, 1325 bp, Artificial sequence
  DNA replication origin
agggcatggctcagctgcaggctaaggacagcccgtgtgggacaccctatgctcacagaggagacatacgtgctctggcacggtgggcagcggtccctgaagctgggctcacactggcccacatcccttcttgggctcaggccaggccggccactctgggacaggggcgcccccacactgctcacgtcaggagggacgggggcgcccccacactgctcgcgtcaggagggacgggggcgcccccacactgctcgcgtcaggagggacgggggcgcccccacactgctcacgtcaggagggacgggggcgcccccacactgctcgcgtcaggagggacgggggcgcccccacactgctcgcgtcaggagggacgggggcgcccccacactgctcgcgtcaggagggacgggggcgcccccacactgctcgcatccagtggacaagggtgatgaacggggatttcctggggacctcccttctctttattcgagagctcaggagatactgggaaccaaaggctactgagggccgttttgcagacacgtcaggcaggatccggtgtcctgggagcgcgctgtgccatatcccacatcgggtctcctgtaaatgagccgccgagccgacatgcgtggctgagggcttagctctggacactgtgcctgagagtttcgtgttgagaaggagcccacatgcagagcagtgtgcagtcacgggtgtgtgggcttcgcatccggaaggtgagcctcgtgcccccttcgactgagcacgctcccgagggcaccgtgggtcaggacgtaactcacgtggcatacgcggcgccccgcgcccagctgctttcgctctagcaagcctgtttgggaaacatcttgttgccatgatggtcttagtgctctgtgtgcacatgctcctgtgtaaggttagttgcttttcctgttcaaccctgtggctgtagtttgttgttgcttgggcgagtgtgcacgtgtgagcatatgagtgtgcgtgcaagggtgctgtgtgggcctgcacatgtgaacatgtgtgtgtgctcgtgcacacacatgtgcagccgctcaaggttggggtctgtgttttgttccctgctccatccctgtgtgtagaatgcactggcaggtggtaggtgtgctgtgcatagttgttgactgaatgggtgttggaggggacagagcttgctgcgtgtcccagggtctcctgtgggcgggcagagcagtcactgggccggggcggagggcaggggtgcaggtgctgtctgtgctggtcccgcagagttgacgggcgccgacctgaaggactgcgtcagcaacaac

SEQ ID NO: 8284 - DNA, 837 bp, Artificial sequence
  DNA replication origin
ctccctggaccgccaccctctcaagagctcagaggagggtgggttgaatcctgcccctggttctgcccccagggagcgtccctggccctcccgctctctactggggtctctctgcagcccgcagcactggagcttcctatctgtgttaagaagccaggtgcctgttgccagctcttcaaagagatgttttgcttttggggaaacagctggaagcagcagtgcggttccctaaagtgctgggcagcgatgaggtttctctctccaggccctcgggcagctcactgagcagccagtgaccccgtggtttctgtagaaggggaagtaggaaaaaggaggaccctgtgtcagtgttaataaatggtgtctttgtctttcttaggattttctaaggaaagaattcagtgaagaaaacattttattctggcaggcctgtgaatattttaatcatgttcctgcacatgacaaaaaggaggtaagtccacgcttgggaagtgggggctgtgtgagagtggcgtgtgagagagacgcatgtgaggggtgtgtgagagggccacgtgtgtgaggggcatgtgaggggtgtgtgtgaggggcgtgagaggggcgtgtgagaggttgcgtgtgaggggcgtgtgaggggcgtgtgtgagaggggcgtgtgagagggacgtgtgagagggccacctgtgtgtgaggggcgtgtgaggtcgcgtgtgtgaggggcgtgtgagaggtcgcgtgtgagagggccgcgtgtgtgtgaggggcgtgtgtgagagggccgcgtgtgtgtgaggggcgtgtgtgatagggccgcgtgtgagagggccgcgtgtgtgt

SEQ ID NO: 8285 - DNA, 1008 bp, Artificial sequence
  DNA replication origin
atggcttgaaaaaaatcatttctttttcagaataaatttttaaatatacatgatatttaattttgcctaaacctggtttgtataacgccctcagccacagctttcacagcagatggggtgtctttcagtgtgctggaattctgaggaaggaacgtgtatttaggggaatttgaaagcaaattggaggcaggagggcatcccgggccgtgctttcgcagctcctcctgcgcctcgtgggaggtgcaggagaagcctgggagagacgccttggcctggcccggcctggctgctgtttcctcagttggcctgtggcctggcttccaggcttcggggctgctttcgtctgctcgcaatgctcagagggcgctgctctcctgcactcccaccttgccaagaccaggtgtgtggcgacacacggcagtattgcccctgcgcagctgctgctgggctagcatcgcccgggtctttgggacactttaagtatccgtttaaacaatcgtagaggagcccgcgcagtgctgctgcattctggccacacttttatttatttattcaagcaagaggtatttactggggcccgtgagaacacatctgtagagcccgggggtgtcgggccttggcaggcagcaggagtgcggggagaggaagccttgccgggctgctcaggtgcctttcctgtcagctttcctacagggcccgggagattttcagtaagtttctctgcagcaaagccaccaccccggtcaacatcgacagccaggcccagctagcagacgacgtcctccgcgcacctcacccagacatgttcaaggagcagcagctgcaggtaaccgcaggctgtgggagcttgtggggagtccaggctagggctcggggtatagggtccaccttcaaagaacacgtgctatcaggcaggccagtggatcgagagcatcacagacgcaggtagagaaacgcagacagaaagtggggctttcagtagggtagagaaacgcagacagaaagtgg

SEQ ID NO: 8286 - DNA, 1527 bp, Artificial sequence
  DNA replication origin
tgactgtaaaatggggttggtcgtggcagcgtgctcgtggcatggttggggggcaccagggtggaagggctggctgcggtcaggctcgttccctgtgagctgcggccctcggctgccgaggctgtgggggctatggaggattcgtgtggaatgggttgtttgggatgtggcttttccttggacgctgtctcctgacctctccagtgaattctgtggccccctgtgtccacgaatgtggtggagaaggcgggacctggggcagttcctctgcttcccccgcagggcccaccacgcctgcccagcggaccagccccttcaggagcttagagcctctcccgcctggcattggacagctgtcattcccctgactgacagatcgtgaatgccaaacatgttcagatgtcttttcttaacagtgactatggcaggtgaagagtcagattctctgccagaggagagctctgatgcagagacaagaactccagcccggtggctagtggcgcttcatttcagcctcaaacctggtcctaaagttgtctgtctttgcttccttgtttacaaaggggaacatctgctctcagtattcccctcatagcagtttcgagggtcagtatttccctcatagcagcgtccgagggtcagtgttccccttgtagcagcgaccaagggttgccacctcctgcgtgattccatcgagcttaggatggtcgtgtagtcgggacccatgtcaggagcatggctcagccccagcttgtgtgcctcagtcaggcaggcctcacctcggggccatctcctgcgtgactccatcaagcctaggacagtcatgcagtcgggtgggatcacacacatctgttccctgaagttccagtctgggtaaattattcagtgctgatctctgccctagagtggagagaaggagcccctggaccttggcgcccctatatcgagtctggacggacagcgggttgtcttggaggagaaggatccttccagaggaaagggtgagtagggctggtgcagcggatggggagagggtgagtgggtccagtgcaggggagggggctatggagccggtgcaggggagggggtgagtggggccagtgcaggggaggggcaggtggggcttgcgcaggagagggggtgggcggggcctgcacagagtagagggtaagtggggccagcgcaggggagggggctgtggcgttggcataggggagagggtgagcggggccagtgcaggggagggggctgtggcgttggcataggggagagggcgagcggggccagtgcaggggagggggctgtggcgttggcataggggagagggtgagcggggccagtgcaggggagggggctgtggagttggcacaggggagagggcgagtggggccagcgcaggggagggggctgtggggcctgcacagggtagggggcaggggttggcataggggagagggtgagcggggccagtgcaggggagggggctgtggagttggcacaggggagagggcgagcggggccagtgca

SEQ ID NO: 8287 - DNA, 910 bp, Artificial sequence
  DNA replication origin
agagcaggagccaggtggggctgcatcctcacccggtacaacacaatggccatgccatggggggtactttcacccccagggtgaggggcgtgacctcacttccaggctgcagaagccccggcaggcaaacatcgcacatctggcaggtagctgagctccgggggccctgagggcagccactgggcccaaaagtgttcctaggggatactggcagctgtgacactggggcctccaggttgagtgacccctgagcccgcccagtgagctgccccaggggaccccagccccaggagagctatgcggggacccctcctggggtggtgcctagcatctccctgccggcaggtggagtccatcctcttgggatgtctgcaccaggagctcagtcaggccatggggctgggtactcagccttaccaaaggggctgggaggagccactggcctccagcccccagccaggacccctgactgtcgccttgcagccagcagggcagcagtgagaccacccagctcccgggctttttgttggaaacgaagcagatctggttaagaaagcaattgggaattattaccaacacaaccgtaagaacccgttttaagatggcgcgtacagaaggagcactgtgcattggaaactcgggtgtgggtgcacgcgaccttttgaatgcctctctcctttgtgaaaacacaaagcgcagacgtctgcttctgtgcaggggtggaagatgactgctaaaggcgggacacagcagtgctggagggacagctgctccctccccacgagaacagaaggtgagcattttggagggtccctgtgtcgagacacagatatgcacaaaacgtgccatgcagacacatggcaggtgcacacaccgacacatgccacacgaacacacaccaggcatgcac

SEQ ID NO: 8288 - DNA, 1204 bp, Artificial sequence
  DNA replication origin
ccttgtgacaggaagtgggacccatggcagccgagacctcccagtcaacagaatcatcgatgtggatcttgtaactggctcggcgcccgggcgggatggtggcatagcgggggcacaggctggccctgggaggtcgcaggccagtggtgggcctcctacatcagacctccctggcttgggccccgtcccgggtgagcctgctaagcccaagaccagcgctcaccacgccaccttcgtctgagctgccctggcctggccaactctcctgtggacatgtcggggtggggcagcccaggtggattctgtgggcctcaggggggccaccctggccaccacaccctcaggagcccagccaggagggcagggggtgacctcgctggaggcactggccccggacattcgccatgctggccatggggctccctggccctggcctcctgctgcccaataaagcatttctgaggacccaagcgtcggcctggtgctgggtgctggggacacagactcctcgttctcggggactccgagcacatccccaggaggtcatgcaggaaacagaggggcctgaggaggagaagtgccccagggtaaggtcaagggggctttgaggagagggaagcttggctcctggggcctgagggccaggaccagatggcagagactggctctcgccgtcacgtggggaccctgccccagccttgtttagcagggtggtctgagggcctttctggggagggaccatgtaaactgcaactggacggcagaggaagtctagaaagagccctgggcctgtgccaaggccctggggctaaggagggtctgattacagaaagggaaccaggtgtggctgcaggggaggccggggccttgggggctgggttgagtcggaagaggcagggccattccccaggttgccttgatggaacccctaaagccaagtaccctcggtacagggtggttggtgagctcctcagaccatcctagaggcccgagagcacagccagtcccctggggctgttctagaagcttccagggagtggatgcaccccacttagtggtgctctaggaagggggctgggggaggggtcggaatggaagatgaagcccagtgccagctgtgtgtaccacccaccacaagcccgcatccatcctgctcccagcacccaccatgcctccacattcaccgtgcccccagggcccacca

SEQ ID NO: 8289 - DNA, 1440 bp, Artificial sequence
  DNA replication origin
gcccgtagtggctctcatcatggacaattcacaggcagatggtggccagctctgtggcctgcagggactgggagcggcgccagaccatctaggccccaacctatctgcattatcctggaagacttcctggaggaggcttctaagctgaggcccaaggaccatgtcaggtctaggactaggaccagtgcaggccgaggccagagagacagctgggcttccaggtagggtcaaagtgaggtgggcagcaggtgtgggggccaggggactcggggacttcctctccggctgggcccgcctgacgtgggaggcagccagggttaatcatttccacgaagccttgaccccacctgccttggccgctctgctcccgcctcccactgcccctcaggccagctcaggagccatggggcgctgggcctgggtccccagcccctggcccccaccggggctgggccccttcctcctcctcctcctgctgctgctgctgctgccacgggggttccagccccagcctggcggggtgagcactgaccttgtcgcagtgcgaccagaggttcccagtggctacttggggtccttgggaggaggccagagggagggtcgccacagagcgtggggatttgagggggcgggggtccgagcagggggcttacgttgaaagctggccctcacagggcaggtgggtgctggactggccttggaggctggggcctgggctcacggagccccacctgggggctgtcatccctgtgcggcctggcctgggcccctatgggtctgggggctgccccctctctctggacctctgttgggtctggatgcgtgaggttgggggaacctcccagggcctcctagctgctcccatcaccaaaaactgacgtcagggtttaagcttggtgggtagcagtgcctgggcctgggcagtgaccctgagcaggtgttaactaggggccgagggcggggaaggtgtcagggcctggctgaggcctcaggaatgtcgtgtgtcctcctggaacctgctccgagatctgggggccccagtatggaaacaggctcagggctgtgacctcctgcccggcaggacctgagtgtgagggtctgtcccacactgacaccctttctgctcctcctagaaccgtacggagtccccagaacctaatgccacagcgacccctgcgatccccactatcctggtgacctctgtgacctctgagaccccagcaacaagtgctccagaggcagagggaccccaaagtggggggctcccgcccccgcccagggcagttccctcgagcagtagcccccaggcccaaggtgggtcaggtgggcctgggaggaggtgtcgtgcttcaccttagggctgggtgggaggagcatggctgcggctggaggtcctgaggggctcgggtgcccctcgagggagccctgaccctgccaccc

SEQ ID NO: 8290 - DNA, 1273 bp, Artificial sequence
  DNA replication origin
cagagaccctccagggtggtggggtggggtggggggcctctgcctgggacccccatgcacgcaggtgtcgccccccaggtgtgccacaactcacaactacgaccgggacagggcctggggctactgtgtggaggccaccccgcctccagggggcccaggtgggtgctgggttgggtagcctggggcgggcagggggcactgggccaggccagaagggccaaggggaggatggggcggacccgggcaggggtcctggctggaggggagcagaagaggagctctgggattaaccccggtgggtgccacttagggccagagcctctcccaggtgggacctgcgtctcatggtggctgcgcggccatcgctggggccaaggcgccgcctggtggtgaggccgggccctgcagccacacaggcgtgccccaggcaggggacaggtgggcagggtctgtggggtgcggtgccagccgccctgctcacatgggtcctgggacacatgggaggggtctgctgcctgacagtgtgggtgtcaggcttccaggaagccacgtgcacagctgggccagtggcccaggtgttgagtgggggacgctgggaggaaggggaggtctgtgcccctcccagggaccttgcaccccgaggggcgtagagagggcccctttgctctcagagcccctcactggggcctgatggacgccttagcaagcagagaatgtcacagagggaccctgagcctcccagtccgcccctcacaccccctcccgcatgtccccagctgccctggatccctgtgcctccggcccctgcctcaatggaggctcctgctccaatacccaggacccccagtcctatcactgcagctgcccccgggccttcaccggcaaggactgcggcacaggtgagctgggcctcggaggtccgcaggggtccaggggccggagcaagtccccggaggatgggagaacaggtggctcccgagtgcagggcaggggccctgcacggggacagcaggtggcagggtgtgagggcttactgtgcacccctcagagaaatgctttgatgagacccgctacgagtacctggaggggggcgaccgctgggcccgcgtgcgccagggccacgtggaacagtgcgagtgcttcgggggccggacctggtgcgaaggcacccgacatacaggtgcgccacggggtgtgagccgtgccactgacccctgacgggtgtccctgtccacacccgagtgggaggaatggcctgaggtcacccagaaac

SEQ ID NO: 8291 - DNA, 1436 bp, Artificial sequence
  DNA replication origin
gagacctggcctgctcaggccctgccccagcttccatccacattgtggggtccccagatgcagccctcactcctgctgggcacagagcctgggcccctgagcctggctcccatctgctgtgtggaggtcgctccaccctgcctcggcctcctgccctgggctccatgtggggaaccccatttctccacactgaggaaggctctggccccatttgcaggcccaggagccgccggctgcaggttctgcagggccacgcaggaccccaccctgggagctgtggtcctcgaaaggccgccagaccctcggctggccggacccctgcccctaatcactggggtgcccatcgaaggtggaagggcgtctggcccaggctgctccgtctcagggtctccccactcgaggcccgcctcccagagtgtgggcctgggtggctgtgcgcccccactgaggggagccggctgagtgggctgggcctcagtttccctggctgtgcttgggctcctagggctctgacgcattgtcactgcgctccctggctccctactgagagccaggactctgggaggggcggggcctgcggggaggacaggacctggcccactgcactctccgcaggcgctgggtcctctgtggaaatgccactgacccctggcctccctcaatagggacagggtttctggagtgtccatgcatgcccagctcaggactgagccccaagacccagaggggtcagagagggttaccggggaccccgggaaggggtcagcagaggcaccgggatggggtccgcaagcgggtggggacaggcgcatagtgacgctggatggtgtgtggggcctcagggcaggtgactggggcccagaggaggtgcacctgtgggagaagcagtgggcggccgacaccacccagcaggtgtggaccaggctcccggcgcagaagctgtccccgatgtagatggcggccagccaggggtgcgagccgggcagcgaggaggagccgccgatgatacgtggccgcaggaacgtcctcttcttgtgcctcctgccgcaggcctggcgccccggggaggctggctcaggcagggtcgccaggagatccggtgacagttggactctggtgagggattctgggagcaaaggtcaccgggtcacacccctggggttcacagggccagcccccttccacacacaggccctacccggcaggaggcgctgcagagggccatggccggaccccctgtccacgctgctcaggccctggcgcccactcacctctgccctcagtttccaaatctgtagaatggggtttgatgcccgatcccgaggctctgtgagggccagaggggctggacacacggaggcctttgtggccccctcagcagcccggaaccccacagccagccccagcacagtcagagacccccacatgagagcccc

SEQ ID NO: 8292 - DNA, 1358 bp, Artificial sequence
  DNA replication origin
tcctccccgcaggccccgcccctcccagagtcctggctctcagtagggagccagggagcgcagtgacaatgcgtcagagccctaggagcccaagcacagccagggaaactgaggcccagcccactcagccggctcccctcagtgggggcgcacagccacccaggcccacactctgggaggcgggcctcgagtggggagaccctgagacggagcagcctgggccagacgcccttccaccttcgatgggcaccccagtgattaggggcaggggtccggccagccgagggtctggcggcctttcgaggaccacagctcccagggtggggtcctgcgtggccctgcagaacctgcagccggcggctcctgggcctgcaaatggggccagagccttcctcagtgtggagaaatggggttccccacatggagcccagggcaggaggccgaggcagggtggagcgacctccacacagcagatgggagccaggctcaggggcccaggctctgtgcccagcaggagtgagggctgcatctggggaccccacaatgtggatggaagctggggcagggcctgagcaggccaggtctccacccactcgggtcggccttgcagccgatcctgcctgggcttggcctgagactccccccagggcttgtgaccagtgttgtcaggagggatggcaccgcacttcagctcccatgcctggatctgggggtgactggcaatagcccctgcttggtggtccctgtctccccagtatcaacagcccacacccaggcacctgctcagacccctccccgggaccagggtcccacaccattggcctccgtgggcctgacagggggtggggagaggtgagcccggtggctgggggagggctggtccatgcagcctccagccccccttgcacagcccccccagggacagcgtctccgtggtgctgggccagcacttcttcaaccgcacgacggacgtgacgcagaccttcggcatcgagaagtacatcccgtacaccctgtactcggtgttcaaccccagcgaccacgacctcggtgagctccggcgtgtcgtggctgcactctgggcaggtgggccctgtgctccccaggccaggcccagacaggggcaggagctgggcagacatgtggtgcgggggaagctgggggcagggcagggaggacagggcaccgctcccttctggatctcccaggctgccctgtggaccccactggctaccctccctccaccacgggccccgacagcctcccgttcagcccgcacaccacaggctgaccctggccactcttctgatcagtcctgatccggctgaagaagaaaggggaccgctgtgccacacgct

SEQ ID NO: 8293 - DNA, 1325 bp, Artificial sequence
  DNA replication origin
agacctgatttgcttccaatcaaccccttcctactcagtggccagcctatttctccatttgcaaccagcaaccctggctataacttctggggaaacttctggctataacttctgaggcacggagcggggcaggagcttgcccagggtcacagcgctctcggccagtctgggagtggcagccaggccacctcctcctcctgcaggaagcttcctccacctttcagcagccctggagccgcatggagcagggaagggagttgtctaccctccggcatcctgtgtgttccaggctgtgtgggagcaggtgcagctgccaggcatggcaggagcctgggcccgggccagcactcaggaatgcagcagggccctgcctctccctgtagggataagcaagtgccaggcgcccagggcagcggatgtgtctgtggctacagccccaacggcccccgcctccgcaccggctgtcctgggccagccccttgggggcctgggatgtgtggggagcatgaatggggctctgtgacccagcaactgttctgcggaaggcggctggtggctgcacaggtgactgcgggggtgggtgggggatgcaaaattctgcttcctgggcctggtgtcccccgccttgcatgaggccctgacaagacatcaccgaagcaccaaagccaacccttgtggcccaccggagacctgtctcttggatcacaggggcagtggggaggggcgcccagggctcccgatgcctctgagccctgctctgaggtcagccgatgtggctcagtcctggctgtgaggcctcacgctgccctgattccatttgctcctcagtgcgaggcagacagagcccagcctagggtctggatgggatgaaatgaagacgtctcctccctaacgggacactgtctaccccttccttcttctcccccgagaaccgtcagccccgtgaggatggggtctagggtagggcatgtggacggagctttgctgtttgtccaggtgcttatcttctagggtgccatcgcccctccccactgctgttcccgtatctgctgggtgtccccaaccccagggtggtggaggccgtctctcggatggggctgacacccaaggcacggacctgccaggtcccccaaagcacatggcctctctgcagaagaacctggatgtgacatctaatgcccaggccagagcttggggacagctggactggagccacagggtcaaggagggggagtccagaagcgcaaagtccacccagctgggagggctgctggcaggtcctttacaaagcaggcagctcctctgcccatcggagccggctggcc

SEQ ID NO: 8294 - DNA, 834 bp, Artificial sequence
  DNA replication origin
accccttccttcttctcccccgagaaccgtcagccccgtgaggatggggtctagggtagggcatgtggacggagctttgctgtttgtccaggtgcttatcttctagggtgccatcgcccctccccactgctgttcccgtatctgctgggtgtccccaaccccagggtggtggaggccgtctctcggatggggctgacacccaaggcacggacctgccaggtcccccaaagcacatggcctctctgcagaagaacctggatgtgacatctaatgcccaggccagagcttggggacagctggactggagccacagggtcaaggagggggagtccagaagcgcaaagtccacccagctgggagggctgctggcaggtcctttacaaagcaggcagctcctctgcccatcggagccggctggcctaaccagggcctgctcttgcctgggatgggggcagaagaggtggagacctggggccctgaggcggcactgtgggtcctggacccgcccacctgcactggggtccctgcaggcttttaatgggaacagaaatggaggaagagacagaggctgccaggggctccccgacccctactgcctgcctggggaggggtcacctcagtgtgggggaagcctggggatgtgagagcatcctaggcctgggctgcctgtggccagtctgttgtccgggtgtctagtgacccctggggtaggggcagatgccagtctgggaagccggattgtttgaagaccaactttaaagttgggagcagtgcccagagcggggccgatgtctgctaggtggttgtctctgctttttgaaaaagaagtccccg

SEQ ID NO: 8295 - DNA, 1593 bp, Artificial sequence
  DNA replication origin
gcccgaggggctgcctggtggccctgtaggcggaggggacgcaggccctgagccccccagcagagcagcaaggggccccccagaagcaaagccccacatacctgagggttgagctgtgcttgtggaaacgctcagagcagggcccccgaacccagcctccaggggtgctgcgtgggttagcgctgaccctggacccctcccaggcagacgagaggctgggctgcggtagggcagggcagagtgactgccacattgctgggggaacagtcctctgggaggaggcaggggtccccccccagtccccgccctgagccagcaccccagcttggggagggtcagcatggagcccccaggtctggcagcccaggccgcctgcagcgctgggcctgtagggagggctgagccgggcctgcagctgctccagaggacaggtgcggcagagccggccaggcccgggtctgggtgggatgctcggcctgtgtgcatggggggctgtacgccagggggctgccagagcaccctccaggacgggtgtctgtgactcccagggagggtgtggggcagggatccctcctgcgtcccctctgcagggcctcaggtggtcctggaggaaagcacttcctgcctgcctccgcctccccttgcagggcctggactgcacgctggtcacttctccactcagccctccgtgcccagacctcctgcctggagctgtgggggcaccgacagagcctgggagggcgtctttgtcctccggggctgcaggggacctggtataggaagggatggggtctgggcagagtgagaggccctgccaggctggggcggatgacaggctttagtcagctgtggctgggtcggggccgtggtggggcaggtgatgcttggtggatggtgctgggctggagccggtgcagaccctccagagaggccgcatcccaggaaggcacccgggacagcagcccccaaagaggagtgtcgggggagaagtctttgtccctgttggagggattttctttctgcatcagacagtcccaggaggcagggcctgccagcctcaagagggtgtgctcccccggccggtgagtgcctgagtggagtgacaggagtttgcaatgggtcccccaggtgggacaatctgtgagtctgtaggtgaacatggtggctcccgagcgtctgctgggttatcccgtatcctgcgcagttgagatctgcagccttctggggctggcgtgggaggtgatgtggggtagtagaaggtgccatgccccctctgggtggatgttcattccaagccttgaggccaggtgtccctagcacccactgactcactggcctgggacccattgctttggacacctgctttctgtgttggtcactccagcagcccagggttgaaactgacaccctgtggggttgcccagaggtcggtcagatgaggggatgggacagagcggagttctcacgcccacctccccaccctgaccaggccagcctggcacctcctctccgctcagaggccctgatgcctcttcccctggcccctcataagcctccctagatgctgccccctttgccttcacccagctgcct

SEQ ID NO: 8296 - DNA, 1660 bp, Artificial sequence
  DNA replication origin
gtgaatgtgtgagtgtgggcttgtgtggctgtcttagctcaggcggctcttagcgaatgccacagcctgggcggctcagacgacagccagtcactgctcacggttctgggggctggaggtccaagatcaaggcagcctgggtgtctggtgaggatccgcgtcctgggtgtctcgtgaggaccatgtcctgctgcataggtggcgctttctctgtccttatatggtgtagggggaggaagcgccctggggccccctcatcaggtactggtcccattcttgaggctccaccctgatgacctcatcgcatcccaaaggccccaccactaacccatcgccttgggggtgaagatttcaacactggaatttcagattcagaccccagcactgagtgcatgagtgcacgcttctgtgtgtgcacaagcatgagtgcaagtgcatgactgtgtccacgtgtgtgtgcatgtgaatacctgtgtgtgcaggtgtgtatgcaagtgtgtgtgtgcatgtgaatacctgtgtgtgggggtgtgtgtgcacaagtgtgtgtgtgtgcatgtgaatacctgtgtgggggtgtatgtgtgcaagtgtgtgtccgcgtgcatgtgaatacctgtgggagtgtgtgtgcacgtgtgcacatgcgtgtgaatacctgtgtgtgcgagtgtgtgtgagctcaaatgcttgtctgtgtgcgtgtgtctgtgtgtgcaagtgtgtgccggtgtctgcatgggcatgcagcagtgtgtgtgcctgtgtgaatgtacatgtacgagtgtgtgcctgtgtgtgcatgtatgtgtgcctctgtgtacatgtatgagtgtgcatgtgcgtgtgtgcgtgtatgagtgtgtgtgactgtgagtgtatgtgtgtgtgcctgtgtgagcatgtatgaatgtgtgtgcttgtctgagtgtgcgtgtattggtgtgtgcgtgcctttgtgtgtgcgtgtgtatatgcctgtgtgtgtgcatgtatgagtgtgtgtgcctgtgtgcatgcctgtgtgtgcatgtatgtctgtgtatgtgtgtgtatgtgtgcgtgcctgtatgtctgcctgtgtatgtgtctgtgtgcgtgtgtgtgtgcatgtatgtgtgcctgtgatcatgtatgtctgtgtgtgcctgtgtgtgtatgcatggagtgtgtgtgtgcgtgtatgtgtgtgcgcgtatgagtgtgcatgcctgtgtacgagtgtgcctgtgtatgtgtgcatgtctgtgtgtgtatgtgtgtatgagtgtgcgtgcttttgtgcacgtgtgagtgtggtgcctgtatgagtgtacgtgtgcctgtgtatgcatgtgtgagtgtgcgtgtatgagtgtgtgtgcctgtgtatgtgtatgagtgtgcatgtctgtgtgtgcattagtgtgtgtgcctgagtgtacatgtgtgtgcctgtgtgtgcgtgcatgtatgtgtgcacacattgtgtgtgtgcgtgtatgtgtctgtgtatgagtgtgcatgtgtgtgtgtgcgtctgtgtgagtgtgcatgtatgagtgtgtgtgcctctgtgtgagtgtgcgtgtgtgcctgcttgttccacatggtctctgtgccttggcctctcctggtgcctcttcctcgtttgtctcctttcagcatcacgacccggtgc

SEQ ID NO: 8297 - DNA, 953 bp, Artificial sequence
  DNA replication origin
aaaaaagagctgggaggtggaggttgcggtgacctgaggttgtgccactgccctctagcctgggcgacagagtgagaccctgtctcaaaaaaacaaacacaaaaaaacttgctattttgatcagcatggactctgcataactttactttttaaaatattgattaaaatatcctggcccttgatggctgagttctttggccttggaggtgagtgtcccgctcccccagtcttgtccccaaggcagcagcccctcctgctccattgagtggggagagagaagctgggggcttagtgggaggaggtgcggttggctctgcaggagggcgcaggggaaggagacattaggagggaagaactgcatctttccagaaagttctcccgttgggggttccctccagcctggctcagcggcatgggtctgcttccttcatccgctggcgcagggccatggcacagaggccgctgggcaccgcccaggcagcttcatcttgatagaacgtggcctgacaaggatgcgcctgaggccacagcttggagcaggtagaggaggcagagaagggggaggtgggatgggaacaggggtccctttggctctgggggttggagatggagcaggtggggcccctggtggggaggctgctgtctgcctggtgtgctgacctgggaagacaggggaggtggggacagcattcaggaccactgtcctctctgaggctttcaggggcaggggcctgggcagagccagtgcacaggaccatgggggtgctcagggtttgggtgaatggccacctggatggagagagggccggtggtgccctgaggttcccgtggccaggctggggcctcgatacagactccagactctccacacccgaactggaggctgggggatccctgagcctcggtttccccttctgtgatggagccacacagctgtggagagagagccttcc

SEQ ID NO: 8298 - DNA, 935 bp, Artificial sequence
  DNA replication origin
tccctccagtgaggaagagcagaggtagccgaggcccctcctcgacactccacactgaggttcctgcgggcagaggaccttggacatcgagcgtggggagactccgtccacctgccggcgcattctggaaatgccagcaggccagcctgcaagtggggtcggccggcccgaagccagcagttctcaggggaagtggggggtgctgctgctgcccagtgaccccacacatccgtacttacagtacccacacctggtcccgccttcaaagatgaatccgcttggcacggccccgtagcgccggaggtcagacagcttccactgccccgtgacagccggggggatgtccctggccaagacgaggacatcattgcagaggtgcagggtagccgggccgctctccaacttggtgcctggagccactgtcacatggaacctatgcactgcgggcaggcggggcaagagggcatcacgggcgggcagggtgagaggacatcacgggcgggtggggtgagagggcatcacgggcgggtggggtgagagggcatcacgggcaggcggggcgagagggcatcatgggcgggtgaggtgagagggcatcgagggtgggcggggcgagagggcatcacggtcaggcggggcgagagggcatcatgagaggaggcaacaggggccactgtggacaggtggggtgagagggcatctcgggaggaggcagcaggggcaggggccaggctggggcaggtgggggcagccgcccaggtgtcagccggggaggcagcgacggcaggatgagcaaatggcactcctcacagccacgagggggcctgggggctgcacttctctccttgccatcctcccaggaactatctttgttcaggggcaaggaagtcccagaggggcctgacctcggacctccacctccctcccctcccacc

SEQ ID NO: 8299 - DNA, 954 bp, Artificial sequence
  DNA replication origin
ccctggggctggcaggggccatagccagagtccaaagggccttggcccctctgggattggagagccagtatggatgggcagggccgctgcctatgccagctgtgagctggtgcggggggtggggtggggggtggttcccgggagagctaggacacctgtcggggtcccatctgcccccaggccctccctgcggcaggccagaggttcagtactggggcttcgggagccactggggagtgggttggcggtggctgggcacagtgggtgggcccagcgtccctgtcctttgtcgtgtgggaagccagagctgcaggctgtagttgtcctgacacaggcagcctgtcctgtctgttgtgtgctaggtttgggggtgcctggaggagggggacccataccttcctttctgtctgtggaattccttggcacgggcaggcagccggccggggtggcgccgcgtgctcaccctctaagccggggcacagcaggaggacccgtttccttggagacctgcttattttgtctgggccataatggaatggggacactggatgtttttcctctgaggccgtggaggttcacatccctgccgaggtgtgggtggccccttttccgctggtaaacaatcccacacctggggctgtgcttctccccagggcgaggctactgtgccgttttcctgggctgctcaaaagctgggggcactcttgtggggccgtctgtcttgctgctgcctctccggggcaagctgttagagcagccccacccgcaaacctgcaaaccaggctggccccacagaacctgaaaacctgcaaaccgggctggccccacagaacccacaaacctgcagactgggctggccccacagaacccgcaaacgggggctggccccacagaacccgcctttgcagctcagtgctgaatgttctcgtccccggtggtaccctggcctgagag

SEQ ID NO: 8300 - DNA, 835 bp, Artificial sequence
  DNA replication origin
ggaggttgcagtgagctgagatcccgccattgcagtccagccaaggcaacagagccaggctctgtctcaaaaaaagaagagtaaagaatgaaaacctgaactaggaggctcttgctacatgaacgcggcatctgcccagctctggagagccccctgccggccacctttggccactgcagcctgcgggggcagcctggacagagctggctggaaccctggcctctgtcaggcagcagggagcgccttcagcagtttctcattgccgggcgctgggcctagggatcagacggtccggcctcagaggctgcgtgagactgagtgaggcattttcagtcctcagagggtgcgaggggagccaggaggggcacagaccccaggctgggggcactgcggggaagctctctggaggggcgagcctcaggggacttctgcagggtgaataggagttagctcagctgtcagagggtaaggggtggaggggggtgaaaagggcacttcagacatctttgagcacgaatgggtgtcccgaagggctgtgtaggagccctgttgggggggataggaggcgtgagggtggaggaggaggaggagacagggctgggttgtagagagctggctaattggaccagtgtttgtttgcaccattgtctcggagcagcagggagccattgaaggtgcttgagcatggggagtgttttatatgctaatgttgaccccggggtgcagatgagcttggaggaagaggctggcaggggccagagaaggttctgattgaggtccagaagatggagggcgaggctgccccaggcagcagctgcctggttgggggatggga

SEQ ID NO: 8301 - DNA, 1739 bp, Artificial sequence
  DNA replication origin
caagagagcagaagctgccaggcctctgacggtcttggggcagggctgggagagcatccctcatgccactttatgccagagccatcactggctggcttcgattccagggagggagtggaccagcctctggagaaggagcggcctctgagggcagggataggggaaacagagtggccggctttgctgcagtcacacctgtgtgatatagcaaaatggggcaggccctgttctcccccctttccccaaacacacaggcaaacaggaaacatgcgcaccctgtcttggggaaggggcaggggggcggtcagcagcctctcacctatgtctttccacccaaggccgagcactgggggtctcctggttatgggcgcttgggtggacactgagaccacagacggcttgtgctccctgccggcaaggtgctcagcctggcagccgggacggcagcaggtggggctgaaccccagaggaggcgtccgtgagagcaccacagaggggctgtcggggtcaggggactgaagggggccagaggccaagaaaagcatcatgaaaggtgtcgttatgtggcctgagtctggaaaggtctggggtgttctaggtggccaggggtgtggagggtgggggtggcagcctcctgagtggagatgtaggggtgtggagggtggggacggcagcctcctgagtggagatgtaggggtgtggagggtggggacggcagcctcctgagtggagatgtaggggtgtggagggtggggacggcagcctcctgagtggagatgtaggggtgtggagggtggggacggcagcctcctgagtggagatggcaggcagacctggtgtgcagagggagctttgagcattcccaagaccggggggggctgggtgggagcgggggtggagcatgaacccagggaggcccagcgagagcctagtcgtgcggtgtcctgggaggccatggcccaagaccttggcagaccagcattggagatgggcatcttcctccagggccactgatgtcagctctgctggcatggatgatgggggtggctggcgagggtgtcgcgtgggcacgtgggagcccgaggctggcggtgggctgtgctccaggccttgcccggttgaccgtgtcttcggggtgagtgacgctccgcagacgccgcatggaatgcggggccggctccactccttccgtaatgtggttttttatagtcgggggactcattgtcccgtggccactgccagctgtctgtaagctcaggattagagagcctggcctttcgtgagagctggggctgtgccggctgagcccttcacagggaggggtggaccacggggacagggagcgactgcctggcactgagtgagccagccagcagacagcatgacggccttctccttgcctgcccccagggcctggtgcaggctctcttctgcccaccctacccagcttgggggccccaccccatcacggccctcatgagcctctcggggcatcctcctggatggcatcgcagcgggcattggcctcccctccatgcccacctccaattctgatcaggagcacccctcacccacagtaggactggaagctctatcgggccagaaggtgcacagggggccaggggacttggacttgagtccacctcgtggctgtgtgatggtggacaggtggcgtgccttctctgggcctcagtgtcctttttgctaaagtaggaatggcgctgtcccatgacccggtt

SEQ ID NO: 8302 - DNA, 3002 bp, Artificial sequence
  DNA replication origin
ctgccagcctggacacgaggcaccagctgtgcccacacacctcgactcgccccctgccctcaccatgctggcgtccttgcctcactcccagtctccctccctgcgggggatgagaagcacacccaatgcagatcccaggctgcctcccgcctgccaggccaggcccctcccgtgctcttgggaaagccactttcatctctgctgcgtctctaagctgcctgctctgccttccagggctcccaaatggaaagcagctgtgagtcacccccaggaaggcaaaagcttattgcaaacctgagtcccctcctcctggggcagggcaggaggggagatgaccactgtctgcttggtgccctctgggggacaagcagtgatcagagggcactggccggaccagcacggctcctgcacttggccgtgggaacacaggtcacccatgcagccacccttcggggagcacagcggcccctcctgctctgccagccccttccaccaccacctctccccacaatggcaacagagccagagccaccggcagctgaggaggtgcctctgctcctgggcagccagctcacctgccttagagccttttgtctgggcacagaaggtaaaaccaacatgcagggccttggtctcccccagccacaagctggtgggcaggaaaggattcaaaggctctcagggcagaaccacctttcccgtcagcacctcagaccagagtttagtaaatgtggaaccataagtgaaggaaggaatgaatgaataggtgggagaaggaagaaatgaatgaacagacagaaggaaggaataagcggagggacaaggaaagaatgaatgagtgagagagaaattgagtagggagagaagaaagaaatgaatgagcaggggaagaaggaaagaaggaagctggggtgagcaggaaggaatgaacgagcagggggagcagaggaaggaaggaacaagcaggcgaagaaggaaggaatgaatgagcagggggagaaggcaggaatgaatgagcgggggggcggaggaaggaatgaatgaaggaatgaatgagcaaggggagaaggaatgaaagagcagcgggagaaggaaggaatgagcaggggggaaggaatgagcaggggggaaggaatgaatgagcaggaggaagaaggaaggaaggaatggggggaagggagaaacgaatgaacgagcagggggagagggaaggaattaatgagcaggagtggggagaaggaaggaatgagccgggggaaaagaaaggaaggaatgggggggaaggaaggaatgaatgagcaggaagaagaaggaaggaatgaatgagcaggagggaaatgaagaaatgagcagggggagaaggaatgaatgagcaggggaagaaggaaggaatgaatgagcagaggagagaaggaagaaattaatgagcaggagggtaatgaaggaatgaaatgagtgggggggaaggaaggaatgaatggggggaaggcaggaatgaatgagcgggggggcagaggaaggaatgaatgagccgggggagaaggaaagaaggaatgagcaggaggaagaaggaaggaaggaatgagtggggggaaatgaaggaatgcatgaggggggaaggaaggaaggaatgcggggaagggaggaatgaatgagcaggagggaaatgaacgagcaggcggagagggaaggaatgaacgagcagggagagaagaaatgaaggaatgagcagagagagaaggaaaaaacgaatgagcagggggagaaggaaggaacgaatgagcgggggggtgaaggaaagaatgagcagggggaaaaggaaggaatgaatgagcagagggagaagaaaggaatgaatgagcaggagagaaatgaaggaatgaatgagcggggcggtggggggggtgaaagaaggactgaatgagcagggggtggggggaaggaaggaatgaatgagtgtggggaaaaggaaggaatgaatggaggtaaggcaagaatgagccgggggggcggaggaagaaatgaatgagcaaggtggggaaggaaggaatgaatgagcagggagaaaaggaaggaatgaatgagggggtgaagacaggaatgaatgaggggggaaggaatgagtggggggggcggaggaagaaatgaatgagcagggtggggaaggaaggaatgaatgagcagggagaaaaggaatgaatgggggtgaagaaaggaatgaatgagggggtgaagaaaggaatggggggaggaaggaattaatgagtaggaggaagaaggaaggaatgaatgagcaggaggagaaggaaggaatgagcagggtggtggggaaggaaggatgaatgagtagcgggcggggcggggagttgggggaagaatgaatgagcaggagacagaaggaatgaatgaatgagcagagggagcctgcagcccccacacatgcatggatgcctcctgagctctcctgctggaggcttagccgaggtcccacagcccaggtcagcccccggccctacctccactgcccggcctgcccgcatgtgagaggaggctcagccgcttctccagctgtagggtttccagggcttcctgggccacacgctcctccacagtcgagggtcccgggggacttgggtctgtggcagagagaagactcggtggaggaggtggccaccaccgcccaccctcgcccgcaggcaccaggcccagcctgactcagtggttatccccctctgtggagtggcagtcccctgggagtccccgctcctcccgatgcctcatcccagaggctggccctcaaacgcagacacccacaccacccctatccaggccaccatgcgcccagctgggtccctgtgcccgtggatggccctgccacctgcccactcaccaggaccccacgccggccagacccctccttcctcatcttcctcaccaccgagtttttcaattttctgttccaaaaaatgaccagcccctcccccatccccagggccggcctc

SEQ ID NO: 8303 - DNA, 1233 bp, Artificial sequence
  DNA replication origin
ccctgagagcctttgaatcctttcctgcccaccagcttgtggctgggggagaccaaggccctgcatgttggttttaccttctgtgcccagacaaaaggctctaaggcaggtgagctggctgcccaggagcagaggcacctcctcagctgccggtggctctggctctgttgccattgtggggagaggtggtggtggaaggggctggcagagcaggaggggccgctgtgctccccgaagggtggctgcatgggtgacctgtgttcccacggccaagtgcaggagccgtgctggtccggccagtgccctctgatcactgcttgtcccccagagggcaccaagcagacagtggtcatctcccctcctgccctgccccaggaggaggggactcaggtttgcaataagcttttgccttcctgggggtgactcacagctgctttccatttgggagccctggaaggcagagcaggcagcttagagacgcagcagagatgaaagtggctttcccaagagcacgggaggggcctggcctggcaggcgggaggcagcctgggatctgcattgggtgtgcttctcatcccccgcagggagggagactgggagtgaggcaaggacgccagcatggtgagggcagggggcgagtcgaggtgtgtgggcacagctggtgcctcgtgtccaggctggcagggcctgggaagttcttggggaagggacgtccagaccagcctggggccgtgatggtgcggagggcaagctgccccaggtggccctggaaggtagtcgggatggctgggtatggagcgtggggtgttaggcagggagggtggggagctctagggaaggggaggaggcggggaccaaggtagtggcaggggtgctgagagggaggggcgcaggccgtaggagaacaggtggcagaaggacaggaacggacaaagaacaggagtggatgaggggtagaggggttgttgttggtgaagccaggtttctgctgtaggccccggggcttgggggctggaaggggtggggcgagaccagagagtgctggcctgtgggggtccaccaggcatcagccacgtcctgcccagacccctgtacccccacaactgccttggcttcctgctctgtctcaggggatgaccgcagcctgtccagctcatcctcagaggccagtcacttggacgtcagcgccagcagccggctcaccgcatggccagagcaatcctcgtcgtcagc

SEQ ID NO: 8304 - DNA, 826 bp, Artificial sequence
  DNA replication origin
acgtgtggcgggccacagatgaactgggctcactgctcagcctgccagcagcgggggcccccgagcccagcctgtgcacctgcctgcccgggacagtcgagtaccaggtgcccacctccctgcgggcccactatgacacaccacgcagcctttgcctggctcctagagaccacagccccccctcacagggcagccccggcaacagtgcggccagggactcaggcggccagacgtccgccgggtgtccctctggctggctgggcacgagacggcggggcctggtgatggaggccccccagggcagcgaggccacactgcctggccctgcccctggcgagccctgggaagcaggcggcccccacgcggggccacccccggctttcttttcggcatgtccagtctgtggaggactcaaggtaaacccccctccttgagagccgcagatcccgccccgcggctgcaaaggggctgaatttgcccccagatggcagaggaagtggcgccagcctccttgcagactggtgctctgtgttctgtgggagggaccgggggtctcccggagaggggagctggagggcgcgccctgtggctgccaccggaggaaggggctgacttggggaggtgagttctggaaggcaggggctctgggtccggcaggtcggggtcaccagagccccaatgctcagctgcttcactccgtgtcccccacccctgaggatcaggtgagtgctgcacctctgttggctcgtgccttgcactggggtgccaagggctggaggccctgccgctggccttgtcctccttgggcctcacgcccccttcgggg

SEQ ID NO: 8305 - DNA, 1570 bp, Artificial sequence
  DNA replication origin
aagcctctgctcagccgtgggccgctgtccctcccgcaagcgcccttcagaccccaccataggctcctccagggacttggggcaccccgttaggcacggcccacttcagaggcccaggagaaggtcgcctgcagtgtcagggaactttgctcatctcatctggggcctcccagtggggcattttccaggggcacccccctgcggagccttccccaccagctgcagagagcagggcccacaccctcaaggacgggaaaggaaatcacaggcaccctcggagcagccgctcagctctgaggtcggagcccagacactaccttgcatgggcgtggtactcctccgataaagctctaatagcaaaatagtggggctggactgggcctcagggctgggaaccgccccctccccagatgccgaggcctccagctcccccatgggtggttatgggggctaccaccaggctgggtggtcaaggcagtgggtggcccggagatctgggggctgtggggcaaagggccctggagagaaggcatcaggtatggcgggctggactccctgcaggtgacccaggtcccccagcctgtgtcactcttggggggtagtgtccttgttctcggtggccccccgggcacaggatgaggggaagactgaaggatgcactgacccaggttctctttggtctagggagcggcagcctcagccccaggacctgcgacagcacattcaggtaggcacctggagccagtcccccagagctcggggacaggaaggcgggagtctgggtgggcgcagatggcagccagagtttgactagatggggaggggggagggtggggggcccactgccagcagggaatgtgggcaatgtggtgaaagtggttgttggctgacagtggatgttgggtggcagtgggtgttgggtgacagttgacagtggttgctgggtggcagtgggcagtgggggtgagtcccagcccaggtgtggacagcagggcagtgggtagagggcaggctgctggaggatggactgaaggttgggagacacagactggggtccacgggtccccaagccctgagtgtggacctgttcctgggagggggcatggcaggaaggcagtcagggttggggtccaggagccccagctcagggaggaggggctgtgtcctcagacagcggtgggggcctgtggaggctgggctggtggtgagcgactcggcgaagggcagggcattggtgccctggcaggtgcagttttggggccaggttgggagggagggccaggcagggaggcagtgggaaggtacggatccccagggtctccctagagaagcctggcagtcactggggacagagccctgctgaaggttgggcagggctgagaggctggagatgaggacggctggcctggggtagatgggtggcatcagggccagttctgtgcctgtttccttgtggagtaggagccactgcgggctaaaccttggattcctcaatcccttcttcccaggcaggtggcacctacaggggggcggggtccaggcaggcctggagaggacacccagggtgggg

SEQ ID NO: 8306 - DNA, 711 bp, Artificial sequence
  DNA replication origin
gttcgctcacctgattccatgaactaaagcaaccaacacaattctgccccaaccctgcctggccctgaggccctggggagacccccctcctgcaaatgtgtggtcctagagggctggtcccctcggaatgccaggaccccttcatcgagatgagccacagaacatagcggccaagttctggtgcccaggcaggcacctgggccagcagggacagggccagcagggccagctgcctagaggagggggcatggctgaggggctaggccaagagggggtggtgggagaggcaggtggggtgagggcctggggagagctgagggagcgccggggcctggcgtctggaaagggggccttgaagccaaggggcagggccggggcttgcccacggtggggctggacacccccctgcagcctggtacctcgttttaggattgcatccgttcttccaagtttgctcccaaggttgggcggtgaggggtgagggtggaagcaggaaggagcatgaggcctgactgcagggaaaggggacgaatgttcccaacaccacccggagtcacacgggggctgtaagcagcgctgggccagcagtgtgtccgtatctgtatctcccccaaggccactggctccagggccctcagtgctcctcctcccgtcccctccttgggacttggattttgcttcggcttctgtgagcatcgcttccagtacctc

SEQ ID NO: 8307 - DNA, 1131 bp, Artificial sequence
  DNA replication origin
gtcaggcccctcccctggacaggcaggtgtttcagggaggccgaccctgcagggctgtcacccgctggatcccagcccccacctgaattctgagggctcggagtgtgctgggggtggggaggtcactgtgggtggggcttggctgtgtctcccagccactggctcagggaatggggggggacttgctgtcacctcccctgcctcacgtggctgtgcgttccctcacgaggtcctgatgacaagaatgggaggaggcactggagaacggggtccttcctgtagaacctgggtgcccacggtgcggagccctcaggcctgcagaggaggggccggtgtgcgtccaaccccctaaggtgggagcctgcctcaagtcccacccagccgggcctgtggggtcccctcctatcctgctcctgctctgccctccccagcaccaatggggtgtgcagacagaaccatcagctattaggaagggggtcgggggaagggagtagctcctatgaggggggagagggtgtggggcacctgggtgtcctggaggggatgcagagggagcgtgggcctgtgtgcaggagaggagggggtccctggagcctgcagcaggtgggggtgaccccggaggacagtgagggggaggtgctgggggccaggacaaagcagggctgtgctggcccgggagggttaggtagagaaggtgctgggacagccaaggaggggcggttggtggagagagttgggaaggtgcggggcgaggggcgcagggacagaagagtgggccttggggggcccatgggggggtcggcaattcctgcaggggaggcggcacagtggaggggacagcgcttccttctgctctgtgggtacttggaccaggagtggacagtgtggggggggcctcaggatggggcagcgctgggccaaagatggacggtcaggaacatggagcgggaacttccaaggtgcaggagaggcggagtggggaggaggggctaggcagggtgggcagctctttactgcacaatctttgagatctgtgcccctctcggtccccaccggggcttcacagccgctccccccacaggatccccaggacccgtggctgtggacagcccaggaccagagaggccgcgc

SEQ ID NO: 8308 - DNA, 826 bp, Artificial sequence
  DNA replication origin
tgagcattttgccaggacacggctgtcatccatgcagtcacccccagggtgagagggcggtttgcatcccaggcaccacaaaccatgctcccaaactcctgggcagcagcctctgcctgagatgccacagcagctaccagagctgcctgatgcctggaagcagggcctcagtcagcctggggtccagagcaactctttcaggccgaagggtcagccccggacacctgtgaggcaggaggcctggccgtgggccctgaaaacttcctgtttgcaccatggcccggagaccggccatgcctgctcctgcgactgggagctccctggggaccagaccacgcccaacagaaggggctggcctgccgggggccacggggccgcacagcgcaccgggtttgcggtcagctcctggcgctgtgacctcactgcggggctgccttcctctgctccagctccgacagctgctcctcccgggcccgtgcgtgccgcacccccactctgtgcgccgtctcggtggccatgatgtcgatctgggcgtagagggaggcgccagcccctgaaagaattctgtagtgagcggcagcctgcgccccgagccacccagccctgtgaccctgccctccacaccagtcccccagccaggccctcggaagcatctgagtggggacaccctcaggggatgtggcctggccagggatggagttggggacatttgcctcctggggggaggctgtaggaaaagctccctggccaagggctgctgggtggggctgggggctcagggccctgaggctgtggtcccagcccccaattgtcagtgcctccacgc

SEQ ID NO: 8309 - DNA, 1240 bp, Artificial sequence
  DNA replication origin
tgaacaggaagcctgagctccagcaagctagggtcacggggaggggtggggctgtgccacccaggttgcgtgtctgagctggtgcatgtggccagccccggaggtggacatctcaactctgccaccctaagggcccgacacggctgcagccctggatcagggtgcaggccatgccttgccccaacttgcagctgaaagtcttgtccatggaccctccaggctgagagcccagcccagccctgccctgtctgtcagaatgctccccagggcctttgcgtcgaagcgggagatctctgtcctggccccagctggctccggttgaccctgcatcctgccaccttgacgccaagcgtcctcagcagtcacatgcagagcgggggcgccaggagggccagtgctctgagcctgcccactgagggccccgctgagcagcagtggcagctgcctgccatacccggggcaggccaaccacagactctctgggtccttggtgggctcctgggggaggggcgggggaaggacgggcaggaagatgaaagaaagggacgaatacggatggagccatgcagagcagagagccccatctccaggagcaaggcagggggcccgcccggtgcttcctcctgccacaggggttgagggcatgcaggacgcccaccacctatgcacatagccccgtcacctcacccacccccaagccacagcaccgcaccgacgcaggaggaagccccaaccccgtgccaccaaggaaggcagctctgctcgccccaaccccgagcacccccaggtgaagacatcagacccatgtccaggagcagaaaccaggagagagaaaataggcattgtcagaaacagaacagtcacaatggctctttacatgactggctgtaataggtcccaagaagtggagcggtcaggtggctgggagagtccaggctccgtccccaggtgcagggtggcggtggcccaggcaggacagccgggaggcggggaggggattccgggagtgtctgagccgccagtctcaggagcgggcatggtgccgacagtgggagcgggcactgggtcctggctctgcagggccacaacacccaggtgaagggatgagcattttgccaggacacggctgtcatccatgcagtcacccccagggtgagagggcggtttgcatcccaggcaccacaaaccatgctcccaaactcctgggcagcagcctctgcctgagatgccacagcagcta

SEQ ID NO: 8310 - DNA, 1305 bp, Artificial sequence
  DNA replication origin
aggacagtcgcctgcttggtaccagcatacggaagacaggtgtgtcctcagagccgggagggttttaaatgacagagttgcgactgttccttttggacccctctcctccgccatcctccctcaccacgggcccgtcggcagggcactggcgggcagaggacgcacaccaggtgggcccgtgggactggggttggggctgctccggagagtcgagtgctcagctgcctgctgtcagctatgtgtagcagccctaggagctgctgtgcctccacccaactgctgcccctgggcctgaccccaggcaccccttccccaatcccctcccccgctgctccctgtgtgacctgggcccccggcacagtcccctgccccccacctccgtttcctcctcctgtctcacaggacggtggtgtgaaccaagtgggatactccccactgtggtgggggtgggggtggctgccatcgcacttgttgctgtcgtgagggtggccccagagccctggccatgtctggagtctgctgtagccctgcttttcacacgcgctgatggcctcaggcattgcagcgcccgggttgtctctggtaaagagaggaggtgtctacggagttccttcgttaggcctgatgctctaacacctactcctcaaaactcgttgtcgtcccatttgacaggctcagagagggtgatttgtctggagttgcagagccgagtagtgcagcaaagatttggagtcagggttttctgactcctgagcaggtggtctgttcccagccacccctcttctcccattggcaggcatcagcagacatgtcatgtggctgcgcccgggttaaagacagagggccggcttcatttttgctggtttatgccaccatgttcaagagtctggttgagacgtaagccaagatacggcggcagggactgcctggggaagagagacatggctgaaacaattctggatggttgcgtccccaccagcgtgtctagtgggccattcccaagggccaagaaagagcctgtcctggaggtgcccccaggaagaagggactggctatgcagcagggcagcattcggggcctggaggagacagagtagcttgcagggggcacagaagtgggctaagaaccagctccctcctgcaggccaggcagtgtccttgcagggtgtccaggtctgtggcccaagtggagctgtcttgttttctgccattgcctagtgacctggcagaaaacttagtgggactctaggagccggcgtcccagaagcagaccctgcccacactcaggaaagaggctcgtcctggc

SEQ ID NO: 8311 - DNA, 1738 bp, Artificial sequence
  DNA replication origin
gcggtgggtgggggcggggtagtgggcggggcatcggcaggctaggttttctccgcgcagcgccagtcgcagaggaagatggcgccgcggagggtcaggtcgtttctgcgcgggctcccggcgctgctactgctgctgctcttcctcgggccctggcccgctgcgagccacggcggcaagtactcgcgggagaagaaccagcccaagccgtccccgaaacgcgagtccggagaggagttccgcatggagaagttgaaccagctgtgggagaaggcccagcgagtgagcgcggcccgcggtcggtggagcggggcctgggggcgggggccgtggttggggtcgttggagcggggcccaggggtcggaggcggaggggggcgcagccggggcacctgtgccctacgcgccctgtccttggcacagcctcccccaagtgtcaggtggggcgccccgaccccttctgcagcaggaaaggtacccgtgccggcgacgacgccgtgtgaagcaggtggcggccggcaccccgagggtcagtgtcgccctccccagcctgggcggcctgctgacccgagcgtagggacagaaccaggctagatcacaggtctcctgcctcccgagcctttgcctgttccctcaaccttatctccctatgtggggaaacaagaaaaacaaaatgttgggtagaaagacgtgtccagggacagaaggaatcccagtagcaagcccgtgcttgttcatttgagcgagaaatgaggaggtgaggagatgggatcggtttagagcacataaaacgcgaccttgggaatgctgaaagtcagtcttaacagggcgctcacctgacctctccttcatttgagagatgagggtacggaggccccgaggggaaagggcacccccaaggtggctcggccggtggggccccccgggacaacagcttcctaattggtgcgtgaccctgggccagctgctctcttcattaagatacggttgcttcatttgttaggtgttcctgaaaacacctgaaatgggtgttttcgaactatgccgaccatctgggcctcattatctcatctcaaatgcaggagtcagattagatctctgtctcaatagtccagttttaagcattcctgagtctttgagagggaaagtaagtgatttgcagaataagaaggaacttttggaacgaaaagggagaggagaaacaggtgggggacagacagacgacagacggttataagactgcgtggggatggggattgacgcctgggcatcagctccacaggcccttcctgaactgctcctgggaccagcagtcaagccccaggcgtaatgttcagcctgcggaggtgggaggtgggagaacgctctgggctggagcggcagggcggcttcttggaggaagggattctggaggggctggggacacggctgggtttggatgtgttgatggcctcccagcagcagggaacaggtgtgaccaggagcagccgggatgcagtgctgcctccccgtgcccactgcactgggcatctgttgagtgggtggagtcccccctccccatgaggaatggggagcccgaaatagactccctgaccgattggaggtggcgctgaggaagtgcactcggacccaggaaccccagcggctcccttttgggtgctggcccaagtcttccacctgctctgcagggccgccctggtgcgctccaccttacctccagccacctccagctggtcct

SEQ ID NO: 8312 - DNA, 1563 bp, Artificial sequence
  DNA replication origin
cgtgtgcttcctgcctttgcctggagagaataacaatctatagtccaaactcaaggacaaaaacaaactgctttttggccgtggtggcatgaaaccccaataagtcaatgacaatgctgcatgcttctgaaagccggccagtcagggacagccccacactacagaacaggcccaggcagcaagaaccttgtgcccctgaagtcaggctgaacactctcacttctgaaagctggacaatcctcaatgccaggcttcccaagagactcaatttgttttgctctgagagatggtcctataagcacagttccccttttctctcgtaagcaagatactcagcttcagcactgaccagcctcacaatccgtcctcaccaagtggagggccctccctccgggttcctccacggccgtatctgtctctgttcatacaccttcccctcagcacttagagacacgggctggcatggcgggtgctggcggcaggggtgagaaataaactttcagccctagaggaggagcccaagaggagagcatgccgtcacctggagtctctggtatgtgcctggcacctgtactgattgcattaaccactgtgattttttagaagatgtactagtttgaaatgtataatacatacggagaagtgtatgaaatatgtacaatttaaagataaggaaaaatgcatgcctgtgtgcccaccacctagtgaagaactacaacctggacaccactttggaagcctgtctgtgttcacccgtcgcattctccctcctcccccagcccaggtatcctccatcctttagccatcccctgactttctttagtttcattgcctgtgtatgcagccacgaataaaatattgcttagttatctgggaaaccgggctgtataggaaaagggctcttagaaccccacaccactgtcagatgcaggatcccagaagactctgctcccagtccagcttccaattcctgtgggtttataacgggcctttctagagacactgggggcaggattcacagagctggaacatttgcagttaggaccacattccagatgaccaacagggacatgcttgggggggataggccaatttggactatccccttctaagcccaccaagacctacctgtagctctcaggagtggggtcagggcaaaacatgtatgtggggtaaaacaggtgacctctgattctaggcaccaggagatggagagaagagcaggaacgagggaacacaaggggaaggcaggcacaggtgagaatctaggccaggctcacctggccattctgtcctgaggcttaaaaacatgcaatgatggcaatgacagcatttgatctgtctctggagtcacttcgcatgaggtcattctccctccaccaccctcctgggggattcctttacctcctctcccccatacatcccatattgggaacttgtgcttccagctaagatgcagtaacagactgaatttaccctcttgcctgaaacaactcaacagctggaaaaaaagaaatgaaacgatggctctgaaaatactagaaaagcagcacaggacagaag

SEQ ID NO: 8313 - DNA, 1040 bp, Artificial sequence
  DNA replication origin
catccgggagggaggcggggaggtcagccccccgcccggccagccgccctgtccgggagggaggcgggggggccagcaccccgcccagccagccgccccatctgggaggtgaggggcgcctctgcctggctgcccctactgggaaatgaggagcccctctgcccggccagctgccccgtccaggaggtgaggggcacctctgcccagccgcccctactgggaagagaggagcccctctgcccggccagctgccccatccgggagggaggtgggggggtcagccccccacccggccagctgccccatccgggagggaggcggggaggtcagccccccacccggccagccaccgcgtccgggagggaggcgggggggtcagccccccgcccggccagccaccctgtccaggaggtgaggggcacctctgcccagccgcccctactgggaagtgaggagcccatctgcccggccaccaccccgtctgggaggtgtactcaacagctcattgagaacgggccatgatgacaatggcggttttgtggaatagaaaggggggaaaggtggggaaaagattgagaaatcggatggttgccatgtctgtgtagaaagaggtagacatgggagacttttcattttgttctgcactaagaaaaattcttctgccttgggatcctgttgatctgtgaccttacccccaaccctgtgctctctgaaacatgtgctgtgtcccctcagggttgaatggattaagggtggtgcaagatgtgctttgttaaacagatgcttgaaggcagcatgctcgttaagagtcatcaccactccctaatctcaagtacccagggacacaaacactgcggaaggccgcagggtcctctgcctaggaaaaccagagacctttgttcacttatctgctgaccttccctccactattgtcctgtgaccctgccaaatccccctctgcgagaaacacccaagaatgatcaataaaaaaaaaaaaaaaaaaaaaaaaaaaaagaaagttggaaaggcttcaggattgt

SEQ ID NO: 8314 - DNA, 1087 bp, Artificial sequence
  DNA replication origin
ggcagctggccgggcagaggggctcctctcttcccagtaggggcggctgggcagaggtgcccctcacctcctggacggggcagctggccgggcagaggggctcctcatttcccagtaggggcagccaggcagaggcgcccctcacctcccagatggggcggctggctgggcggggtgctggcccccccgcctccctcccggacagggcggctggccgggcggggggctgacctccccgcctccctcccggatggggcggctggccgggccaggggctgactcccccacctccctcccggatggggcagctggccaggcagaggggctcctctcttcccagtaggggcggctgggcagaggcgcccctcacctcccagacggggcagctggctgggcggggggctgacccccccacctccttcccggacggggcggctggccgggcagagggactcctcacttcccagtaggggcggccgggcagagacgctcctcacatcccagacagggcggcagggcagaggagctccccacatctcagacgatgggcggcctggcagagacgctcctcacttcctagatgggatggcggccgggcagtgacgctcctcactttccaggctgggcggccaggcagagaggctcctcacatcccagacgatgggcggccaggcagagacgctcctcacttcccagacggggtggcggccgggcagaggctgcaatctcggcactttgcggggccaaggcaggcagctgggaagtggaggttgtagcgagcggagatcacgccactgcactccagcctgggcaccattgagcactgagtgaacgcgactccgtctgccatcccggcacctcgggaggccgaggctggtggatcacttgcggttaggagctggagaccagcccggccaacacagcgaaaccccgtctccaccaaaaaaatacgaaaaccagtcaggcgtggcggcgcgcgcctgcaatcgcaggcactcgtcaggctgaggcaggagaatcaggcagggaggttgcagtgagccgagatggcagcagtacagtccagctttggctcagcatcaggggg

SEQ ID NO: 8315 - DNA, 1728 bp, Artificial sequence
  DNA replication origin
tggatgagtgggtggatgggtagatggatggggatggattgataatgaatgaattgataggtgggtgggtgggtggatggatggatgggtggatggatggatgggtaggtggatgggtagatggggatagatggatgatgaatggatgagtgggtgggtggatggatggagagggattgataatgaatgaattgataggtggatgagtgggtggatggatggatggatggggatggatggataatataagaattggtaggtgaatggatggatggggtagatggataatgaatggattggtaggtggatggataatgaatggattgataggtagatacatggatggatggacagggatgaatggataatgaatggattggtaggtggatagatggatgagtggatagatggatcgataatgattgatgaatggatggatggggatggatggatagataaatggattggtaggtgaatggacaaatggatggatggatgagtgggtagctggatggggaatgagtgggtaggtgggagaatggatgacggatggatggatggatggatggatggatggatggggatggatggatagataaatggattggtaggtgaatggacaaatggatggatggatgagtgggtagctggatggggaatgagtgggtaggtgggagaatggatgatggatggatggatggatggatggatggggatggatggatagataaatggattggtaggtgaatggacaaatggatggatggatgagtgggtagctggatggggaatgagtgggtaggtgggagaatggatgatggatggatggatggatggatggatggggatggatggatagataaatggattggtaggtgaatggacaaatggatggatggatgagtgggtagctggatggggaatgagtgggtaggtgggagaatggatgatggatggatggatggatggatggatggatggggatggatggatagataaatggattggtaggtgaatggacaaatggatggatggatgagtgggtagctggatggggaatgagtgggtaggtgggagaatggatgatggatggatggatggatggatggatggatggggatggatggatagataaatggattggtaggtgaatggacaaatggatggatggatgagtgggtagctggatggggaatgagtgggtaggtgggagaatggatgatggatggatggatggatggatggatggagggatggatgatggatggatggatggatgcatgatgaatttctcccttgttcccagcctagtcctagaatatgttgcctcttctcaaaaataaggtaccacaaagcctctggtgatggtggagcaaaggaatagatggtgaatatctcatacccacttcggatccagaacaggcctaggagagactcaggtgggatctgctgctgaggaagggggttggggctgaggttggaggaggagggcagctctaaaccacctcttcctggctctaggcctctcaggccagacagcccccacccgtttctgcagatgcccgcatcatggtcctgaggggatgggggctggcctgtagcctttcccccgtggtgtgtggctatagcggggacatgaagggggtgtgttggggacgtagtgaccactcccttctaccatcagagatcctgcttccccctgccccctgcccctcctcggctgccctt

SEQ ID NO: 8316 - DNA, 1355 bp, Artificial sequence
  DNA replication origin
taacaaaaaaaaaaaaaaaagcaaactgtaccctgaccactttgggcacatgtcgtcaagacctcctgaggctgtgtcacaggcccttacttcaccttggcaaaataagtgttttaaatttattgagacctgtctcagatatcttttggtttacaacctgatggaggagttggcactgatagaagggttttgggtttccagcacctgccttcatgccttacttctcggtgggctcaggactcagaatggaaaagagtcccaggagaccccagtagctcttcaactcttttactctcgctgttttctctcctttacagcagacaccactatctgcaaagggtcctgttcgctgcttctgcctgccaggaagcacagcctagagggcagtgtccatgactgtcctgagtaaccactgggtccccagcatctcagcttcacagctgttccgtaatgaccttcagatggagggacgaggcgggtgggtggggggatggatggatggatgcatggatgggtggatgggtggataggtgagtgggtgggtggatggatgagtgggtgcatgggcaggtatgtggatagatggaagtatgggtagatggatgggtggatggatgggtcaatacgtggatgggtgggtgggtgaatgggtggatggatggatgaatggatgagtagatggatgcatgaatggatggttggatggatggtggatggatgggtgagtaggtggatggacagatggggaatggatggatagatgaacaaataagtgatggatgggtgggtgtatggatggatgggtgggtggatgggtgggtgggtggatgggtgtgtgggtggatggatggatgtgtagatgggtggatggataagtggatggatgggtgaatgggtggataagtagatgaatgggtgggtggagaaatacatgagtgtgtggatgaataggttacagagtaaaatgccaccaccagagcagtgcaacagcgtgctttgcactcagctctgccatggaaaaagtggttccttcccaggctctcaccaggctcacatgggctccagacccctgcacccccaaccagactggggacacagggactgtctgctcagatctgcatccatgcacctggccaacaccaagtgagtcacagggaaccaggtggcctgagagaaggaccgatgacagatggcctcacccatgtcgccaggaggcttgggtcccagtcctgtggccccaccagccaagagcttgtggacattcagaatcaggcttgctggtttaagcccgggcatgcagcaccaacattgtctgcccatgggctctctgggtcgtgccctgcctgactcagtcc

SEQ ID NO: 8317 - DNA, 1500 bp, Artificial sequence
  DNA replication origin
gtgtgtagtttatgtgtttgtgtatagtttgtgtatgtggtttgtatgtgtgtgtggtttgtgtgtagcttatgtgtgtgcactttgtgtgtatactttgtgtgtgcagtttacatgtgtgtactttgcgtgtgtggtttatatgtgtatgtagtttgtgtgtgtagtttatgtgtttgtgtatagtttgtgtatgtggtttatatgtgtgtgtgtagtttgtgtatagtttatgtgtgtgtatttgtgtgtgtggtttatatgtatgtgtatggtttgtgtgtgtactttgtgtgtgtggtttatatgtgtgtgtggtttgtgtgtatagtttgtgtgtactttgtgtttttatatgtgtgaacagtttgtgtgtgtagtttatatgtgtgtgtggtttgtgtgtgtagtttgtgtgtgaatagtttgtgtatcatttatatgtatgtgtagtttgtgtgtgaagtttacgtgtgtgtagtttgtgtgtgtggtttatatgtgtatgtatagtttgtgtgtgtggtttatgtgtgtgtagtttgtgtgtgtggtttatgtgtgtgtgttttgtgtgtgtggtctatatctgtgtgtagtttgtgtgtgtagtttgtgtgtagttcacaggtgtaggtgtagtatgtgccgtgtgtgtgcatgtgggtgatttgtgtgtgtatagtgtgtagtttatatgtgcatgtatagtgtgtgtatgatttgtgtgtataggttgtgtgtgtagtttatgtgtgtgtaatttacatatgcatgtgtagtgtgtctgcctgtgtgatttctgtgtgtagtttatatatgcgtgtgtagtgaaggaatgtgtgatttttgtgtgtatagttgacgtgtgtggtgtgtgtgcgtgtataggatttgtgtgtgtgtggtttacatgtgcgtgtatggtgtgtgccgtgatttacgtgtgtgtgtacaatgtgtgtgatttgtgtgtgtgtggtttatgtgtgtatgtggtgtgtgtgatttgtgtgtgtggtctccatgtgcatgtgtggtgtgtctgatgtgtgtgatttgtgtgtgtggcttacatgtgcgtgtgtggtgtgcgtgattgtgtgtgtggtttacatgtgcatgtgtggtgtgtctgatgtgtgtggtttgtgtgtgcggtttaagtgtgtgtgtagtgtgtgtgatttgtatgtggtttacatgtgcatgtatggtgcatgtgtgtgattgtgtgtggtttacatgtgcctgtgtggtgtatctgatgtgtgtggtttgtgtgtgtggtttacgtgtgtgtggtgtgtgattgtgtgtgtggtttacatgtgcgtgtgtggtgcgtctgagtgtgtgatttgtgtgtgtggcttatgtgtgtgtgtgatttgtgtgtgtggtttgcatgtgcatgtgtggtgtgtgtgtgtgtccccttacacccccttctcacccacctgcaggcggcctcggcgctgcacctgccacactgagcag

SEQ ID NO: 8318 - DNA, 1476 bp, Artificial sequence
  DNA replication origin
ggagtctctgagttacatggacagatgtaaaggggtgtgcacacagcatgtgaggtgggggcttgcggctgtttttgccccttagcacacacctcactcagccatcagtgaagcatctgctgcgtgccggtgaacctctgggttccgggatgggcaatgcctgggacgggggacattccagtgtggagagcatctgtccatggctcacagaacttggctcatgcacctccagctgcagagggccaggctgagatcccacgtcacaggtattccccgcgtggccgggacaccaaggcaggcccgtgcctgggatgctgggcccctgctgatggtcatccagatggccttgcggaccttcctcagcctcccagggcccaggggctgccgcctggcctccccgtgttcgtcaaggtctcatgctcaccagccttcctggcctctgtgctgccactcaggggtgggtgcatccctccattcaaaagtctccttgcacatttaatcccgcttggtgtctcctctgcagaggacctggaataagatggcatgaaaaccagagtgagaagggctatgcgggtgggagagggctgtgaggtggcgggagggggtgtgacacaggtgggagaggggtgtgaggccgacgggaggggggtgtgacacgtgggagaggggtgtgagatgggggagggggtgtgacacgggtgggagaggggtgtgaggtggggggagggggtgtggcacgtgggagaggggtgtgaggcggacgggaggggcgtgtgacacgtgggagaggggtgactagttttgggaaagtggccagggaaggcctctcttgaggaggctgtgtttattctgagactcctgtccaagtgatggaacatgggaacagaaaaccaaatactacatgttctcgcttgtaagtgggagctaaacattgagtacagatggacacatggacactggcccacttgagggcggaggcgggaggagggtcagcatagaaaaaccacctgttggctgggcgcagtggctcctgtctgtcatctcagcactttgggaggccaaggcaggtggaacacgaggtcaggagttcaagaccagcctggccaagatagtgaaaccccgtctctactaaaaatacacaaaaaaatttagccaggtttggcggagggtgcctgtaatcccagctactcgggaggctgaggcagagaattgcttgaaccaaggaggcagaggttgcagtgagccgagatcgtgccactgcactccagccttggtgacagagcaagactccatctcagaaaaaaaaacaaaacaaaaaacaaaaaacaaaaaaaaaaaacaaaaaaaaaccacctgtcggtacaatgcacagtgcctgggtgatgaaataatctgtacaccaagaccccgtgacacgcggtttacccgtgtaacagacctgcacgtgtatacctagaacctcaaatagaagttgga

SEQ ID NO: 8319 - DNA, 1121 bp, Artificial sequence
  DNA replication origin
agatttgagcagcattatctaggtaattggaggttagaaaatactagcattatcagtcagtgtactgatggtattttcatctaccacacagacgggagttgcagaaacctatttatgtattgttacagggactccagatcttagagtttggttttgagccctcgaccccatatagaacttgatcctgttcctttcatgcacatctataaaccccacccagggggttcaaatgggttttgcatttatcagacttctccatgattggcatagtcttcctggtgagacctggagtgtggctcccagacacccaaacttggctggagtcctgaagcaggcgcagctaatctggctgatctactccttcacactcgtggagcagatggggaaacagaccagaggggcagcccaggaagcaaatttggatgatccaaatctcaaagctgagttggaatctgtggacaaagcttctaaagtcatacgagtgatgtgtggtgtttggatggatggatggatggatggatggatggatggatggatggatagatgggtggatagaggatggatgatgggtctttgggtagatgggtagatgggtggatggataggtgggtggaccacagtctgatgggtagatgggttgataggtggttgtttgagtaggtggatagaatggatggatagaagttttatgagggtatgggtgaatggggagtagtggataagtaggtgaagcagtcaatgggtaagtgagtgaatgtgtaggaggatcatgcatgaatgggtgagtggatgtcatgggtatatgggtataggagaggtagataagtatgtgtacagatgggcaaagggaaggatgtgggcgtgttatggggtggttgggtaggttgacggatggatgggtggataagtattgtgttacatgggagaaaacaagtttagttaggttgatgggtgaatggatgagtgagtagttggatatagacatggaagctggctagctgggtggatggatgatgggtgagtgaatggatgggtgggtgatgaaagaaagggaggacggatgggtggatggatggatgagtgagtgaatgaatggataggtgggtgaatggaataggtgg

SEQ ID NO: 8320 - DNA, 1611 bp, Artificial sequence
  DNA replication origin
tgagggaggaacggtctcctggcagagggcctggatgcagggcagagtgaaaaattgtggccaattatgccatctgccacaccggcctgagaagttggactgcatcccagggcagcaggggccatcagcaagtgacagggagctgggctgcagggaggtgggaggccgagaaacctgtcggaggccactgtagttcatcgtccaggagagagatggcagaggcctcgatccgggggcgggagagagggcaaaaggccacagaaagaagagtttaggaggcagaaccttaggcctggaccctggctgtctgccagccggtggttcaggataagttcctggtgactggctggagaagctgaggatgggaggggcagagcccaggggcagagtcactgggtaggggagccctcctccaacccagactctggcccgtgtggctgagactccgttctgtgttgtgtagtgtgtgtgtgtgtgtgtgtgtgtgtgtgtgtgtgtgtgtgtttacagcagtatgcgtgtgtgccgtgtgtgctgtgtgtggtgtgtttgcatgtctgatgtatgtgccgtgtgtgctgtgtgtggtgtgtttgcatgtctgatgcatgtgccgtgtgtgctgtgtgtggtgtgtttgcatgtctgatgcatgtgccgtgtgtgctgtgtgtggtgtgtttgcatgtctgatgcatgtgccgtgtgtgctgtgtgtggtgtgtttgcatgtctgatgcatgtgccgtgtgtgctgtgtgtggtgtgtttgcatgtctgatgcatgtgccgtgtgtgctgtgtgtggtgtgtttgcatgtctgatgcatgtgccatgtgtgctgtgtgtggtgtgtttgcatgtctgatgcatgtgccatgtgtgctgtgtgtggtgtgtttgcatgtctgatgcatgtgccatgtgtgctgtgtgtggtgtgtttgcatgtctgatgcatgtgccatgtgtgctgtgtgtggtgtgtttgcatgtctgatgcatgtgccatgtgtgctgtgtgtggtgtgtttgcatgtctgatgcatatgccatgtgtggtatgtgtggtgtgtttgcatgtctgatgcatgttccatgtgtgctgtgtgtgttgtgtttgcatgtctgatgcatgttccatgtgtgctgtgtgttgtgtttgcatgtctgatgtatgtgccatgtgtgctgtgtgtggtgtgtttgcatgcatgatgcatgtgctgtgtgtggcatatgatgtgtgtggtgtgttgaatgtatgatgtatgtgctgggtgtgtggcatatgccgtgtgtggtgtgtgttctgtgtgtgttgtggtgcatgtatgaaacatgtgctgtgtgtggtgtatgtgatgtgtgtggtgtgttgcttgtatggtgtgtgtgctgtgtgtgtcctgtcatgtgtgtggtgtgttgcatgtctgatgcatgtgccatgtgtggtgtgcatagtgtgtgtggtgtgtttgcatgtatgctgcatgtgctgtatgatgtctgcatgagtgtgtggcatgtgtgttgttctccatcagagcacccctttcctcagggattggggcatttacacccctagaatagaccctccatcccat

SEQ ID NO: 8321 - DNA, 1898 bp, Artificial sequence
  DNA replication origin
actgcagcacgcttagtgcaggcgttgtgcctcatgggatggtgtctccttggggatgtatgtcccaggcaggtgccccaggatggctcaaagggagggcctagagcagagttgacagcctttcaagtgggacccaccaggaggtgtcacctccagggctcattaaagcgtgtccaggctctcagatttccttggaaaccagaaactaaaggcaaagttgggggaagggtcttctggcatcttcctgtgggagcagatgtgggcgggagcagcttccccctctgccgcagggcttcgccactcccaccctgccgcctccctataccccgcagccttcccactcccctcccagctctggctcaggctgcccttcttcttgctgattccttgctctagtgtagggtttctccagtggctctccacgacacgcccagggtgacatgccagtgtgtgtcaccagagctgcccacgcacagccctctcagagaaagcagttacagcgagcctggggggtgggccctgtgggctgtgtgggggagggcgttagcacagtgactgtgaccagcaggcaggatgggtgggtggaggcccaggaggaaggagaaaggagcagggagcagcaagacggggggagcagcatgggagtgggagaagctgagcgtgggttctgggagggatggggaggggcagcctgggagggggagaagctgagtgtgggttctgggagggatggggaggggcagcctgggagggggagaagctgagtgtgggttctgggaaggacaggggggagcagcgtgggagggagaagctgagcatggggtctgggaaggacaggggggagcagcgtgggagggagaggctgagcgtggggtctgggaagggcaggggaggagcagtgtgggagggagaagctgaatgtggggtctgggtaggacagggaggagcagcctgggagggggaggctgagtgtggggtctgggaaagacaggggaggagcagcctgggatgggggaggctgaacatggggtctgggagggatggggggagcagcctgggatggggagaagctgagcgtgggttctgggaaggacaagggcggagcaggtgggagggagaagctgaatgtggggtctgggagggatgagggaggatcagcatgagaggaagaagctgagcctggggtatgggaaggactagcggggagcagtgtgagagggagaagctgagtgtggggtatgggaaggactggggaggagcagctgggagggagaggctgagtgtggggtttaggaaggactggggaagagcagctgggagggagaagctgagtgtgggatctgggaaagactaggaaggagcagggtgagatggggagaagctgagcatagggtctgggaaggacaaggagaagcagtgtgggatggggagaaactgaggatgaggtctgggatggactagggaggatcagtgtgagggagaggctgagtgtggggtctgggaaggacagggaggagcagcgtgggagggggagaagctgagtgtggagtctgtgaaggaaagatgtctgggttggatttcttcatggtgttccctgtaaaccgcagggaggtttaatgaggaaattgacagtgaagaactacaattcctcaagtccctcagctctgatttggcttcctttgaagggaagtctgtgcatggactgggccatctggacccctggagatatttgggttacagtgccaggccctggattgaattcctatttagtagagttcattggttactcacagccacctctccagcctcccccgacttagatccccatcaagctgttgctagaattacaccccagcctctttgcagatgctgcttgcccctgcttgcctggccagaac

SEQ ID NO: 8322 - DNA, 1288 bp, Artificial sequence
  DNA replication origin
gtccaggccagccctgcctcctattcacccacagaggggctggcatctgctgcttctcacggcctcagttctggatggctgacagccactcagtcccctccaacctccagagcatgctcaggcctcagagccacgtgcttcctgtgccctctacctggaatgcccttcgtgcttcatgtctccctcctctcctcggttgccgcctttttcggagaggccctccccaccgcctcacccagaagagaagcccgtttctccctccaggacccagttctgccttacgtgtagcacttatcccctgacgtgcaacagctctttgttgatgcttcctgttcgtctcacccagctagaatgcgtgctcctctgtctgatttgttcctgaggtgtacccagcacctcagtcaacacctggtgttggtgagtgcttgctaagtgtttgttagtgaatgcatatttgttgaatgaattcgtgggtggctggatatgtggggaagagatggaaggagggttcaggaggtggcctggatagttggaaggggtggacggatgacaggtgaagagatgggtagatggatggggggcagtcactatggatgcttgcctggggtgttggatggatgggtggatgatggggtgggtggaggaatggtttggcacgtggatagctgatagactgatggacagatgggtaggtggctggttaaatgcatgggtgatgtgtgaataggaggatcagccagactgacagacggctggtggattagttggtgtgtggttgtattactgaagaggtggtttgggttggggtggatgggtgaatggattcctggttgaataaaggggctgatcaatgaatcttttgctgattggatggaggtactggttgctattggattgatgtggcaagcaagtggataactagttgctaagtgtgtgttgggtaaatgaagggcacgtgggtggtaggttgacaggtgggtcagggtgagtggctggctggatgtgcatggagaatgggtacgcaggtagctggatggtttgatggcaatgaatggctagtgggtaggaggactgttaggttgggcttgtgggagatggtgggtggcactggaggagctgggcgttggccggtgtgtgtgtagatggatggtgaggcggctgcactggcaggtgttggtgtggggatagactcatggaggatgaatggccgtgtgtagatggataatgagggggatgcgctggcagctggatgaatggtcatgtggctggctggctggactgagcagtg

SEQ ID NO: 8323 - DNA, 840 bp, Artificial sequence
  DNA replication origin
tcctacacatgcttcagggccctgctcaagtgtcgcaaatccctcccaaaggctgaggataccgcatctgagaaatgggcttctgagcatgtgtcagacatggcccaggaggcatcagccagggcggggctcgggggctcctaggagctgctcctagctgctgtgccctgcctgctggtcacccgtcctgcactaggcgatagggttctggagggcagcaggaccatgtcataggaggtgtgaatggggctttgctgcaggctgtgggcggggactggggctcctgggggccgaggcacatggcaggcaggggaagaagctggggcggggtgcagagggtggggagagagcactctcccggcccaggcctcacccggaaatgggaggtgattttccagcacaggcagcttctgggcttagaggctggacgttgcctcagtgagctacgggcagtgttcctcctggggtggggtgggaggggggtcttatggcccctggggaccttggggccgggtggggtctagtgccctgggagggtcccagtgtgggagaaggaggggtcggggggtggtttaggcatgtaaagggtggagatgcccctgtaagtctggagctggcagcccgggtgtctcaactgcagcctttagggccgcagtggaccagcaaaggcttcacctccctggggaccccagcagagcgcgaggcaggagcccctgtaggccttgatcccacttttctctgggcgggcccgcggcagcagatgtttgatgagccggagatggggagcctgccttgcatggccttgccctgcctgcatgggcgctcaccctgccccaccct

SEQ ID NO: 8324 - DNA, 875 bp, Artificial sequence
  DNA replication origin
gtgggagaaggaggggtcggggggtggtttaggcatgtaaagggtggagatgcccctgtaagtctggagctggcagcccgggtgtctcaactgcagcctttagggccgcagtggaccagcaaaggcttcacctccctggggaccccagcagagcgcgaggcaggagcccctgtaggccttgatcccacttttctctgggcgggcccgcggcagcagatgtttgatgagccggagatggggagcctgccttgcatggccttgccctgcctgcatgggcgctcaccctgccccaccctccaggacactccgtggggcatcactgctgccccgtgaggatcccccttgcggggtggaggtgtgtgaggagccgtgtctggggcctcagaagatgctggtcccctgccctgtctacacagcctggctgtcctggggggatggggagacaggacacaggccacgggtctgtgcgggctgctgtgcgtctggggagagccagcaccccgagggaggaggtggctgctggggagcaggatgaagcaggaaggggtcaccccactgaatggggtgtgggtgcagtccattcgtcctgaagccacacatgcctggtttgtggcctttgactcatgctggtgatggtcaccgtgtgtccaggacagagcctggaagattaagagcgtgtttaatttttaccactggccggtgatgctggtgttttcagaggggaactgaggcctgtggaagggaaatagctgaccgggggcagaacactgctggccagtgacaaagggagggacctacaccggctgtgtgcctctaacacgcgtcctcccacgtggcaccacccacagcgaccccagcccccttgcctttcttca

SEQ ID NO: 8325 - DNA, 1263 bp, Artificial sequence
  DNA replication origin
ttctgccgggcgtcgggctgtatgaaggcccaaggggtgaacagatcaaaggaaggcacagtgtttgctctgagtctgcagcctgcctggggagtcaggatgctcacacggggcccagctgcctgggatgtccatgttcagtgccaaattgtgaggttgggatataaacactggccccatcccggcctctgcaataggtggggggcatatattatttattttattgaattttcacaaccacctcgaggtgctgtgaaatttttccctgactttaaagatgaagaaacaggtccagagagaggcacagtgacttgcaccttgacatgcagccagaaagcagtggagccaggattccagccaggtctgtctgaccagcagcaccgctccggctactgctggctgtgcagttagtccacgaggatctagggctcctcgggaagcccatgggaagcctcgccttggtctaggatggatggcacaggtgagccagggaaggtgagtgaccgagtcagaggtaagaacatctggggtattttcagaacgttttccataggtgatgcagctttgctaagtgcagagtcgggtataggctttggtagcaaacggagtttatcgtgggaggcctggaatgcaggcctctgggtggtggttggcgggtcacggggagctcagtaaggttctagagcagatgctgatgtggttagactcaaagcctaggactgtgggggatgaggagtacaggaggggccggaagcaagagctcagctccttccgaagggtgccagtgctcagggaagaggctggaagacagcgggtgaggagtggcttagggggcacctgggggcttgcgactgatggcatggggtgggaggagggaggggctggcaagatgtggctaagaagttgagtgggagggagaaggaggaggccaggccccaggagagcaggctgtggaggagcaaaagggcctgggagggaagaggggctcaggcgggatcaggaaagctgaggtttgtgggcacggggctccaggtggaggacccccgggagattcagctctggaaggagggtggacgggaagaaggcacaggagagagacaagatggaaagagggtggaccagggacgagccgggagtctcaaagccatggggtcaaatcagttagcctggggcagacgctagggcggccaacgctgagaacgtcatgtggaggaatgggagggaagaggccctggaaacagcagagaggggcagagagggggc

SEQ ID NO: 8326 - DNA, 1159 bp, Artificial sequence
  DNA replication origin
gcgcgggctttgctttgccggacgggaagtggccgagcctcgtttatgaaaacagtaccaggagaaggctaaacgtgggccccctgcccagggcgagggactccaaggcatccagatggacttgcttggcctgagctttgggaagtgttctcctaaatggtgcttgggcaccttccattttcccttccattttttcccactctggaactttctacaaatcttctccccggcagctgggcctcactgtagtgctcgggtcttgcctttgtctctgcgctttatctcggtacatttttattccactttctgggacatcttcacctcctcttccaatctttttctttcttgggtttttagaactctgaagacgcccagcaagtgggtggtgcgtggaatgaagcggtggctcccgcgtgcttcgtgcgggtcggtttccggggctctcgcgtgctccgcgttggtcggtttccggggctctcgcgtgctctgcgcgggtcggtttccaggactaccgcgtgctctgcgcgggtttcggggactctggcgtgctctgcgcaggtcggtttcctgggactcccgcgtgctctgcgttggtcgatttccggggctctcacttgctccgcgttggtccgtttccggggctctcgcttgctctgcgtgggtcggtttccaggactctcgcgtgctctgcgcgggtgtgcggggctctcgcatgctctgtgtgggttggtttccgggactctcgcgtgctctgcgcgggtttccggggctctcacgtgctctgtgagtcggtttccaggactctcgcgtgctctgcgcgggtgtgcggggctctcgcgtgctctgtgtgggttggtttccaggactctcgcgtgctctgcgcgggtttccggggctctcacgtgctctgtgctcttctccaggcatcttcttcttgtcccaccgtcaggatgccgtgtgcctgggagagaggattactttccaggctgccccacagaagcgccattgccaccttcttctatcctcctccgaaggtttatttggtctctgtccttcgggttggggggtttctccatattagtttagttccggagctggctggaccctctgcgggttccaggcccgtgttaagggaaggacatcagtgtggggacggggg

SEQ ID NO: 8327 - DNA, 1209 bp, Artificial sequence
  DNA replication origin
gtagtgaactgtacctaactgcaggtgtacagacgtgacccactcctgcagcaaccaagccggctgtttctggacgtcacctccatctctgtgggcaaatgctatccaaccgcggggccaccctggagtctctcagaacctattccgcccccaggggctgcccagctgagaatcgttccctcctcaatcagctttaatttgcctgaagtttttctctgaacaagtgcaacaagggaggatcagcctcaggggagggagggggacaaccctggggagggaggatcagccccgggggagggaggatcagccttaggggagggaggatcagccttaggggagggaggatcagccctgggggagggaggatcagcctcaggggagggagggggacaaccctggggagggaggatcagccccgggggagggagggggacagccctgggggagggagggaagatcagctccaggtgactgaagacccttggcctccttccggtgctgcccagaaccgggctccttatccagctgggggaagggatccatttggacccttctgtcttcaggaggtagtggggacagacttggtgacagggtggacaggtgagggttcaaggaggacaagaagagccccagcaaccgcagggcagccagactctgaggggccacaagtccagttgccccaggcaccggctgccgtggcacattgtgaaaggctgagtgtctcccgactcagagaagctggtcatgaagacaccagagccagcagaagggatcacgtgccacccagcatctccacagaagaacgggtcacttgggccctggccctgggtgcccatcacagagaaggaagcagggcagctattggtgggcaagtgtcccccggtagatggagccatcctgcccccaccatcctggaatggaagggtcatcagacttgggtttgaggaagaccatgccgccagtgccgcatatgtcagaggggccaaagtgagggtgagacttaggtgagtggtggggtcacagagaggaaggggtggggcaggcctgtgtcctcacaggaccctcgtggggtgtggcattaccctactccacagacctcaagacccagggccagaagcagtgagcaaccacccacggtcaccaccgaatacaaacgcggggcaggggcaggcttcatgcccagcacccatgcaccacgccccacactct

SEQ ID NO: 8328 - DNA, 1316 bp, Artificial sequence
  DNA replication origin
gtgaggagtgaggaggtgaggagtgaggaggtaagaggtgaggagtgaggagagaggatgtgaggaggtgaggaatgaggacgtgaggagtgaggaatgaggagtgaggaggtgaggagtgaggagagaggatgtgaggaggtgaggaacaaggaggtgaggagtgaggaatgaggagtgaggaggtgaggagtgaggaggtaagaggtgaggagtgaggaggtgaggaggtgaggagtgaggaggtgaggaggtgaggagtgaggaggtgaggaggtgaggagtgaggagtgaggaggtgaggagtgaggagttgaggagtgaggagttgaggaggtgaggaggtgaggaggagggaagttgaggaggtaagaaactgaggagtgaggagtgaggaggtgaggagtgaggaatgaggagtgaggaggtgaggactgaggaggtaagaggtgaggagtgaggagtgaggaggtgaggagtgagaaggtgaggagtgaggagatgaggagtgaggagagaggaggtgaggaggtgaggagtgaggaggtgaggagtgaggagtgaggaggtgaggaggtgaggagtgaggaggtgaggagtgaggaggtgagaagctgaggagtgaggatataggaggtgaggagtaaggagtgaggtgcctggcaagggctgactctgcaaccatttctgtggtctccaagtacctgctcctcaccttgtttctttccctgaaactctcaggctgcccgcacagcagaggcaccccaaccccttcccaattctgtccctggcctggtgctgggatggcaggacctgagctttgtggcctctgaatcccaggccccctggactttgccctgcagtctgagcctgggtcacagggtgccctgaaaggcctttccccaggcagggcggatacgtgggtgccagacaggtcctgatgagccccaggatccccgctggcctagcccggccttgcgtggtatctgctatgggcgtccggaagggtccggagttatgggtgcaggggatggagcagaaacggccatgacagagaggatggagatgtggggttcagagatgttggagggggcatgggctcagggcagcctgggcagaggtttcgggacgcatcgtcctccagacagcatctccgcgtcgcccatttcccgtgttaggaatccacagattcattgatttcaccagcatctgctgtttaagaagcaagctctggactggactggatttcttggccacttcctcatctcggtgcagcggagaggagaggccagactcaggcctgatccagctcccct

SEQ ID NO: 8329 - DNA, 817 bp, Artificial sequence
  DNA replication origin
tcagatccgcagaaatggagacgggccgcctgaccacctagccgtggtgggatggagggtagggggagcctgggatgcagtgagcccccgaagtgggtgtctgcctgcagtgaggctagcctggggtgaggacctgtgtggcttcaatcccctggggaacacgagccggactgggaagggaaggagctccaggagcggggatgccagccagtccccaggggaactctggggcagtgcaagttggacatcggagtgtccccactgatggcagcagccagggcgttgacactcctgccccttccgccactggcccggagcaggggtgcctctggccctccagcgggcaggtgaagcacgttccccacagaggcagcgatagctgtgggggaggtgcacagctggggtccacgcacggcaccaggacctggagaacacaggcgggggactgagctgccgaaaccgtgggtgacagggaaaccccgaatgatcctgatgctgtgagaggtttgaggacaagcatctgagggcgcaacaccatcccatctcacaacagcaaggaaaggggcatgagtgggtctcggggaggagcggctgggccccaaacatcaagttcaacacgcttcctcggtgtccaagcagggtgtcaggcgtgtaggcggatggtgcatctggagctcgaggcgccgctggggctgttggggtgaacggtgatcggggcgggtggaggaggtggggcggcgaggagatggaggagcgagggcagtggagagaggatgagaagcacaggcgcggccaacacgaagatcaggggcacgtg

SEQ ID NO: 8330 - DNA, 1269 bp, Artificial sequence
  DNA replication origin
gagtgccaacactcctgagcactaatgcccctggggccaggcaggaaccttggaaggggaggtgcgggacctgggatgggcccggcctgcagcctgctcctggctgtggtggccacttcctgttcctctgggcacccccgctttccctccagtgacaaggttgacggagactgtctcccggggctcctgcgaggatagaagctgctgtgcttggaatgggctgggcatccccagtgcagagggaggactcagcaaagacaaagatggaggtgaaggagacgatgatgaagctgaaaatgctgctgctgctgctgctgaaaagaggataagaatgatgatgatgctgggaggagtggagggggagggggggaggtaggggaggagtggggagggtaaggaggagggggaagagtggaggggaggaggggagggggaggaggagggggaggaagtgggaggaggaaggggagaggaaggaggaggggaggagtggaggaggagggagagcaggagaggatggtggcactgatgaacaggattctggggctgggccgggtagcctgggtctgtgccccgcccaggagggcggatgggcaggccgacaggcggatggctgggcaggtgacaggtgggcagtctgtactaggttttgggggaaatttctggaaggtccctcataggaggcgctgctccttgcagactgggcagatgggttaggggtgagctgcattttgattgggttgagttaaaatgaatggaaataaatttggatctgtattgagttggatctggactgaattgaaatgaaataaactgaactgaattaaatttgaggtgagctggcctaggccaggctggatggatttgctgaaatgggagcctcagagttgagtttggaatctaagagcgttccagcccttagtaatcctcagctgcgtgggacttggcccttcctgatgcgatggcctggggcaattgttctgtttgtggggtttgctgccagcctcacctctgtaccctccctggaaccctcccaccccaccttcagtgagcggtggaagcggcaaggcccccgtacgtggccgtggtagttgtagggtctgtgtgcctgcatgcggatgtgtggggctgtgtgggatgtgtggggggttgtgcatccgtgtgggggaggcacttgtgagcaggtgtacctgtctgcatgccagcaggggctaggaaccccttcttcttctgagggatgaataccagggcctctgcattttggaggca

SEQ ID NO: 8331 - DNA, 981 bp, Artificial sequence
  DNA replication origin
ggcctcagctctgcactccccaccccttcccctgcagcccctgcccctggagtcagcactgagctccccccaggaggctggaccaaggatgctgccggccttagcggaaggagggtcaccccacggggagagataggagcagaggcagatgcaggagcgggggaaaggaagagtgttgggcaccaaaatggggggtgcctgggagggacccgggcatcataacgggcgccctcccgtcgtatgggcaacctcttattttttggatggggaaactgaggcccagcttgggagaggttcacccagagtgacacagtcagtccgggcagtgggaggggggtcagtccgggcagtgggaggagggtcagtctgggcagtgggaggggggtcagtccgggcagtgggaggggggtcacacagcagaagcatctcctgcagcccaaacaccaagcaccccagagcccctgagacctgggggccacgggatcgcggccgagggagactgaggccagcctggaggtcctctcctgccctcgggagatgtgtggctgggcaggcggctctccttctccaggcctgttctgtcatctgcaagtgggcctcctaattgtgcaaataccagcaggcggtctgagttgaagggagctgggagtgccccacaggtgctgatctgtgttacgtgttacctcccttcccccagggaacccaccaagaactccggcaggcgcaaaggcagcggtgcaggaggaaccagggttgtgaggctgctaacgccagagctcgcctgtttctgtagcaacctggagctgcgactcgcttctggaggggacggtggggctccaggatgacctgggatggggggcgcactaaggcgaaaagagggccaggacccagcctcccccacacagccccttgcagcggaaccctgatcctcccattcctgaagagaccccatgatcaaagcagctgctgctgcctggagat

SEQ ID NO: 8332 - DNA, 1330 bp, Artificial sequence
  DNA replication origin
tactcagcctttctgctctatttgggccttcaactgattggccgaggccaatctgctctcccacactggcgagggccatctgcttgactcagtttgcccattcaaatgtgaatcccgtccaggggcacctcacagacaccgccagagtcatgttggaccaaatatctggacacattgtggctcaatcaagttgacacgtaaaattcaccaccacgttcacaaacccaaattgagagccgctgccgccgctgtgggcctcactctgcagtgttgcctcagtttccctggctgcacagtgaagggcacgctgtgtgactccagcacaaaccccagcacccctgggatcagcaaatggcaggaatgactgctccagcagtgagagctgaggccggggtcacagcaaaccatggacacagaccctgcttggactgccatggcactaccccaggctctgcccagctccttccctattctgtgctgcctgggcctgtccagcagtctcggtgtgtgtcgtgtctgtggggtgtatgtgtgtgtctgtgtgtgtgtgcatgtgtgtttgcatgtgtcatgtctgtggagggtatgtgtgtgtgcatatgtgcgatgtgtggatgtgtggatgtgtgtgtgtgtctgcatgtgtctctctgtgtgtgtgcatgtgtgtttgtgagtgtgtgccatgtctgtggagggtgtgtgtgcatgtgtgtgatgcatgggtgtgtgtgtgtctctgtgtgtatctgcatgtgtctgtgtgtgtgtgtgcatgtgtgttcgtgtgtgtcatgtctgtggagggtgtgtgtgtgcatgtgtgtgatgtgtgggtgtgtgtgtatctctgcatgtgtctctgtgtgtgtgtgcatgtgtgtgggtgtatgttatgtctgtgaagggtgtgtgtgtgcatgtgtgtgatgcgtggatgtgtgtatgtctctgtatctctgtatgtgtctctgtatgtgtgtgtgcatgtgtgtttgtgagtgtatgtcatgtctgtggagggtgtgtgtgtgtgtgtatgtgtgatgtgtggatgtgtgtgtctctgtgtgtgtgtgtgcatgtgtgtgtgtcgtgtctgtggagggtgtgtgtgtacgtgtgatgtgtggatgtgtatgtgtctctgtgtgtgtgtgcctgtgtgtgtgtcatgtctgtggagggtgtgtgtgtgtgtatgtgtctctgtgtgtgtgtgtgcatgtgtgtgtgtcgtgtctgtggagggtgtgtgtgtgagcatgtgcatgtgtgatgtgtgtatgtgtgtgtgtctctgtgtgtcagtgtgtgaatgcacacagct

SEQ ID NO: 8333 - DNA, 1563 bp, Artificial sequence
  DNA replication origin
tggaggcatggcctgggaatctgcatcctagcaactgcaggagtccaggtgcatacctgtccgagggcccctgtggcttcagtgctcactgccatgcacaggtacatgaaccaataccaagctgccacatgcagaaagtgcccagggccatcagatgcaggtggagtgctgcctaccagagtggcagacatggtcctgaggatgggcagtggccacggcggggggcggggggaatcatgggcagagatgactctcctaggcagaggaaaggccaggagctcaggtccagaggtgggtgctgggtagagagtcaggtgggggctgggtggagggtcaggagggggcggggtggagggtcaggtggggccgggtggagggtcaggtggtggctgggtggagggtcaggtggtggctgggtggagggtcaggtgggggctgggtggagggtgggggggtatggaccgttaagtgggggcaggtgaagcctggggttagtccattggtgcaactggcttctcttgcaggaactgggggagaagagggttcctgaaaggaaggtgcaggtgagagatgggctctggggtgtggccacagcagagcccatggtgaggggcccgtgggagggtctccctggtcttgctgcaactccagtctggcttagctgactctgcagatgaccctgccccttgggcccacagataaactcgtccctgggcctctggattccagccgcaaagggcgtccttctgggtctggctgggtggggaggagtgtgcagggtgggcagagccaggggtgggctcagagtcctggttccaggctcagcaccccttcctgggtcaccattccctttgtccaggctgctcatcccccaaagcccaggcctactggctgaaagttccagaattagagtcaccttgcatgggtcagttctatccacaggaaagctgcgtaacaaaccatccagcacaatggcttgcagcagaaagtgtttctttcttgctcttgagtctgtgagctggcaggggctaggcagggctccaggcggagggttctcctctgctctgtgcttcgtccctgctgctgggagcaggggaccagccagtcatgcccttttcatggtggaggctgggcacttgtagagggactggcagaggcaggagatgcttgtggtgtgggcccagaatactcacgctggcaaccctccggccctactgccaagacagcttcccagtggtgctgtgggggccgggggtgacctttgctgagtggtcatcttacattccgcctccttgctttatgaagcacccctggttccccggaccgtgcaggcacccacttcgagtcctgtgcccatcccctgtaatcctaccctgctgtctgccagctcaggactggaggctccccaaggtcggggctgcctggaatcactgctgccctgtggtgttggcacacaacagtgtttcatgaggaatcaaggaagggagggagggcgagggcgagacagagaggaagacagggagggaggaagaacggaagatgcagatgccagactcacactca

SEQ ID NO: 8334 - DNA, 935 bp, Artificial sequence
  DNA replication origin
cttatggccctgagaagtaaaaaatatccctttccttagcaacttgaccccaggacataatgaagggggcgggggaagggagaaagagagggagggaaaggggagaggaagggagaggagagagagagggagggagggagggagagagacagggtgggagatgagagagggagggagggagggagagagacagggtgggagatgagagagggagggagggagaggacagaaagaggaagggagggagagagagagggagggagaggagagagagaaagggagggagggagagaggacagagggagaggagagagagagggaggtagagagggagaggagagagagagaaagcgagggagggagagagagagggagggatggagggagagagagaggaagggatggagggagagagagaggaagggatggagggagagagagaggaagggagggaaggagagagagagagggagaggagagaggaagggagggagggagagggagaggagagagagaggaagggagggagagagagagggagaggagagagaggaagggagagagagaggaagggagggagggagagagagagagggagagacagagggagggatggagagagagagaaggagggagagagagagggagggagggctgaattcttccaggctcaaggctttgaattaggtatcttgggctcagatacttgcgagtacagttcagggacgtcaactcctgcctcagggcagttgtgttgacctctgcaaactcctcaaaacatgccccacccaccgccccactgccctgagccctaacccagctgctttgcttctcatcgcttttcccagggaattaaaaaccccacagccttccccacggccatgtgactccagcggttcttcctccccatccaccgtgagcccctcagtgtgggg

SEQ ID NO: 8335 - DNA, 2348 bp, Artificial sequence
  DNA replication origin
gcgccggcgccgccgcgagtcctccggctgctcccgggcgcgggcgccccccgcggtccacgcttggccgtgcggccgccgcctcgctcgccggagctgcgccgccgccgccgccgccgccctgcgctgggcgcgagtgcggccgcctgcgatcggcttccaacttgggtcgagttgcgcagcggggcgggcgcgcggggcggggcgggccgcgggccctggggagctggccgggaaccggagcccgcggccgcctggtcgaacctgcccgcgcggcgccggggaggagtccggggcggcggcgcggggcgcgcgctcggcgagggcgccccctccagggccgcctgcagcctgcgggacggggccgagcggcggccggcctgggtggtgagttccagaagctgctctttctaagactggagcctccttcgcctcccccggcgcaggcatgggcgcaggcgggggcgcgcacacgcgcgcgcgcagcacgggcggctcggggtccatggcctgatggcagagcaacctctcgcagcctgggggaggacgcgacgctacctgcgtgcgcacaggtcctgccgagctcagggtccggaccagatcctggatcggcgctccccgtcagagccacctccgcacccaccccggcctcagttccctcggcccacttcccagcgctgctggagcatgaatcataactaacggcggtgtctgtggaagccctgggcaagctcccaagctctgcacccatgttagcagtgattgaagtttaatccttaggctctcaggccctgcttttaaaggatggagaggtgttcaaagtcaccacctctgacaaacacccagaacggagctgcctggatgatggagctttttgcaagggtgggctcaggggagagcggccgttgaggtagcccccgtgcaccctcgcccccgtccgcgcacctccattctgcagatgtgcactgccacgtgcactgccactctgtggcccatgttgggtgctggcttctgcctccaggcagcctggggtctgtgggagagggacttccagggacgaggtgatccaggaggagagctggagttctcaggcctgacgtttctctgctaggaccgaagggacgacccttctcccaaacgtccagaaacgaaccccagctggctggcctctccctgcatgggcccgcaggagagagggagggaaggtctgtccatcctgtggctagaaccggcggggaaggggcgcttctgagtgcccgggaggtcatcatgaagagcggctggagtgactgccctacccccgggatgcctatccatgcccgtggcctggggcagcttctctctgagctcctgaagggcgccagctttagcctcagagcctgtcgtgttctctgctgctcagccctactggggagcatgtctgtctccgcagagacactgccaggagctacggcttcgttcttcaccatgtttgtcaccagcagggcctgcattgggggtgtggaggccgagccagggcccggcagaaagcaaatatttcagatgatgggcctgccaagcaggggcgcacgttggagccaaagccttctgtgccagtcctgtgctagtctagggcacatatgcccttcggggaggcaacaggccatggctgtcctgtgggaggtgtgtgacctggggatggtggagggtcaccatccttactaaaggccctcctggttctggttgcctaaaaggtgccacctgtccagggcacctggaggtgcatttttcagggaagcccacacacacctgcttccttcatggtcggcccgctggagcccttgtctctattgagccctctgcgatggcagagagtgaggggggcctggcctcagttgaggtgctcaccatctgtgggtggatggggccacccactgaggtgaatgcgctgacaaccatcagtgccctggggctcctcccccagcctgggagcggggttgtcaaggaagccttcctggaggaggtgaccaaactgtgcttagagagtgaggaggtgttatgaggaagggggaggcctctgtaggctgtccttcttccagtgggagtgggctttgtactgggggcgtggggagacaggaggactaggaaagagcagtggcaggggccagatgcaggctttggagaaggtctctctccctcggcatcagcgtgcctcccacccccatcctgaagggctctctttttgagaagtgctttgggggatgcgcaggggcatggggatctatctaggatcctggctcctatgttcccaagagatggcagcccaggcacgggaatttggagggaaaaggacacggagcacctggggc

SEQ ID NO: 8336 - DNA, 1033 bp, Artificial sequence
  DNA replication origin
tccccgtgagccgggccgagggcggggccgcgcgaggaccccgggacctgcccccctccccccgcagccgcgtcgccgctcgctccgggcgcctcctgctctgcacttacacgctcggcagctgcggggagcccggcagccacgctctccggcgcgccgcccgcggagccaccacggccgagggccggctgctgggcgccgcggtccccggcgggcgcgcccgagcagcaggcggcgatgcgggcgccgaccccggctggggggcgcccgagctgccgcggctgcgccccggctccaggagggacggcgtagctcgcgggaggaccatggcgtccccggcgctggcggcggcgctggcggtggcggcagcggcgggccccaatgcgagcggcgcgggcgagaggggcagcggcggggttgccaatgcctcgggggcttcctgggggccgccgcgcggccagtactcggcgggcgcggtggcagggctggctgccgtggtgggcttcctcatcgtcttcaccgtggtgggcaacgtgctggtggtgatcgccgtgctgaccagccgggcgctgcgcgcgccacagaacctcttcctggtgtcgctggcctcggccgacatcctggtggccacgctggtcatgcccttctcgttggccaacgagctcatggcctactggtacttcgggcaggtgtggtgcggcgtgtacctggcgctcgatgtgctgttttgcacctcgtcgatcgtgcatctgtgtgccatcagcctggaccgctactggtcggtgacgcaggccgtcgagtacaacctgaagcgcacaccacgccgcgtcaaggccaccatcgtggccgtgtggctcatctcggccgtcatctccttcccgccgctggtctcgctctaccgccagcccgacggcgccgcctacccgcagtgcggcctcaacgacgagacctggtacatcctgtcctcctgcatcggctccttcttcgcgccctgcctcatcatgggcctggtctacgcgcgcatctaccgagt

SEQ ID NO: 8337 - DNA, 1299 bp, Artificial sequence
  DNA replication origin
tcctgcatcggctccttcttcgcgccctgcctcatcatgggcctggtctacgcgcgcatctaccgagtggccaagctgcgcacgcgcacgctcagcgagaagcgcgcccccgtgggccccgacggtgcgtccccgactaccgaaaacgggctgggcgcggcggcaggcgcaggcgagaacgggcactgcgcgcccccgcccgccgacgtggagccggacgagagcagcgcagcggccgagaggcggcggcgccggggcgcgttgcggcggggcgggcggcggcgagcgggcgcggaggggggcgcgggcggtgcggacgggcagggggcggggccgggggcggctgagtcgggggcgctgaccgcctccaggtccccggggcccggtggccgcctgtcgcgcgccagctcgcgctccgtcgagttcttcctgtcgcgccggcgccgggcgcgcagcagcgtgtgccgccgcaaggtggcccaggcgcgcgagaagcgcttcacctttgtgctggctgtggtcatgggcgtgttcgtgctctgctggttccccttcttcttcagctacagcctgtacggcatctgccgcgaggcctgccaggtgcccggcccgctcttcaagttcttcttctggatcggctactgcaacagctcgctcaacccggtcatctacacggtcttcaaccaggatttccggcgatcctttaagcacatcctcttccgacggaggagaaggggcttcaggcagtgactcgcacccgtctgggaatcctggacagctccgcgctcggggctgggcagaaggggcggcccggacgggggagctttcccagagacccggggatggattggcctccagggcgcaggggagggtgcggcagggcaggagcttggcagagagatagccgggctccagggagtggggaggagagagggggagacccctttgccttcccccctcagcaaggggctgcttctggggctccctgcctggatccagctctgggagccctgccgaggtgtggctgtgaggtcagggttttagagagcagtggcagaggtagccccctaaatgggcaagcaaggagccccccaaagacactaccactccccatccccgtctgaccaagggctgacttctccaggacctagtcggggggtggctgccagggggcaaggagaaagcaccgacaatctttgattactgaaagtatttaaatgtttgccaaaaacaacagccaaaacaaccaaactattttctaaataaacctttgtaatctaatgttgggtgccgcagtca

SEQ ID NO: 8338 - DNA, 1464 bp, Artificial sequence
  DNA replication origin
tgtggtcccaggctcaggggatagattgcccaacagattggcaggcctggcagggcccaagagggctcccaggaccccctccacttcccaggtggggcaccgaggcccagagagcagggatttgtctgagccagtacaacagctccaggacaagctgggccaacagttcaggactccctgcccaggcctggtcgggggaggtcagggatgtcctcatcggccttgactggccatgttctccacccctcccctgcccccactgctgtctgtatctccccacctgtgtctgagactagcacacagcaggtgtgagcattagcacatgtgccagctgtggacacggctgggagagctcttcccagctggggtatcctgaagacccatcatctggggtggaagccaggcagctgcggcgagggggttctccaagggccaactctggcaagtcaggtccccctgctctggaacctgacttcgcggacgggggcttgcagaagaacacaggacccagggctgacccctccccaggcagaccctggccccccatgccaaagagagaggtgggtatccaggatggatctgggctgggctcagcaggcagggtctggcaggggagggtacacatagggaagcccaggggggcctcccagggatgggaagggggacgggaatggggaatggatggtcacaagcaggaggcctgacacagcccccacacgcctaccgagctgtctgtgcgtgtgtgttggggggacccctgcccagctcctgccaggcgcaggtcccgcttttgcccctcccctccagccatcctggcaacttccaggccctgtgacacggctgagtctgagtggtccctacaccatgaaggcccagcaccaggaagcccaccttggtattctgtcccccactttccactgcccttcctcaagcagcagtgtgaacagtgtggacacctgctgggcctgacggtggagcaagggggaaaggcagggctgcactgggaagaccctgggggcaccacaggaaacaggccggccccaggcccctctccagacattgctggtttgttccactccactgctctggggcctcaatgactttcagtttgtttcggaaataagaaagtgcctgttgttcaacctggctctggccaggcctctggcctaagagtgatggtgtgggggcttgccggcctcacgcccaccctctctccacccaagagccacgcccacaaaatgttcagagccaggaggactagctcaaagctactctcagtcttggactggaagagccccacctctttccaccggaggccctgaatatcagagtggggaagggcagggggcagggatgggaatgcagggaagacagtcccccagaatctaaacttggggtcaacttgggggttctaggctcctttcacctcttcgctactctcagcacaggaattttgagtacata

SEQ ID NO: 8339 - DNA, 1113 bp, Artificial sequence
  DNA replication origin
aaaggagggaaaagaaagaatccaaatattccattgcagctcagtatggaattcaaaaggaaatattccttggtgcaggcagcaatgttagtactttatagaagcagctccaggctttggatcctgcccccgactccgggggtgggggctggagggtgggggaaacacgttgccgtggcacttgctggcgaggaagccgcccttcccggctgtgctggcagccggctgtatttttctatcacatccatcggcagggctcaaatattccgtgccgtgtcggatcaaaacacacggcgcctgcaggcccatctcgaggctggttggacagccacggcccctccatgtccccactcccgtcagcccgtggtggcccccacgtgcaaggggtgggggaggagcagccctgtgcggagggccctgtgcggagtgccacaggtacccctttatgcaggtgcctccaccgtccctgggcaggcatgggcagcctccgctacgtgccaggggggatctgagggtcatgacatggatgtgagatgggggctgacaaagataggagagtccctagagctgaggagcagaggagggagatgcctaagactccaaggcccaggggaagcttttccatcttgaggtccccgttgtcctcccaccgggtttcccttgagtggccaggggacctctggccccactcccgggggtccgcacccccgtgacccagcaggaccgtggagagcatggattgcagcaggcagtggaggaggatggggagactggggatctgacaggctccctggggcatgccctgcctgaccaccagtgtaaataggctgcggtgtctcctgccaaggccagggcctctactccagcagggctcagtgccacccctctgaaatctgcctgggaagcagagtcaactgcaaactccgggccaaaagaaagccctggggaccgaaaatgcccttccttcctgccaagagggtttgtggctgctcctagtaaaagccttgggtacaatggtgttgtgatggtcctgataaggagtcaaaccatgcaaggtagaggtggggcgctggcccagaaagctcagttaaagacattctgcccttatgtccg

SEQ ID NO: 8340 - DNA, 1109 bp, Artificial sequence
  DNA replication origin
aacgaccgcctggcggcagtgtctgacgtccctgtgcagaatcatctctgtccccaccggaggcccctggggccgagtggcttcactgcaattttgggagcgtgtgggacctgccctgggaccccctcttcgtggggctgccaagctggggtatcatactgcagccgctggtggtcatcccaacactttgtgggcattcatgagaagcaggaaagcaggtgggcaccaatgaaaggagactgaccactgacatccacacacctggacgcagaggggactcccagccccagcgtctcaacacggtggctggaggagtgtgatcttcctccccttagtgctccttccccagcctggaagaagctttcagggccttccttccactgaagcctcagttcccccagagggctggctacaggctcacgtggggcccgaggggaggagtttcatgggggggaggagtttggtgggcggaggagtgtcatgtgaggggaggggtttcatgtggggggaggagtttcatatgaggggaggagtttcgtgtgaggggaggagtttggtgtgaggggaggagtttcgtgcgggaggaggagtttggtgtggggaggagtttcgtgtgggaggaagacgtggggaggagttttgtgtgggaggaggagtttcgtgtggtggggaggagtttcatgtgaggggaggagtttcatgtggcggaagagtttcatgtgggaggaggagtttcgtgtgtggggaggagtttcatgtgaggagggagtttcgtgtgaggggaggagtttcatgtgaggggaggagtttcttgcgggcggaggtgtttcgtggggggaggagtttcatatgggggaggagtttcatgagggggaggagtttcgtgtgggtcctgtggtgctgcctgctgagggcatagacatgtgtccctccatttctgttctctcccttggcccggctcaggccacgtccagagaagccacagaaactccagtaactgtatgtcagctgagaccccaacccagagccgtgggcggctcagggctctgggaggcagatttgtggggcagctgcctgcctccctgcaaggtccatccccggcgaagtca

SEQ ID NO: 8341 - DNA, 1316 bp, Artificial sequence
  DNA replication origin
gggagagagtgacgataaaccggaagcacttgtgccaggtggtgctaagagttaaggaggaaatgaatgtagagctagtgtggtagagagaccgtgggggtttttcgttctacatgtggggtcagggaaggtcccttccccagaaaggggcactggagcagacccaggagagcttgggcagcacctcccctcggaggcggcagcacccggggctgcagcatgtgatgcagtcagggcatagcgcagaggcgtgcggtgcggtcccggcatagcgcagaagtgtgcggtgcagtttgggcatagcacagaggtgtgtggtgtggtcagggcatagcgcagaggcgtgcggtgctgtcagggcacagcgcagaagtgggcggtgctgtccgggcatagcacagaggcgtgtggtgccatcagggcgcagcgcagaggcgtccggtgcggtccgggcgtagcgcagaggcgtgcggtgcagtccgggtatagcacagagttgtgaaccagaggaggggacgaagagtcaggaggtcagatcctttgggcctcggaggctgtggagggactttggatttgactccgagtggctcagagctcactggaaggttctgagcagaagagggacgagttctgccttctgttgcggaggtgtccctggtgctgtgtagggaagagctggtaagggcaagaccagggcaccagggagaagcagatgctcaagggtggtggcgcagaccaggctgggctctggatggcagctgaagggagagctgacgggattcaccagccatttggaagccggcagagaccgagagggagacggagagggaggaatcaggactggccccgagaggtagaagcatggattggccagcagccgagacggggaagactagaacaggctttgagctgggaagtaaaaggtttggcttttatgtgatgcctgttaggccatcaagtggagatcgctgatatataagcctggtcttccagggcgatgttggggctggaggtgcagatccacgcgccatcagcagaggggtggaattgacaagcctatgagcctggaccagggagtgcgggaggcgtgggtggacagccagccaagagtggaggggctgggagctgggctccgggattggcaactctggtttgaacctggctctgccactttctacttggtggggggcagggcaagcatcttaacttcccttggtctctatttcccatctcaaaatggactaacatagctcataggtgtgtgtgagggtgagggccatggccgtgagcactcagtgcctgccccccaggagctc

SEQ ID NO: 8342 - DNA, 871 bp, Artificial sequence
  DNA replication origin
tagtgtagtggagtgtggtgtggtgtgatttaatgtagcatagtagagcataaatgaggaaggcatagaatagcaccagttatagcacgatgagcaacatgaggctagagaggttaagtgacatccccaaggtcacccagctcctaagtcacagagcctgccttctaatgcagacctgttgggctccagggctttgttccccactgtgtcttgcaagcaaagagccttcactcaggaaacagacctcatctgtcctgacaagtcagaggctgaccagccatgaaatgatttcaagagaatgcttttgggtctgccggctgggggctcaagaggagggtttagcatctgtgctgcctccaggtgtgaggtggccagggggcagtgggcggggcctggggggtcataaggtgttctagaccttctaccttggtggtctctgagccttgaggctggagaacaccatgggggctgaggttagacagctctgagtctgggggcgtgctccaaccagaggtggggccatgtgaggagagaaggggagcgccatggatttgggggagagcagctcctgggagccaagagaaggatgtgtctcctgggaggaggctgatgtctgaggctgaaagaccaaggtgcaagacagtctgagaaccgactgctggattcaggaacgcaggggcactggggacaggttgtgagtggtttgagaggtgaaggagaaggtggggccaggataggaccactggggacgtgagcacatgcacgtctctgcctagctggcagtctgtcttcccaacaagcaggctctttctgccctggcgtcacattgtgttctaatcataataattatcagagcatgatgagctcttac

SEQ ID NO: 8343 - DNA, 1321 bp, Artificial sequence
  DNA replication origin
ctgtgcatgcctgcgccatggcccctgagccgcgccctccctcacctgcaggaccctgagcactcactggccccagcagcacccaccctctgtgcacggcacatgcttccgctccttcccaacatttccatctgctgctcctctggctcagggccccagggacacaggtccaacaggacccaaatctacagagccaccgtccccaggcccagcatgtgtggggcatgttgggatgggggtggatcaggccagtccccctcactctcagcacaggtgcgacaggaggggcccgggccctgggagtgcacagaaagggaagacccacccaggagggaacttcccggaggccaagaccttgagctggattgtcaacaataaggaaataaccagcaagaagagggggcaggggatgctcgaggaaagggacagcaggtgtgctgggagaactgcagggaggccactgccgggacaggctcgggaagctgaagggccggcagggacagggcacggagagccggagcacaggccaggggtgcagagcttgctgagggtgctggggagccgtggaggaatttagagagggggcggtctgggtcaggtccaacagaagcacgaaggtgggttgggtgtgagactgatggcggcatcaggaggacgcagggatgtgctgggtggtggtgaaaaggcctggactgggcagaggcaccgggcgtggggttagggcagtccagagacgtttaaggaacatcaccggtggggtctgcagatggatggcgtgaggcggagggtgaggcagatttctggcttgaacagtgtgaggatggagaagcgtcagccaggaaggggccagggtggggtctgggggatggtgagctcagcatggcctgtggagcatgtggcgtcagtgggacacatgggggagctgcctcagggaaggagctggaccgacacaggggacacagcaggggcctgagcccgaggctgccctcagaggctgcggacggtggaggctgctttctgtggcctggagcgtagcgggcaggggaggctgtgggcaggtctggctgatggagcgacacagactggggcaggcacgggcgctggagcagtctcagcagggctggggcaggcaggggcactgatgtggtctcagcaggggccaggctggccactggggtggtacgcctgtgcaggaggtggggtgtgggctccctggggcagggaaaggcagggctgtgtcctcagtgaccaggctttggctcgggggcctggagtctgacaaaggcacctgctgctttggaagtgcccctcccccatctca

SEQ ID NO: 8344 - DNA, 954 bp, Artificial sequence
  DNA replication origin
gctgcgggccaagctggagtaccagcactggtggccgtttcctttcctcctgttccctgctgtagtaaatgctctccttcccttaaatagatcctcctcacacctccgccctgccctgccacacccgcccccaccgaccccgtggctttatggtggctgttgatcaaaatgtccctcccacctggcacaacgtaaacatgtgacctgcatctgtggggtcgcttgcaggggacgcaggcatccatccgaggccaggccaggtgagggcccagtcgccacgtgcagtccagctgcagggcaaggggtgcactgaggtcagggtgtgcaccggggggcggccatgtttctatagtggggagagggagtctgtgtgctggaggcaagagagaggccagctcctgagatgagcacagcagagaggagagggagggagagagatgaggagagggagggagagagatggggagagggcaggggtgagggagagagaaagacaaaagagagagggagagggaggagagggaggagagagagggaggggacagagacagacagacatggagagagagaagagggaaggagggaagagaaagagagggagagtaggggagagaggaaggaggggagaaaggaaggaggggagagaggaagcggggagagacagagggagacagctggctatagctgcaccagagaccacccgaccctcggcccagccttcccctttccggtgacaggtgtctgtgtgaagttccaggagccgcctccctgtgtccctttgtatctaaacaaggacttaccaggatgaggtggaggtgacagggcgctgtagtgcttccgaatggacagggtgtggagtcagggtgtgtagtcagcaaaacacaaaagtcacagacatttgcccctgaactagcgccagggtgcccccatgaggccccagacacaagcatctga

SEQ ID NO: 8345 - DNA, 1040 bp, Artificial sequence
  DNA replication origin
gctggtgaaaatggagagaaagttagagctcagcaaagttagagctgagatgggggcgtagacattaatatgctcttaaaataagaacgcccagaagaggggactcatcagctgcctgcttccagatgtcaaagcctggttatttttaaggcaacaccatcaaagcaaagcgtgctggagccgtggggaggcggctgtcgctcagcagcaaggggctcagggaggttgggggaaacggtgctgcccaggagatgccctcagggcagtgcccaccgctgtcgggtcacctggagggctgggggcacccagggtgggagtcccaagcccccatttccaggccagttccatgctaggcagcctggacgagggtgagtggccctgcctgcctgcactccctcctccaaaacggccaggctcttctcaccctgaggccataccgggccattgtgaaaacagcagcagcagctgtgggcccgctgggagccgggctctgcacgttgcaatgttctttcaagtctcacagcagcataggagggaggtacggagccattccgaaccgtggtttcctcgtctggaaaggggaacagcaacagcgacttccttggagggtagtggtgagggttaaacaggcagcatgcacacgggggtactcagaaccccaacaggtgcagcgggcagacactgctgttctcagtgattatcgcctccttttgcatgtgaaaaaacaaggcgcagagaggctgagctgcccaaggcccaaggcccaaggccacagagctgggtttgatctggaggctgatttggagctggcacccccataactactgctgcggtgccagcagagtgacaggagatgagtctctgtagcaggtgtcttccagctcagcctgtgtttggtgtaacgtctcttctgagagtgttggaagctgcaggtttgggataagttggggtcttgctcagtgtccctggctgtgagatccctgttcctgcacggtcccaccaggaaagtcggtggacaggtagatgtgatagtgtctggc

SEQ ID NO: 8346 - DNA, 1347 bp, Artificial sequence
  DNA replication origin
aatgtgggggatgctgccccatgcccctccctactctgggcttaatgtggggggtgcgtgctgccccgtgccccttccaaccccaggcttaatgtgggggacactacctcacgtctttccccatcctgggtgggagtttgggcccacaggcactgtccttgaccacacttcctcctttggtcactaaaaagttccgggtaactgatctgtcactgactggagccctgtccccatgctgggaaggcctgcctctccatccttatccatgccccctcaagactgtagaaccaagaggaccacatgggccttccctggtggagcctggatatagtggtggaggaggcattgtgctgaggtctgggatgggcactaggcgtaatgggaggtgccacagaaagggtgatgcaagtaacgctgggccatggttacaatgggggcgagtcacaggaatgcagaacagaggggcaccaccccggaagggccacgaggtgggtgggatcagcagggatcaaagcaacactgtggcagggcctgggggagtgtggccagcagagatcaaagcaacactgtgggagggggcatggtcagtagggatcaaagcaacacctggggagatggagcttggtagggggcatggtcagcagggttcaaagcaacaccacaggaggcagagcctggggggaggcgtggtcagcagagatcaaagcaacactgcgggagggagcatggtcagcagggatcaaggcaacatcaggaggcagagcctgggagggggcgtggtcagcagggatcaaagcaacacctcaggaggcggagcctgggagggggcggggtcaatggggatcaaagcaaaactgtgggaggtggggttaagaggtgggcgtggtcagcagggatcaaagctataccgcaggggtggggttatgaggtgggcggggtcagtggcccgggatggggcacgtgtggtggtgggagggctggaacccactcactgacacaggctggtgaaaatggagagaaagttagagctcagcaaagttagagctgagatgggggcgtagacattaatatgctcttaaaataagaacgcccagaagaggggactcatcagctgcctgcttccagatgtcaaagcctggttatttttaaggcaacaccatcaaagcaaagcgtgctggagccgtggggaggcggctgtcgctcagcagcaaggggctcagggaggttgggggaaacggtgctgcccaggagatgccctcagggcagtgcccaccgctgtcgggtcacctggagggctgggggcacccagggtgggagtcccaagcccccatttccaggccagttcca

SEQ ID NO: 8347 - DNA, 897 bp, Artificial sequence
  DNA replication origin
agctgagtgctgagcccaccttccggctgtggcggcggggccacccaggccctgtggaggggcctgcactccgtctctgcctcccacctccctgcctgggcccaggtagccacggtccaggggcaggccagatgagtgtctggggttccagcctccctgctgccgggcagtgctgcgctgtgccggccgtgccagcgtggggagggggccgtcatggctctcagctcctgcagcccatggcccagaggctaccctcaccagggcaggctccaggccctgaagacacccctctccctccagggcagcctgtgccagctctgaaagcgcccccgccccccacccactgcctcggggaggtcgtcacaaggcttcctgtgcaggtactcaccggggcggcaggagcacagggctccatctgcccacaggagaaaggagggagcaacttcgcctgcccttccctgggggaacacggctggagctgtggctgtgatgactggagctgtggctgtggctgtgacagctgggtggcaggtccaggcgtcccacccagggtactgtcctctgcatccagtccaggcaacacagaataagcatcatgctccagaggaggtagcctgcctgtccttcaaatccctctcctgaggcccatcctgcccttatgcttgtcttatccccaaccagacaggctgcccgtgccactccgatgcccagcacccaccagcatagccacctggagttgtttccccaagctgcaggccactgtgttaagggccagtcagagctcatttggacaggaaggttttctacacattacagctcccaagctgaaagaaagttgtgaaagctggacaggtggacatgggtgggagaggtgacacgggtgggacaggtggacac

SEQ ID NO: 8348 - DNA, 1124 bp, Artificial sequence
  DNA replication origin
ttccctgggggaacacggctggagctgtggctgtgatgactggagctgtggctgtggctgtgacagctgggtggcaggtccaggcgtcccacccagggtactgtcctctgcatccagtccaggcaacacagaataagcatcatgctccagaggaggtagcctgcctgtccttcaaatccctctcctgaggcccatcctgcccttatgcttgtcttatccccaaccagacaggctgcccgtgccactccgatgcccagcacccaccagcatagccacctggagttgtttccccaagctgcaggccactgtgttaagggccagtcagagctcatttggacaggaaggttttctacacattacagctcccaagctgaaagaaagttgtgaaagctggacaggtggacatgggtgggagaggtgacacgggtgggacaggtggacacaggtgggagaggtgacacgggtgggacaggtggacacgggtgggacaggtggacacgggtgggacagatggacacgggtgggagaggtgacccgggtagacgtgggcaggaggggcaatctgggtggacgctggtgggaggggtgtaatctgggtggtcacgggtgggacgggtgacccgggtggacgaaggtgggaggtgtggtccgggtggacacgggtggcaggtgtgatccgggtggtcgcaggtgggaggggtgagctgggtggacgagggtgggaggtgtgatctgggtggacaagggtggcaggtgtgcctcaggtggagaaagcagcgtgatgcctgcagcccaaatggaagtcacagccacccaggcaggcaagagctatgccaggctgagagatggagattttgtcaggagggccaggagcatcttgggctgacccagaggtgggggtgacgcaggcccagtaggggttgaaggcggggctggtgagctggacaggcaaggggaaggctgaatcctggctagaatattacaactcaggtgataattatgcccactgtggagtccagatgggcccccggagctctgggatcaaggcctcatcttccccggtgaggaggagggtagccccgaggggagtgggcagctccatggggagcccagggctgggcctg

SEQ ID NO: 8349 - DNA, 867 bp, Artificial sequence
  DNA replication origin
ctccactcctccccattggggaaagggaggagatggggcccaaggcaagggacccaggacagggctttgcaggagcacccaagcttcatggggcgatttcatcagtcacataggaatgccagctgcgacgcccacacactggagacccagcaaacgaagcaggcccggacactggcatggaattctgacacatcagggtacaaccaccaaattggaaaggtcataaaatattaaagctgttgatggagagaaaatattgaagatttcatcagcagtttcttgccctatttcaatgatattaactttttaattaaaattgacgctcaagactttccaacagagggaagtttcacttcttaacctagagggagccgcatgggactcctaacctggtgagctttctggagaggcagagcgggtggcagcaggactaagggggcgaggcagagatggcggggacagtgggatgctgcgggggcacccccggcgagggtgggggtggggagggacaggtgctgtggggagggtcctccttgccctctggtgacacgaacactcttctgggtgccatctatgcagagacaggaggagacagagacacagacacagcaggagacagagagacacagagacaggaggagacagagacatagagagacaggagacagagagacacagagacaggaggagacagagacacgcagagactgggagacacagtgagctccagggactgacagacacacatactgacacacggggagatagagacaaagagacagagataaagacagaggtgctcagagagaaagagacagagagggaggggacaagggccagagacaggacgcacttggtcatggaggc

SEQ ID NO: 8350 - DNA, 728 bp, Artificial sequence
  DNA replication origin
gatggcggggacagtgggatgctgcgggggcacccccggcgagggtgggggtggggagggacaggtgctgtggggagggtcctccttgccctctggtgacacgaacactcttctgggtgccatctatgcagagacaggaggagacagagacacagacacagcaggagacagagagacacagagacaggaggagacagagacatagagagacaggagacagagagacacagagacaggaggagacagagacacgcagagactgggagacacagtgagctccagggactgacagacacacatactgacacacggggagatagagacaaagagacagagataaagacagaggtgctcagagagaaagagacagagagggaggggacaagggccagagacaggacgcacttggtcatggaggcactccctggcggagcctgcctggtccacaccggtccagggccgcgccgcagaggaaaggaggtgaggctgggacaccccgggggtccctggaaggaggtttagggtgggagacagaccggcctcaaccgcagggaggtcactgtcccggggtgggagttagggctgtatgcagtagactggagggcgatcgcgggctccaccgggagggagcagctgtgcgccttgacgtaaaatccccaccctggctccaatggcccgcacctgccctggggtgcgccggggtgggctccgcggggacatcacgaggg

SEQ ID NO: 8351 - DNA, 1743 bp, Artificial sequence
  DNA replication origin
gtgggggcccggatctgggtctacgccgccccacctccctcctggccacaccgctgcggagaaggtgccgcacctgcgcgaccgctgcctggccggtctagagcccaccgcggtggagcgtcagccctcctgagtggcggttcctgtgggcgggacgcctgggttgccatggagaccgagagcccagccccgcggagccccgggtgtgcaccgggacaggaagccgaaagcagagcgggagactcgacttgcactttaataggctctcccaggagccgttgtccagagggagcggggttcgcggggctggcggggacgtggcggggcggtggaggggtgagggggaggggaaggacggcggcgggggcgggggaggtgcacggtggggccgcggggacggggcgggggcgtcgcagggcgagtgcgcgcccccactgccatccaggccgtcgcggcgcggctcgaacactcacagaggaagcacctactgtgcgccaaccctgcgcccggcagcgtgcgggagacagaggggaacccagtacttccctgccgtgggggctctcggtgggctcgaggtcatgtcctggtgaggaattacggtcccttttactgatgaggaaacggaggcgcagacggcactgggtccaagttgcccaggcctccgaggtgcgcgcagctcctagccgggccttctgtttggagacgcggagcgcgggctgcgagcccgggtgaaatggccttaacgcacggtacaaggcagtttgtcctggggctggagcgtctgggggccctgccggctgcacgtgggagaagggctggccgcctcctgcctcatttcctcctctctaatggagaaggaggccgctgactcgcagagtggcgctgcagggttgggggagccctaccctaggacatctccaagcaccctgcactgctgtcaccaaccctgtcacctgccctcccattcctgtgttttgaaaacctgagctcagcgggcttgccccgtggcccctctgcgcaggggtgggcagagagacagagggaggatgggtggatgggtggatgggtgagaggagaactgcagggagggcctgcccggcacacttgtctgcagtctctggggagtgccgtgccaccctgtccagctccagtcccagcccagcgccctcccctcctgagccacagccagagcctgtcctggtgagcttgggtgttcccaggataccccactatacctactgcgtgcccgccctgtcctgtagacacagagatgggccatacacagcctgaggcctggggtagctggctcttggatggtggtgggaccagggtggtgagaagagcaggggtcgggggaagaggggcaccctgaaggatgctgtgcgcatagtaaaaatcggatgcatgctcatcacgaggttcccactggaggcatgagatgattggaggaggggacgcagcggaggcatgagatgattggaggaggggacgcagcggaggcatgagatgattggatgagaggtcgtagcggaggcatgagatgattggaggagaggacacagcggaggcatgagatgattggaggaggggacgcagcagaggcatgagatgattggaggaggagacgcttcttcctaatttgcacagtgaccctaaaggctgtgacagctgtcgaagaggccatagcccaaccgagggctatcagagaggacttcctggaagaggcaacacaaacgctgaatc

SEQ ID NO: 8352 - DNA, 929 bp, Artificial sequence
  DNA replication origin
atttgatgaaaaagaggctaaatgctatctgatttaggataaagaaaaaagagcattaacctcgactatgtctttagctccaggcaacttttcaagagtaaattgctgggcaggtgggggagggctagtcatggaatgaaactgtagaccagaccgggtgtgaggaggggaggtgataaaaggattgtagggtggaggagtggaggctgaggaagaattgggacctagctcagcctggcgaggagcagcctggggaggaggggagaggtcagatgggtctgtagaaaaggaagattagaaagactcagcgatgcttgggtttgggactgaggggacaggtgggagggaaaggaggaagatttgggatgagttgctttgggcacagagactaggaagggaccgatgtgtaaaagaatgcctggacgtcaggcacctcagaccatttgcctattttacgacaagaattatttagatcttgcaggatggaaaaattgaaagtgccattttctggctatttggaactactgttgagtttgttttggggtcaagcagcattgcagaagaaataagatgcttagattttaggtcaggtgagagttgaagaggttttaagttcttaaaaacacaggctaagggagaagaaggaggaatggagggtggaaggttgcccatagtgaaggaaggaagcccagaaaaaagagagagtagagacatggagggaagcggttcgggggttcttaccctccagaaaagtgggaaaggggtcgggatgcagagatacaaggtccaggcatggaaataagagatcggggtacagagatataagaggtcagggtgcggaaataagggattggggtgcagagataagaggtaggggcttggaaataagggattggggtgtagagatacgagattggggtacttgtgcc

SEQ ID NO: 8353 - DNA, 2054 bp, Artificial sequence
  DNA replication origin
cagctgtgtcgcagtgaccagaacgattactgcctttaaaaagtcgtgaaaatgatcgtgaactgtaccccacaacgagcgcgcgtctgccccccaagacggtggagacgcccccagcttacgccgccagcccgcggggcaggaggggtgcgagcgactctggccaggccccagggacggggaccgggtcgcgccgacctgaccggcgggagcccaggcactcacgtggcgggagcgccgggggcttcagcacggagacacatcccgtctgcccctggactcccgcgagccccgcgggcctctccgctcgccccgccgcccacctgccaggggaaggagcgcagtgagcgcgccgccaggaagcggcgctcgaaactctgcagcaagagttctgtccccgcgttctcctagggcgccatggcgtgggcggggccgcagcgttgccgggagaccgggcggaagccgggcctggactgaagagggggcgggcccagggtagtgcgcaggggcagagagggggcggggcccgggggcagggtcaggaggagagtggtggtggcgtttctaaggtggggccaggatgagcgtcatgagggcgaggcctggggagggccaggataagcgttgttggggcaggtcctggggagagttcaggttggcgggtcctggggcggggtcgggacagggtgatcctggaagcggggcttcggaagcgtccaggttggcgggtcctggaggcggggccttgcgtgggggcaggataagagtcctggaggcgggcgttagggtgggggtaaacgatgattgggttcaggaggtgagactcggagcagagcccaggagacaggtcttagggcggggctaaggtcagaccctgagaagggctcaggaggcggggccagggtggggcgttgatatgtcgtagcacgtggccaggcggtgctcggactctgggaggcggagcttaggacgggccgacgtggggaggggcccagggtccgggaggcagggccgagtctgggctgcgggctgcactcaggaggcgggccctgggaggcggagcttagggaggggccggtgtcgggagggaccaagggactgggaggagggtcggggctgggctcaggggccgagagggagctgggcttggggaggggccgagacagatcgaggggtccggggtgtgagaaacggggaggggtttgaggaggggattggagtgtggctcaagttcgggaggctttacctgcggagggtttgaggcaggtccaggagcgagcccacggtctgctgacacggggccaggggcgggccccaggattcggagcttcgggcggggccgagtccgggtttggggcccgggaggcggggccggttagggcaagggtccccgagatcatcgggtcaggccttgggccaacgtaggcactctcgcagttcctccgccttcaggaaggtctttttggcaggggccttacgggtgcgcgcttcggtcctggaggcgttatcctagcctcctctccatcagcgccacccgtctggggcccgataggagggagatttccctctgtcccccagcctttggactgtcaccaaacaagccattcgttcaccaaatacttattaagcgcctaccatgtgtctggcaagggagatgtaacagtgagaaaaactaggtgtggtccaggccctccaggggctcaggggctcgtggaagaagtagacattgaagtacttatcacacaaatgagtataaaagtacaatagcgatatctgccacgaaggcgagcagacagagctagcggggcttgcaggaggagttttgatcttgcagggataggaaggaggacttagttcctgcggggtgggcttgggggtggtggtgatagagacgtggggacagagtggaaaacaacaaaaatataattattttagttcaaagttattgtgtcttgagttgaaaggcagggcagttagcaacacagttcagatttcagtactgcccctgaaatctgaactgtgttcaaagtctaaaacgtttaccttagcaaatc

SEQ ID NO: 8354 - DNA, 1322 bp, Artificial sequence
  DNA replication origin
cctggcgaggaggggagaggtcagattagtcttcagaaaaggaagattagaaagactcagtgacgcttgaggttgggactgaggggacaggtgggatggaaagaaggaagatttgggatgagttgcactaggaacagactagggagggaccgacgtgtaaaagaatgcctggacgtcagtcccctcagaccgtttgcccattttactacaagaaatatctagatcttgtaggatggaaaaattgaaagtctcattttctggctatttggaactactgtcgagtttgtattggggtcaagaggcattgtggaagaaaataaggcatttaggttttaggtcaggtgtgagttgaagaggttttaggtttttaagaacacaggctaagggagaagaagggggaatggagggcagaaacttgcccatagtgaaggaggcaagcctagggaaaagagagagtagagacacagagataaggggtgggggggttcttgccttccagaaaagcgagaaaggggttggggtgcagaaataaagggttgtagtgcagagctaagaggtcagagcacagaaataaggggttggggtgcagagataagaggtccggtcacggaaataagggatagggtcacagagataagagttcggggcatggaaataaaggatcggggcacagagataagagtttggggcacggaaataagggatcagggcacagagataagagggtctcctgtccctcccccagaaaagcgggacttgccactaagggtgaaggaccaaggcaggcgtccctgcgtggtctgacaccaggccggaattttggctccacggataaaacgtgtctcctttgtctctaccagaaaatgaaaggaattgaaattaagagaagggagagattgaagtgtggcgccaagattgaaaggagaaagaggttgagggatagtgagggaggttggagaagagagtaaaaagaagccgcttactggatttgaaattggtgagatgtttcttgggctggtcagtctgaggacctgaggtcgtaggtggatctttctcacagagcaaagagcaggaggacaggggattgatctcccaagggaggtcccccccacatccgagtcacagcaccaaatttcacatgggtgtgtgtgaagagaccaccaaacagggtttgtttgagcaataaagctgtttatttcacctgggtgcatgtgggctgagtccgaaaagagtgagtgaagggagatggggtggggccattttatatgatttgggaaggtaaaggaaaaaggggggttgttctctggcaggcaggagtgggg

SEQ ID NO: 8355 - DNA, 1709 bp, Artificial sequence
  DNA replication origin
tttctgaggctccaggattgggccaggccctctccatggctttctgcccttcccctactgcagaacttagcacctgtatgtcacttttggttaaacatgtgcttttcgtatgctctccatgttatctgcagcatctgccaagaataataatgaatggtaaaacctaatctctattgagtgtcgatgatgcacttttaacgtgacatcttatttaatcttcactatatctgcaagagtagaagctattaatagccagttttcagataagaaaatcaaagcacagtttctataacttacccaagcagctagctaggaggcagctcaatttgagcccagggaatcagtttccagaaaccatgttctcaattactagagcagatacctccccagaatctagtaggtggttaatgagtctttgtggaataaatgaacagaaggacaagcagtggatggatacatgggtgggtgggtggatagatgggtgtatggaaagatgggtgggtgggcaggtggatgaatgaatggatggttgagtcggtgaacagatggccgagtgggtggagaaatggatgagtgggtgagggggtggagggatagataaatggatgcacgggtgggtggatagatgggtagatgagtgaatgggtggatagatgcatgggtgagtggttggatagatgggttggtgtgtgagtaggtggatgatagctgggtgcataagagagtgggttggatggatagatgggtgggtgggtgggtggatagatgggtaggtgggtggatggatgtatgcatgtctggatggatggatggatggatggatggacggatggatggaaggaatggtggatggatggacggacagattaacagatggacttgagcatttattcagggtcctccaaagaattgagtgattttctagggtgtgtcatcacctgcaggtggatgggcaagggggcttgcctctgtaatacttatgattatgggtagtgctcagccttagtcgccactctcggaacactttattgactaggaaagtcaaaactggcattgacaactagtgcaaattacagctaaaactaacagaagatgttgagtgatgacagctgggcaacaaataatcaataatttggctgtgtcatgttgctgccatgctggacaggtagagccacgggttccttgatcccgccatcacattgaggatgcttatcaagacttccccaaccatggggacagggatcttatcaaatacttgcagttcaccccaaaaggctcaccctcttcgttccacctgcacatgaccttcagctcaaagacatttccagtcctccaggtcagcccttcttccagcctttgaattaactctgatgactgcctgcccattaggtgtcttcaactttcatcacacagccttttccaaggctttccttcagtccagccctcaccaaacgttggaactgttgttgacaaaatccagaacaagctggctgggggatacaggtgggaagcaggctgtagtaatgcggaaaaattctaagcaatctcgaacacataaaagaaactgaacaggtaagagagaggcactcaagagaagaagtgtgaattttgcataactgaaggtgaagaagagcggggggcatggcagaccacaagataaatatgatatagactcctttttaaaaaagtataaacacccacactttcct

SEQ ID NO: 8356 - DNA, 1111 bp, Artificial sequence
  DNA replication origin
gcggctgttgctggaggggggaagcgcacagcccggcgactgcgaggacggggaggacgcgccgcggccgggcagggaggagaccggcacccagacaggtggcgacggcagaggagtaagtgacgcgggcgcgggggtccgggggtgccgggggcgcgggggtgatggggacgcggggtaggggcggcgggaggctccgtagccggctccgggttgaagttggtaactgagcggcaactccggcgggcgcggagtgacagctcgtgacggcctccgagacgccagctgccccttcttggctgtgtggcttcgacttcctgattctcccacgccgtcccagagacccgctggactctgcggctagccaaaatgggaggggggggcgcgtcctgggggcccccagcaggggaaggggcgggggttgccctgggcatcctgtctggggcatctgtctgggactctgtcggtgcctctcacctggcgaggggcctgtggtgggggcaggggggaagtccctggcgccaggcttggccaagccctgctctgctgggctgcgggctggcggcgctcacccagctcctcacctgtcccgcatcttcctgtttttcttccctttctggttgggcagcgagagttgagaggaggcagatggcttccatcccagaaatcgctcttctctttccatccctacagagagggccagagaggcatagttccttgcatcccgcggggcgctgtccctatgagctcccggtgtcctgcacacctgggcccctgagccaccgggcctgtgtgtgtgggatggggctccgtggccagcctggcctcctggggttctctttctgctttcctaccccaactcttccagcgtggttttgctggccttccactggggaggcacgtgggtttggagggcagatgagggcccgctggagagctgtacccctcagtgagggccgccaccttgatggtttttgatggataatggggttgacttcttttttccttccatatgtttttatgtttgaccatttacttagctgagcttgtccgaataattggattcgtggttaatgaaccccacatgggcgagagggcggctttctttctg

SEQ ID NO: 8357 - DNA, 1675 bp, Artificial sequence
  DNA replication origin
tccctgcccggccgcggcgcgtcctccccgtcctcgcagtcgccgggctgtgcgcttcccccctccagcaacagccgcagcctcttctcctcgggagggacgtcgtcctcctccctcctgggagggccatccctgcctcggggcttgccagtggtttcggagctgcgggaagggctggcagtggctccgggggctctgcctgcacttggggaagaggaaggacctgtcgcgagcggcctctcggcggagctggggcgtctgagcgcgggctcggtgggtgcgcgcggcgcggagctgggcatcggcgccggcgcgggctcctccgcgggccgctcctcgctctctggcgccctctgctggcctggcgcgcaccgcggacacgcaaggcccgggcctgcgccgcgctcacctgtcccggcccaggtgctcgctgtcccttgcccgtggccaggcccgctctggccaggccctgcacctcctccctgccccagccagtttgcaccccgatggtctccctgcccaaggaggagagaagagaagggaagccccgagagggtggacatcggccacagccaccttgtctttgctcttaccctgtgtcttgcatgatttggaggtggtgggaaacccgaggttgctcaaaactcgtggagaattccgcctgcaggatgacatgaatgcaccttcgcattgcctaccaacagatcttttctgagcatcactgtggaccaggcgtggtgataggggaggggacattgtggtgaacatgacaggcatggccttcaccccgtggggctcagcgctgggtcagaaggcattgagaatggacattgtcaattgggccaaaggaggccaaggagaagagcggggggcatgggaactgagaaagacaggaggctcagcaggtcttggagctgggagagggacagcagcagcggctgttccaaaggaagcaacagctgagagaggtctcagagagttgttctcagcccagtggagcatgttcgggcagagggaacagcgtgtgcaaaagcccagaggctgggaaagaagcagaaagaggactgtggggctggagcgtggagggcgaggggtgagaggtgtggtgggcagagagattgcctgggagccagcagtgcagggacaaaggagataggggatccttgcaggcccccagccaggtctcaggcacagagataatgcaggtgggcaaagagaggaaatgtggagaaatattttggaggcatgccctaatgaatgagcccacaatgcactcttagtgtcagtgtgcagctccttccttggctgtgtgatcagctgaacccgggggtattttctggacatggaggtgctacaccaagagtccaggacaggctaagtgagtaccagcagctcctggcctacctcaaaagcaggagagacaggggagactggggaggccggggaggaaggggaagccaggaaggcaggagaggccagggaagcagaggaggccagggaggcagtggaagcaggagaggctggggaggctgtgtcctttccatgattctgcccgggatcttaggcccctgaactccctgagcttctccaccccaagcgctggaaccatgttgcacaacggtctctccactaagctcctgatggcggcccctaccctgctgtgctccctatttca

SEQ ID NO: 8358 - DNA, 919 bp, Artificial sequence
  DNA replication origin
cttccgcagccccctccaaggcggagtggagccttgggaacccctcggccaagcacaggggttcgaaaatacagctgaaaccccgcgggcccctagcacgcgccccagccccggagcagggtcagggtcttcttgcgacccggccccgctccagaccccccagctctcggccgcggacccgggccgcgtgtgagcgcgctttgcacctcctatccccagggtccgccgagagccacgattttttacagaaaatgagcaatgaagagattttgtactgtcctgactggggagtcccaggccgccggggacggagcgcccctggggtgcacgcccggctggcccggcctctgggtgcggtggtgggaggccctgacctagggggaccgcggggtgtggggagtgcgtagccccagtgggggcggggcgaggtgtccgtaggccccgccctccagcccttcctccctcctgaggccccgcccccccatacctgcctgcctttgccagccccagccaggagaagggagcgggggagcggctggcagagacagaggagggtgtgacggcgttgctggtcccccatgggtccagagggcgagacagactcccgaggcacaccctccaggggcctgtgtaggcatcctcggccctccagcgaccacccccgcgtcagacagggtccacttccgagccacggtggggtcaccctgtgcccagtaggggccttggaagtggtggttggaggccaggtacgctcggttactaccctttccaggctacagcctcagctgcgatgcccacgagaaacaggctggtggaggggcagaccccctacaaggcctgaaggtgccgttcctccacccgctcctcttgtggccagaggagagggacacccccgccatgaagagctctgaacggttgg

SEQ ID NO: 8359 - DNA, 1119 bp, Artificial sequence
  DNA replication origin
gccttggcactccatccagcctaagcaacaagagcgaaactccgtctcaaaaaatgaaaataaaaatagaactaaaaatagcagggagtgggctgggagcagtggctcatgcctgtaatcccagcattttgagacgctgaggtggctgtatcacctgaagtctggagttcgagaccagcctgggtaacaggctgtgaaaccctgtctctactaaaaacacaaaaattagctgggcatggtggcacgtccctgtgatcccagctactctggaggctgaggcacaagaatggcttgaacctgggagacggaggttgcagtgagccaagatcgcgccaccgcacttcagcctggaggacagagcgagactctgtctcccaaaaaaaaaaaaaaaaaggaaaaagaaaagcagtgagtgggctgggcatgtcacgcctgtaatcccaacactttgggaggctgaggcaggaggattgcttgaggccaggagttcaagaccagcctgggcaacataggagaccctgtctctacaaaaaatttaaaaattagctggaggtggtggcgcgtgcctgtagttccagctgcttgggagactgaggtgggaggatggcttgagcctggaagattgaggctgaagtgagcgtgccactgcgctccagcagtgggtgggggaagggagggagggggcgcggtggggaaacggagcgaccgtgtctggagaaaagaaaagagcaggaagtatgcatacagatatgtgtgtgtgtactgagctatggtgtgaaatcattcctgactgcgggttatagtcaaaaccccatgaagagcatcactacagcccacgggtgtgtcagggacacagtgttgtgagccctgggaaggcagggcctgtggccagcactttatcaacactggcacatgcaccctatgaggcaaagggatttgcattgtccccttacagcgtgggacactgaggtcgccaggggcatggcgactgtaagggacagtgctggatgtgagcctcgcctgcaggaggcggtccaggaagcgtgggtggagcggctggagaagttgagggtcgcgtggccggggaggctcccggaggagggaagggcctatctcagc

SEQ ID NO: 8360 - DNA, 1148 bp, Artificial sequence
  DNA replication origin
attcaagactggcagccccagccaggcacagtggttcatgcctgtgatcccagcattttgggaggccaaggcaggaggatccctggaggccaggagtttgagaaaaggagacaacacaacgaggccctatctgtacaaaatataacaaaacttagctgggcaaggccatgtgtgtctatagttccagctattcaggaggctgaagtgggaggattgcttgagcccaggaggaagaggctgtagtgagctgtgattgtgccactgcactccagcctgggagatagagcaacattgtctcaaaaaaaaaaaaaaaaatgtggcagccccttgaggaagaaagagctcctatcttgacaatttcagccaatgcctgtgagtaccagcaggagcctctatccctctttgccccaccctgcatccacgcattcattatttcattcataccccctcattttctcaacacccacttcgtgccaggccctgaggtggctctaggaccgagagacagggatcacagagctccccagtggagtggagggtacagacatgttgacaagaacactggagcccagtgcgggctgggggcatgtggtcagacctgcaaagccgggaggagaagggggtcggagaagcttcgcggggagaatggggtgaggcctgagccctgtctcggaaagcagaggggcaggtgggaaagtggaaaagacattcctggaggagagaaccgaaggtgccgaatgtgcagaggcagaggtcctgcgatgggcgagaaagttcgcgagaatgaccccagcacaggatgagaacaaaggaggggatcaaaggaaacgggccctcgggggccgagtgctagaaggctctgagtgtcaggagagggagcgtggcctccatcatggggtcagtagggccactgcatggctttaagtcagggaaggacaagagaggtttctgtaactgtggctgtaatgatggaagcgtctggaggcggagaggaggctcctgcggcgacccaagcttcagagagagagagaggaaaggaagggcagacaggaaagctaggaaagatgcacagagagaccaaggcagaaaaggctgaagggaagacggcagcggtaggaagggcgcagagcagcctcaggatgcagcca

SEQ ID NO: 8361 - DNA, 853 bp, Artificial sequence
  DNA replication origin
gcccctcccccaattcagagagccagtgacgggcgctcctccacccctaaccagacacacccgataacagacggccagacacagagtgacccgcacagagaagacaatacagaaatacgcagggacgagtacagaccgtcggacgctcggacacggacgcaggcaggatcccctggacctctgggttccccaacggagaccctcggggaaggcccggagcatcgcaagcccctgtggagccccggacgccccgcttggcagcagccacgccccccgcgcacacccccctcgggctggctccgggagaccccctctccccagtcccgcaaccccgggaccccggcaggcacttcttgtcacccagcgtttccggggcgcccggacaggggctgggtgggcgggcgtcggctcaggggtgagggctgcagacggcgggcgggggccgggcgcgcgggcggaggtgcgggaggacgcgctagtgtcgcggcagggctggccagtgtcccagggatcaggagcggggagctgtccgcgtgggtcccggagggggcagatggctgccccgggcgttgcccagtgaggggcagcgggcaagggagctcgtagaatcccaggtcagcagggtggggcgctgggtaagtggacagggtggtaccttgacggaggacgaaggggcagaagaggggagggcgggcgtcgggaggtgacaggagagggggcaggttggcaggggcgtggggtaggaatcggaagggagttgaaaagggaggtgctggttggcagaggcgtcggggcaaggacaggagccaggagcgcaggcggggcccgacggcagccacccccgggaccagac

SEQ ID NO: 8362 - DNA, 864 bp, Artificial sequence
  DNA replication origin
gcccgccctcccctcttctgccccttcgtcctccgtcaaggtaccaccctgtccacttacccagcgccccaccctgctgacctgggattctacgagctcccttgcccgctgcccctcactgggcaacgcccggggcagccatctgccccctccgggacccacgcggacagctccccgctcctgatccctgggacactggccagccctgccgcgacactagcgcgtcctcccgcacctccgcccgcgcgcccggcccccgcccgccgtctgcagccctcacccctgagccgacgcccgcccacccagcccctgtccgggcgccccggaaacgctgggtgacaagaagtgcctgccggggtcccggggttgcgggactggggagagggggtctcccggagccagcccgaggggggtgtgcgcggggggcgtggctgctgccaagcggggcgtccggggctccacaggggcttgcgatgctccgggccttccccgagggtctccgttggggaacccagaggtccaggggatcctgcctgcgtccgtgtccgagcgtccgacggtctgtactcgtccctgcgtatttctgtattgtcttctctgtgcgggtcactctgtgtctggccgtctgttatcgggtgtgtctggttaggggtggaggagcgcccgtcactggctctctgaattgggggaggggccgccttctgtgggtttttctgtttgtccgtctggtgtgcctgtgtgtcggctgcgagatgcccaggcgcagaataagacctgagccactttctaagaaaagagaccatcccgcaccctcccccaaaggagcggcagccgttctggacccagaggagctggaatgaggga

SEQ ID NO: 8363 - DNA, 1222 bp, Artificial sequence
  DNA replication origin
gccccaggcacagcctgggaacttgccgcgggtgccctgatttcaaaatccccaggagggctagccgtctttgacaggtgacctagtgggtatctcgtaactcgccccaactctccagccagggtctaagtgtgcctttgaccacaggccagcctggtctgaacccaggctcctggcagaggcaccccgcccccaacccagggaaagcgggtgtcagactctggcccctgccacgggcctcggggacccacagaacccacctttttggcactttgatgcctccctgaagcaggtgaagaagagaagatttctcttgctccacttcagaaatctgcccaggcatctgccatgagagtgacccactggtcaggagaaaccctttgggcttaagcaaggaaatggctttcccgcacccccccccgccccgccccccgtctcaggctcaagcatttaacagaacccaacacacacgcgcgcgcgcaaacacacacacacacacacacacacacacacacacacttggtcagaattccacaccaggaggaacaaagtggaggccctgcccctcccttagagactctgtcaactgaggaggacagaaaggcaagaaggacctaggttgtcccagagatggacggtgaacaatcatgtttctctgctagctggccttttgtgctgtcttgggtcttcactggtgctggtcattgggactgtttcatcctgtggttttcttcctctgctgattgtatctgggccctgtgaagggcatggacaatgcaaaatgcatgagacacagcgccacccgcagggagctacggacaagggcaagtctttgctgggagcagtggccctgtgggagagtggcctctgcctcttgccaggagggaggacatccagagactgtgggtaaagactgtggataaagcttcctacaggtgggcctgagagaggtgcgtgcagaggggaaggcattccaggtaggagaacagaatgtgttaagacagtatatgagcttcctgccactgttggaacaaatttggcttaaaacaatagaaacatgttctctcctggctttggaggccagaagtctaaagtctaggtcccagcagggcctcactccctctacaagccacagagaagaacctgttctttccccctccagcttccagtggctccagacattctttgactgtggctgcatcactccaatctctgccttcat

SEQ ID NO: 8364 - DNA, 1647 bp, Artificial sequence
  DNA replication origin
ctgggcgggcaaggtctggcctcggcaagcccaggcgcggccggccgcactcacccacgcccggctccggcaggtcagctgagcgctccgagctccgcgtctcctgctcctgctcgcagcaatggcggaggcggcgccgcgcgcggacccgggaaggggagcgaacgattgggctccacggccgctccctcctcctcgcgccgccgcctcccttcctgcctctcccgggggctgggtgcgcgcgggtgggtgcgcgcgtgtggccgcgcctccaccttgacgcagcgcccgcccggccgcacaaaggagtgcggggctgggcgggagcctcccctgggaccacgcgcccgccctgagccgggggagggaacaggggagcgggagaggacgcgcccccagggggtctcggagcggcggagggcgcccggagcgggagggctgcgggctgcgccaccccgggcggcggcctgggcgcgaggcgcttagaaaggagaaaggggaggcggggaccgtagggacagagcgacccccaggggtgcggggaggtgcagagagggtccccgcccgcagcgcgccgcgctcacctgggggtcctgaggacgttcaagggtttggggggatgggtccaggaggcgctgggtggtggcggagaccagagcagggtgctccttagtgctgggttggggagggggcgaccaaaagagggcgcgtccgcgtataaagggggcgcggcccgtaaaggaggcgcggcccgtaaaggaggaggaggttttcggtggtgcgggaggcggagtagcgctctcccagggctggggtgtgggcgcccagggtgaggctgccccaggcagcgggagggaagtcgttctaggcaaagagcgctcagtgcgccgcttggagggaggcggaaaggttcctccgctctggttggcagagaaggtggaggtcccactgcagccgccgcccgagcatcctgggcacagaggaggggccgctgggacgatgcccggacgcggagagaaggggggtggttctagcccgacctgcgcccccaaaccccgagctcagccgctgtcgcggcttcccagagagggtcctgtttgcagacctccaacccgtcctgcctgcaggactcacggatgaaagactatggggtgtgggggcgaggccgaaatgggagtggagcccgcgcgggaggaggccggctgcggggatcggtgcctcctgggcacctgggccaggagctgggccctgtcaggcgctggacgaggaggaggcatcacccaaattcgatactttttcacaccctttccggggacttccccgcggcactacggagggtccggggcgttttccatcagccgtctgagaatcctgggaataagcccagagcacaggagcagccaccgccttgagccccaggcacagcctgggaacttgccgcgggtgccctgatttcaaaatccccaggagggctagccgtctttgacaggtgacctagtgggtatctcgtaactcgccccaactctccagccagggtctaagtgtgcctttgaccacaggccagcctggtctgaacccaggctcctggcagaggcaccccgcccccaacccagggaaagcgggtgtcagactctggcccctgccacg

SEQ ID NO: 8365 - DNA, 1363 bp, Artificial sequence
  DNA replication origin
ttgccactcggtgtcaaagtggaggactccgccttcggcaagccggcggggggaggcgcgggccaggcccccagcgccgccgcggccacggcagccgccatgggcgcggacgaggagggggccaagcccaaagtgtccccttcgctcctgcccttcagcgtggaggcgctcatggccgaccacaggaagccgggggccaaggagagcgccctggcgccctccgagggcgtgcaggcggcgggtggctcggcgcagccactgggcgtcccgccggggtcgctgggagccccggacgcgccctcttcgccgcggccgctcggccatttctcggtggggggactcctcaagctgccagaagatgcgctcgtcaaagccgagagccccgagaagcccgagaggaccccgtggatgcagagcccccgcttctccccgccgccggccagtgagtagccagaacccaggcgcagagggagggggccgggtgggggccgggtggggtgtgggacccgagggctcctggtggcctccggcgcctgcgtacctgcagccggtgctagggagccgtgggctgcaaggccgggtcttgcgcctccctccactcccacccaggaagaaggttccagacctcctcgccttggcccagagacgctgcgggtgggagttaacggataggacaccgatgtctgggcaccctgtcctcctgcccccaccaaacgacctcaggggtccatgatccctcatctgatcccaaactctgtttcatcggcttcaccccagcggatgaatgtgtgtggtgcggtatcttccctgcacccggagtttcactttctcgcagtaggagctggtgtcccccagcccctcttccctttcaagtacctctttgcctagaggttccgaagctcctacagaattctacctccccatgccctttgagtttgaggcagatagttggtgctttgggcggatggatgattcaggggtggggacattcaggttccagtggagggggcggggcaccaagtcaattaggggaaggcgcccccgctaatcctatgggaagctcccaaacgtctaggactgagccattaaagtggactccaggtgcccaaggcggttcgctccaaggcctcacggccccctggctgctctactcagagaacacgctcggagatatttcaggagcacgggaaattcccaagttttcctcgtttcctccgattattttgctcggcataatagcagccagatttcaatggcgtgatgctgaggaatgatttttatctggggattaaacgtctttgaaaggccagtccctccctaagcctaatggccggagaaggtggccccgctctgggttgtcgcc

SEQ ID NO: 8366 - DNA, 1272 bp, Artificial sequence
  DNA replication origin
gagccaaggccagcgtccagcaccggaactacagtgagcaggcgctgggagagctggctgtgagctgagggccgcgggagggcgctgtgggggaggcaggcggggtggaggcagggtccccctgggcctgggaagggggcggagtgcgcggcaggcgtgggagctgttgagtggagcggaacaaattccgcaagtctggagtgggggcctgggagtgctctggagagtgggcacttggtggtggcacttgggggtcgggggcttcccagggagtccggcgtcggggccgggggactgttccactgtggggcgatgcgagctgagcgtctgggagggcgggacggaaccttggaggccgcgcggcctcgggggcccggccaggccggcgccagccgcagagttgaaaggcggccgcggcctctcctcgccgcttcctattgcgcccccgagggctctaggcggggcgcaggcctggacccggctgggctcacctcccggccttgggtcactaaggagggcgcagcggtaggattcgcactcggggcccctgcctcaccagtaactgtcctcactgggcctcctgctcaatctggtccttcagccccgggttcagcgatccgagaaactaaccttaaagtaaggcgctcttagcgcgaggtcttcagccccaccccagcctcccggtccccaaccgccccggccctgcggacctatgctcaaagctcgaggcgccccaggtcccttgccgccaggtaacctcatttctgccccgcttccacgccacggactgctttggtcttgactgcgtggtcagaagctgaatttgcaaaatgaggcttccgtctcctccccaacaaaacgaaaacgctttcacagcgtgcagggccggtgagacgcccctatcattcctcaagggacagtgcctgttcgtggttagagcgcaaggagttaaattcagaactagttcccggattctgcgctccgttttccagcgcgacgcgcacttcgcaggagagctgctcaggcaccaggtgaccctcaaccagatggagatgggcaatgcgggaaaaaccggatcctcgagtggaatccgtgttggaattcctgctatgtccttcattaactgtgtaaccttgggaaaaccatgtcacctctctgagctgcagtcctttgcgctataaaaatctcctaggtgtgttgggagtcagcgtgagcgggaactcccggcacacagtaggctgtgagtgcagactgctccatcactacctccca

SEQ ID NO: 8367 - DNA, 590 bp, Artificial sequence
  DNA replication origin
ctctggtgtcagcacagcagagcacccagcgctctcacgccttgtgctctgagctgagcttctggcttgctgtattgagcttctgccgctcaggtctcgcgtggctttgctcctcctccctggagtccctgagtctgaacgcctctcaatacagcacctccttggtttctctctcccatctatgtctatctctggggtctccctccccctttctcccaatattatatgtgtctgtgtcaccagaacccctgtggaagatgttagagagtggccttgagtgtgtatggttgcctctataactagggcttgtgggtgtgggatgtgagagttgattgtgggtgttgggtgtgtgttggttttgtgtctagcatgtattagttgtgcgtggctgggtgtgttggtgatacgtgttgatttatgcgttgtgtttgtgtttgtcagccttgtgtgtatgtgctgggtatgtgtggtgggtgatgtgtgttgattcgtttgtgtgtaccgcgtgtgttggtgtctgcatatgggttatacatgtgtgttgcatgtgagtgtcatgtgtgtctgtttcggtgtgtgttggtatgtcg

SEQ ID NO: 8368 - DNA, 715 bp, Artificial sequence
  DNA replication origin
ggctttggtccgtggagaatgagtagggtgttgggtctgatcaaggcattctgaaaccctctgcctagatgggagaaggtgggtgtacaggacgaggtggggccgaagggggtcccagaggaggggacccagggggagaaaggagagctgaagtcactggctgttcttgcgcgggggcgggtgggggggggaactcccagcgttccctcaggcgattctccaggccttccagtaaaaggtctgtgtccggggattgaccccacgtgcgtggagccagaatccgcgcttaccctctggtgtcagcacagcagagcacccagcgctctcacgccttgtgctctgagctgagcttctggcttgctgtattgagcttctgccgctcaggtctcgcgtggctttgctcctcctccctggagtccctgagtctgaacgcctctcaatacagcacctccttggtttctctctcccatctatgtctatctctggggtctccctccccctttctcccaatattatatgtgtctgtgtcaccagaacccctgtggaagatgttagagagtggccttgagtgtgtatggttgcctctataactagggcttgtgggtgtgggatgtgagagttgattgtgggtgttgggtgtgtgttggttttgtgtctagcatgtattagttgtgcgtggctgggtgtgttggtgatacgtgttgatttatgcgtt

SEQ ID NO: 8369 - DNA, 873 bp, Artificial sequence
  DNA replication origin
gcgggaattcgcacctctcgctctcttaccttcctcattctcgtcaaacacggggggcttgtgggagtggttcccgcccatattccgccgttgctgccgctgctacatgcccggccgctgggatgccggatgcgggatgtgggacgcgcgcagagatgcgggatgccgggggcgcgcccagtccgggttgtagccgcgcgcggagcccgagggggccgagcaccgtgcaggggcggggacggcgtcccccttctcctggacgcccttccgactgcgctcgcagggaccccgctctcgccgcgccttccgccgtgccccgcctcgggctgcgctcgcagctccttactccagtgcccgcccgggaacccgggagctcctcgcgccggggccaacgtgcggcgctcctcgccggctacagcgggcgggagacgcgaggcggcgcgggagcaggggaaggaggggaaggagcgggggaggaggggacggacgaaggcagcacgcagtgggcggcggcagggcggaaggagctgagaaagggatcggcccggaagaatctgaatccctgctcggccctcctccctcggccgggagctcggtccctgcaggcagtaagcggtttgtcagcacccactatggccaggcctcggctacgcgctttgttagcaccatcccacatccgcctccgacaacccagcagtaagaaagcatcgttcatattttagagcgcagtagacggaggtctagaggtagaggggctcttaggtctgtggttagtcggccccggctgcgaagggagtcccaggactccccgctagcctgtatttgcccattcatattgggatgggcagtggagtgtctgctggctctccaacc

SEQ ID NO: 8370 - DNA, 1165 bp, Artificial sequence
  DNA replication origin
ggagtaaggagctgcgagcgcagcccgaggcggggcacggcggaaggcgcggcgagagcggggtccctgcgagcgcagtcggaagggcgtccaggagaagggggacgccgtccccgcccctgcacggtgctcggccccctcgggctccgcgcgcggctacaacccggactgggcgcgcccccggcatcccgcatctctgcgcgcgtcccacatcccgcatccggcatcccagcggccgggcatgtagcagcggcagcaacggcggaatatgggcgggaaccactcccacaagccccccgtgtttgacgagaatgaggaaggtaagagagcgagaggtgcgaattcccgcttcgcggggcatccccttcctccaccaccctcggccgagccctgcggggcaccgcatgctgcccggcgcggggacccaggcatggccacttcgcccagcgaatgcagtgtgtgcccgacccgtgccaggcgcggcgcttctgctgaggcaactcctaggtacccagtgccgtttagtagtcgggacggtgcctagcgcgggactggggaggcggcttcagagagttgaacccgaaacctgcacttgggggtgtggaagggaggagttgacttcggaggccagtcgggatggttctaggctcgggctccccaggaaaccgaggtttccttgagagcctgaggctgacggaggtggcctggaagggcgggttgcaccgtgtgtctgtgtgtgtgtgcgcgtgcccacgacgcatttggtctcgtgcaagggcctgttggatgcagctctcctcaatcacccaggacagagggaaacttttctttgctaaactctgtggttcctaggagggcgtcctgttctgggcagcctccccctggcgcagaagtggtgtaggctgtccaaccgcatctcaacttcctggctggatccttgcggttcaggtcgatagagctccctatttggactagcagaaccctctttccagtgcagcgtgtccctggaaaacttacttcacctctctgaaacattagtcccttcatcaatgaaatgtgagttatgataccactagctactttatagggttgtttgaagcttaaccactagtaatccacgtgaaaagtgccttataaatgcaagcagtaccgagctgtgccgttt

SEQ ID NO: 8371 - DNA, 1221 bp, Artificial sequence
  DNA replication origin
ggggaggagaagggaggggaggggagggaggaaggaaggaaggaaggaaagaagggagggagggagggagggagggagggggaggagagaggtcgagtgcggtgactcacgcctgtaatcccagcactttgggaggctgaggtgggcagatcatttcaggtcaggagttcgagaccagcctggccaaaatggtaaaaccgtatctctactaaaaattaaaaacaaaaaaaaaaattagccaggtatggtggtgtgtgcctataatctcagctacttgggaggctgaggcaggagaatggcttgaactcgggaggcggaggttgcagtgagccatgatcacaccactgcatactccagcctgggaaagagggcaagactcatcaaaaagaaagaaagaaagtaaagaaagaaagaaggaaggagggagggagggagggagggaaggaaggaaggaaggaaggaaggaaggaaggaaggaaggaaggaaggaaggaagcaaggaaggagaagaaggaaagaaagaactttgtcctctcacagcagtgctcctacagggctgcctctctagccaatggccaccctctcttggtttgaacacctccggtggtgcagacgcaggagcttgttcacctctcagaggagctcatggtggccatgtaatctgcaggatcatcaagagcccaggattgtttactgtacttgctctgccacttctcagatacaactacctgcattttacaaatgaggaaactgaggcacggtgatgtgaagtaacttgcccgaggtcagagggctatgagggggttctaccaggaaaggacagggatcatccgactggttcactccttatctctgggctgacagcaatgccaccatcaacagcatgaccacacactttattgtttgagccaggacacaagtgagaacagaagaggacacgaacctgaggggacaatggacaaacaggatggtcctaggcaaaccaggatggaagatgactttataaataaatatctgtggaaagaattaactcaggcctgtcttacttgaaggcctggattttaactaccacatgacattgagcaaggcatatttacaaaactgaattttactgacaggatgcgtttgcttgaaaggcacgcttctgagtgttaatctacaattcacattggacaggaattttggttgcggttttgtcatcacacagcttgttagtcagtc

SEQ ID NO: 8372 - DNA, 775 bp, Artificial sequence
  DNA replication origin
gttttactctacggagaagtcccgagaagggtgtgggcaaaggctgacagctctgccctggtgagcatgggctggagaggaaagggaagatgcaggaactctggaggggaaaatgctctgcaggtagaagcagcagggtttgctattcaggcagatgtggggtgtggacagtgtagtcaatggtgacaccgagacttggggagtaaaaggtgctggaggtttgaaaagagagagaatgccctctaaaatggagaatgaatgaacaaggaggatatcccagggttggggcaggtcaaagaacccacagagacactgttagggattggggatttagagggaaactcaattccctggttgtatttttctgcagccacgttcagctgggtgggcgcagtgcggagtcatcaggaagtagaaattaaccaggctttgggttccgccaggtgaacagtcaagggagtcgaggatgtgggaaggcgtgacttcagtgagagaccatggagtgtgggctggggaagtcggtgatgaccctgatggatagcaaggaggtaaaaggtgggtggattgtgggtgcccgtgggactgaagaattgcaggaaacagaaggaaggggctgtgacgattccagagtgggatgtttgaggagacaggagaggccaggtgtggccatggagtgagtggcggaggcaggtggagatcgagatcctaggagaaagaggagtcaagaacttaagaggccagatgcccagtcacacggttgttgccatcaccaagg

SEQ ID NO: 8373 - DNA, 1225 bp, Artificial sequence
  DNA replication origin
caatctttctccatggccagtgctcttggaccatcaagaattaccttttcctgcttctaccatggttcccactccccctccctctggcccaccatttccaccctgcactatgcatgggctctggactcacaccagccgggagctctttccagcattcaacatatacttactgagacctgccttctggagcttacccaggagctaagaaaacaagagacagtcaaagataaaactgcataatatgatacgctgagggaaatagagggggagagtgagggtgctgtgtgagagacagacggctgggaagagtccagggagtacaaaggccaggaactgtgggccaagagctgtgggtggggcctgtgggtggagctctgcatgggaaatctgggtaggggctatgggtggggctgtgggtgtgggtgggggctctgggtaggggctgtgagtggagccgtgggtggggccatgggtgggggctgtgggtggagctgtgagtgggggctgtgggtggagctgtgagtgggggctgtgggtggggctgtgggtggggaatgtgggtatagctaggggtggatctgtgggtgaggttgtaggtggagctgtgggtgggggctttaagtggagctgtgggtgggactgtgggcgaggctgtggctgtggctgtgtgttgagggtgtgtgtgggggccataggccaggagaggtggagcagcacaggaggctgtgtaggttccatgaggatggactgagtgcaggagccttagatctctgctctaagtgcaacaaacgacctggagatctttgcagaggagaagggttacacaccacacctgtcttcacagcagccctgggaggagtgtggtcatttcatttcccaggtgataaaattccaacctagtaatcttgccggagcatgcctggcctctggaaacactgcctttcctgatgtagccatctccacttgtgggagcagagggagccagaacccccagccaaacgccaaaacccccctccctccaacactcacaacctcagcatggtcacccaccttgggaccatgccctttatccctttacatgggcacggggcttcgaagccactcttgtctcctggaatcctgtcctaaacacaggcacatccccccatctgacttcttccctcacctgccctgacacccagaccttcttctgtcccctcggaattcacagtcagcatcaggtccc

SEQ ID NO: 8374 - DNA, 1293 bp, Artificial sequence
  DNA replication origin
cactgtggctgacagaggccaatgtgcaccaggatttctgacactggcttcccagaaggaagagcttgtgcaaagcaggtgaggccaggcacgcaggctctgaactcgggggccagagagagagtacaggacaggcctggggacgcggctccctgagccttggttttgtcacctgcaaaacgggccagatactcccatctcacagggcagatgcaagtgaaaggacccagggaacatgttctgtcattggacttttgaaagctcaggacactgacatggcgtttttccagtgaaaacctaaagacagaaagggagcagggtctcttttaagagactaaacctctgccagtgtcgcaagtgtcctggggtagagaacacagcaggacacgacccaccaccctaggagagaggtgggaggacctcagggcagcatcaatgggccagaccattggccagggcagtcctgggaataggagcctgggtgtgctgtcaggggcaataaggtggagagaagagtgccagcatgggacaggagtggcagaatgtctaccaggacagaccaccccagaggtctgggggaaaatggatgggagacgtgggaaaaccatcaccaagggctggaagtgaagtggtgggacctgaagccagggagtggcagtggggagtgaggaggggcagacatccgagctgatttggaggaaaaggcactaggactggtgaccagctttgtcgggggaggtcaagtctagggctacagccagggatccatgcctttcgagtttaggaccacagagggagggccagggtgaagtaggaagtggctaaatccatcagccaggagagttcagtcacctaagagtccagccaagagcccccacttttaaaaaccgctgcaatttcccagtgctggcctctgcaaggggctctgcatatgtgagctcatctaacccacttccaccctctggggtggacgccgcgacggccccgtttcaacgatcaggaaactggggcacaggagtgaactgccctaggtcgaagctcgtaaaatggagagcaggattcgaaccagggtcgctggtgaagtccaagccggcagctgccacaccccgaggaaggtctccagtttccctcgaagctttctggccgtgagcgggatacacctaagggccgcgaagcaccctattcagatcctgccctcccttcctcattctttgcgaaatactaagggtcctccctgccaccgccggtgtagacaaagtcaaaccactacagtcagaccggagcctggggtcg

SEQ ID NO: 8375 - DNA, 1766 bp, Artificial sequence
  DNA replication origin
gtgatccaggctcctccctccggctcggcgaagcagggaaggggagagaagcaggagtcgggagactgcacaggccagaaagtctgcggagcgggccgcgcccctggcccgcccgggctccaagtcccgcgtcgccgccctggcggggacggtgcagcaggcggcgggatgcggcggggcggcagcctgagcgccccggatggcccgcggcggggcggcctgcaagagcgacgcgcggctgctgctggggcgggacgcgctgcggccggcgcccgccctgctggcccccgccgtgctgctgggcgccgcgctcggcctcggcctcggcctttggcttggctgccgcgcgggccgccagcgcacgcgacaccaggtgggtcggccgagcagacagcggcggggcggggagcgcggggcgcgtggcttctgggtcctgcgggcccggagccccggctctgcgactccttgagcctggttgggaacttcgcacgcaaccgcttaggcgtcgggttccccttctgctccaggagggaggtggcggcgtgactaaagggcattggcctggggtcccctgcggtgcctgttacatcccactccgttgggtgatccttgacagcagcccaactgcgccacgcctcggtctcctcatctgcagcaccaagggtttggacaggacgctggccctgctcgccatggtggacagaaggacggctggggctcccacgcctgaatgcctattcctgcttctgcctcttccatccttgcggtgtgggttacgtcgcctggcctgagtcccagctgccacattggcattcattttttcattcaccccacagtaaaagttttcaggcaccttctacagccagtcactggcctagggacgacattcatgagcgggagagaccctgccttgaggctgtgaacctcaaggagaaggacgaattgcaagtttgcaagtaaactatcggttatgacaccgcatggggagtctgcgatgggacgctggcaatgctagcgtttattaagtgctgtgtaccaggcactgaactagaccctctccctaaatgatctcaatgaatctccacaacagtttgtctctgctttgcagatgaggaaactgaggcacagagaggttaagcaacttactaaagtgacagaagtgtctaaccccaaagccactgtgttcttcatggatgagggtcggggtggctgcctgaaggagaccagtggatgcttcctatgcaagtggccctcatggaattggctgtgcatggcaacacctggcatatagcaggcattccatgaatagtggtatggccactattttaggtccttgcaacttctgcctctttggggtgggaggagagtaaagtctgcgcgatcagaaacaagatggcgtggtcttgctacccccatttctggcccgtgggaagatgagacagatcttgtgcggtttccatgtaggcacaggctctttcagaatataggggaatttggtgactcatggggagcattacaccgcaaagagctgatgagggctgaaactgagataatgcaagatgctcgtaggtgagttgggggttgtcagatcctgctggtgattaagagacactaagagatgctggcttgttgcatggagagagaaagggaagtaacacacagagacttggctgggtgtcctgtgcaatgtttatagacatctggttctttatcctccagcccatgaggtggaggaactgccattatccccactttacagtgaggca

SEQ ID NO: 8376 - DNA, 1420 bp, Artificial sequence
  DNA replication origin
tccctcccgggcctttgtcagcgcgcccgctgggagcggggccgagagcgccggttccagtcagacagccccgcaggtcagcggccgggccgagggcgccagagggggccatgtcgtaccagggcaagaagagcatcccgcacatcacggtaagcggcccccgcccccgccgccccgcgctggcctttgtgggctgggagtgggcgcccggcagggtccagatccacggggcgccggcaggggcgccccccgaggcctcctgcgtcgccgcgggtggggcggggccggtctcgggatttcagccccctcccccagcctctggggacaatgggggtgggggagccccgcatggcggggcggggctggagccgggagtccctctccccgcgggcttgccgccccctccccccacgggatgtgccagaggatggcgtggacagggaggatgcggagccgaacaaaagagggaggggcaggggtccgaaccccctccccgcaggcctcgcgcgggggtgggagggtgagctgagcctccttggctcggcccccgcaccgtccggcccatgcaccccacagcccggtacctcccccgctggaggagggaaaaagatcatccagcgctccccactccccgcctttactgatggagtggaagtccggacctagggacagcgccatgatggaagctcggtccacccctccccgcagctaaaaataacctaatggggcgacgctggcggctgcggcccgggaagggttaatgttcccgacgctgggccgcgagagggtggggacggtggtggaggcagaacagccgggctgcgtccctgggtgtggccggaaacaaaggaatccccgtctttacgctttgtctcggggtggggagctgagggcgcagcggtcaggagctggccctccgccccagttcctgcctggcatcagcgtggagcctgactgttcctgagggatgcggaccactggagcccatgtatgcaggagcagcccggggccgggaggcgggattctgggcgtggtggaatcctccagggtgactccagaggtttgactactggagacccagcctgctcatttatgcaaaattcaggctcctggacagtcgcagggcacctgccagagggcagccttaggtaggcggaggtattgacacttgcactcacctgccagtggcctgtcccgtgtattgcaggcctgtttctttaaatggtggcagcaaggctttgcgggtggcattacccacgtaaagctccctgaggctagagcatgggctgagggcttccaccacaggaaggtcaggagggaacccaggccccctgcctcccctgcactgtcctgcatccgccccagctctgggctgagtcttgagttagaaaattcctcctgggcccagcctcagctcttg

SEQ ID NO: 8377 - DNA, 989 bp, Artificial sequence
  DNA replication origin
actggcccctggggtggtgaaggtcagggccccagcccccaaccacagtgctgggggagctgtaccaagcctaggccaccctcgctctggatggcaacttgaaagcagaaaagatgagtagtttcataggacctgtggggttggatttcgcatgcagaaaatgaacaacgaagtggtggacaaggttggtgttttattctgcctgggaacttggggcacctgtccagtgaggttggggcttgctggggctcccccttttcctccatcttctttcatcttttcccctctgctgttacggaccttgtcaagctgtgacctggcttcctgcccacctccctctggagcaacatctggatcatggactccggggctggtgtccacagtgctgggaggcaggagcaccctagtcctcctcctgacccccagcttgtccccagggctgtggagaccttggtgccagtggcccagccctccaaacacctgctgtcttggaggcaattctgtggggtgacctggtggccccagtgtcaggctgctgtgtgatgagggagctgctgttggagtagaacaggtcagcattaattaaggccgtacccttctgtccctgctgttccctctgccagttagggggctccaccttagaggcccccagggagggctggttcaatgctaggatggagagggtggcagggagaggcttcgtggtggggaaggcattggagatgggtctaggggagtggacaggcttttgtctggggtagactattcagggagagggtacagcgtgaataaaggcttggggtccgagatggaaaaagtgcttggtgcattcagggagaggcactcgggaaggataaacggaggctatggaaggagaggcaagaggggagcggtccttgggcgcgatcctggagggacaagaacgttcccagcagcttgggccgatccttggcccccgtcccacactccctccccccacacccccgcag

SEQ ID NO: 8378 - DNA, 1806 bp, Artificial sequence
  DNA replication origin
catgttcgccgcggtggagggcgcctacgagaacaagaccatcgacttcgacgcctacagtgtgggccgccgcggctcggcgcgcacgccgcgcagcgctggccggcccgacgcggtcgggctgccagggccgggaggcagcgaggacacggccagcgacgtgagcgagccctcgggctccgcggtcagctctcccggagagcgcgacgagcggccgccgacgctgcgcatccgccgccccgcgccccgcgacctgcccctcggccgggacaatggccaggtaccctcggggcgcgcgcgggccagacgaggggggcgggccccgggaggacccagggcatggggcgcccgagggccatgcccgggccccggtgttggggcagcggccgccaggctggggagagccacggcgcggcccctcccccacctcatcatgcaagaggttcccagagctggggcgactcggtcggggctggccggcgtggtccgtgagactcggaagggatcgcccgggtccagtcccggctcctcttctacagaaagggagagaggttctgagaggggaagttggctaaagctaccgcatggacgcttaaacgcgaaggaacctctgggatgaatctaacccaggcccctcattctgttttgtgaaaagaactggagctccgttccgtgttggtccattcatccatccactcagtcggtagtaattatagagcacctactgtgtgccgggccccgggagaggttccgcgagtcgcctgcggccacacagcttaaagctggaaggagctttttttccgagcgctcccctcatgcttgctggggggaaggatttggttaaggatttagttcgtcgggcagttggagccgtaaacccctaccctcaagcgccagtagattcaaggggcactcctgagctccacagcacacaccgatgtgcctgcttcacagagcaaggtggaggtagagctgggatttgaactggggtctctggcctcccggacctgagcatggggccgggaggatcagggagagggaacgctagggcttgggccctgcgggtattctctcttgagctgggggtcaccaggaaactgggggaagaagggcggatggacggcgtagcctttggatggaccgacgagagccagggtcaggtgccagaaaaacggaagttggagcatccgagggctggggagctttcgaattggtccagacctggatgccggagaactgctaggtgccaggcccagggtaggcgctaggtccctggctcagcaacctggccccaccctccagaagttcccaggctagggtgagcgacggattcattgtgagaattaaatcagttaatgccggtcggtagtgagcattcaataaatgtttgttgttgacttttattacaatcattatcattttaattaaaccttcccctcttaaatgctatgagtgacccaaagtgagcctggagggaagcagagcttgatcggggcagatatctgggagggcttcctggaggaataggagcagggaactggtaaacacggtggtgggcctcttcgggccccatcccttcgcgggcgggctgttgctccagagctctccgtggtcctgaagccggagcctcgcgagggagaggtccaacagcaagggtgtgtgtgtgtgtgtgtgtgtgtgtgtgtgtgtgtgtatgtgtgtgtggtggtggggtgatcagaaagggagatggtgcgagagtccagcttcctcttcccccaccccttctgtatctccccctgtccactaccttccctggtggtccga

SEQ ID NO: 8379 - DNA, 1487 bp, Artificial sequence
  DNA replication origin
ccctccaccgcggcgaacatgccgccgtacttctggcgcggggtctgcgccgcgctgcccggccgcgccaggtacacgggcaggtcgtcctcggtgttccacgcgcgccgccggtccgccatacccgtccaaggccggccacccaccgcgctcccgcctgcccgcccgcggccctgggcaccgccgtgcgccgcgctccgcgcctcggtgcgggcctgcggcggcccgggcgcgactgcggcccagggaggggaggggcggggcgtggcgcgcgccggggcggggccggggcggggcctctgggcggctgcgggctagcggcgcggccagctacaaaggaccaggaggcggggatcgcggctggggcggggagggacggtgacgctcccgagccgcagcgcggagggcgggccgcggcaccgcagtgccctcgccgcaccccccactctccgcccccaggcggagcgcagggcgcgaggagagcgcggggcaggagccgtgtgcgtacactcgcgcgcccacacgctctggaggcacacgcgggttcatacctgcacaccagacaattacgccaaacacatgagagatgcacagacatgctggcacacacacgagagtcaatcacacatgctctccagagatacacaggggctcgatcatgcacaccatactcaatgttgcacacacatacacatatatgcttgtgcacattccgagttcattacaaacacacaacagaaatcctcattgtctcacaaccccactcacacacagtatcacaccaagattaattgcacaactggagaggcacatgcgttggacacaccgttcattccgtcagttttattttgctgagcgcccactagtgcctagcactgttgtaggagctgggaacagagccatggacaaaagagaccaagtgcctgccctccaggagctgacctgctaaggaggggaattggatacaaaagcacccatatggtgggccaagaggtggtaagggccaggaaaggtggtgcagcagccaagagggacatgctagaggcacactccgacagacacataagagaagcacattcttgcatgagaatcagcgacacacacatacacgtgcacgccaatgacaccacacaacacaccaatatcaaaggcaagctcagggcgattccacacatgtgcatcataaactggcaacaggatgcccacacacaagtccacaccagtaataaaggaagtcaaaagcttaaataaaaacgctccagagaaagacacacagagacagagatgaccacacacacacagctggcagtcaaccagacagacagatattccctcattcgaggggcacagtccacttttgttgctcctggagcttgcagtctgggcgttctggggtttctctgtcgtggaggtcgctctgctggggctctcctctaaggccaggcaccacctgcctcctatagacaccttcccttatttctccacga

SEQ ID NO: 8380 - DNA, 772 bp, Artificial sequence
  DNA replication origin
gagcattttttgaattgcattgaagtcagcctgggtatgataacaatccaaaaaatataccaccagtaaccatttctaccttctgcgctacggagtggtctccacgctgcctacccagcctctccctttttctatttatctagtccttcctcttccttcgacttctctctcttcctgctttcactttgaatttctgtctcttcctttccctatcctattccctctccttttcctttgtcattcaccttctttcacttcgtttctttgatgccttctttctctctcattttctcttttccctctcacactccaatgatgattttaagcagctgacaaagtgtgcaattctggttgagtgggaaccaaatggataaagacaagaggcagctgaatgggaccgtgagaacgtgggacagctgcagcagccagcaaggccctctgggtgcaggcaggtggctgtcaggacaggatgtcgctgcccaggccctcagggttaataggtttgggttgaggctcctgcactggttcttgtttaaagcttctgggtgactccatgatgtggcccatgctgaggcccctggcctttgagaagaaatggacaagacccaaaccatcatacagatcaacaggaggccaccaacccagagtgggaggagatgaaggccaaagaaggcctcattaaagatcggcctttaagcaggtcccagaaggggaggaggttgaccaggcagagggtgggaagagaggtccagacagtgtgcaaaggctctga

SEQ ID NO: 8381 - DNA, 1586 bp, Artificial sequence
  DNA replication origin
taagaaaccacgcatcttgtctgagccttgtttgaggaagtgctggccaccgcggctggcacagggtgctgggtgctgccaccgtggctggcacagagcccgtactgggggccgagctcactgtggcgttagggaaggagttctgtggcaggagccgatcagttctagtcccctctgttcaggcagcacacaccccaccaacctgcacagccttgattctccttcattcgacagaagtttattaggcacctgcttgtgtcaagccctgtgccaggcaaggaagtccaacaggaggcaaatgtggtccccaccttcaaggggggcagcggggtgaggggtgaaacagacaacagcgctgtcaggtgagtgctacgacccggcattcacaagatgactgacatgggcaccatggaggttagctgaccccacggactcaagcagggtaggcttcctggaggaggtgacagctagctcagggcctgaagactgagtgatgctagcttgttaaaggcctggggctgaggctggggccaggagaggtagggacagcacatggaaaggctgggcatgttcgaggagctctgtgtagttaggatgaccagggcctgggatttcagtggggacaggagagtgctgactgatgaggctgtgagcatcacaggggccaccccacactggggccttgccagtgttgtcgggggtgctgggatgtctttggaggtctctgagcagaacagggatgttccatgagcccatgtgtgttttttagggaacttgctggctgggggggcagaaaggaatttggggtgtgtggggaggattcagatatgaacctgggggctgaaaggggaatggggggttggtgatggggagggagtgctgcgggtgggtttgagaaccagaaggaggcaaagccaatatgttggaagtggacggaaggaaggagggggcactcttccccatcaggggtcctggcaggccctggagatgccttgaggcttgggagtggaggggtgcaggaggcagcggcacacagggcgtggtggggcagatctgggtatgagacatttcagagagggtagggagggtggatcccgggggagggcagagtaaggtggagaaggccgagggcagggctccaggacctcacgagtgcggggtgacctggcgagggtgaccagctgccgccagaggagagggaaagcaaggagtacaaggaagctgggggagcctggggtcgggaaagggggctttctgcagccaaggcctggagtcaggaaagggggtgctccacagccgggatctggtggcaggaaaagcactctacagcggggcctggggtcgggaaagagggcgctccgcagctggggcctggcagtgggaggccatccgacagccttagcaatgaggaggtcaatggtgttgtcaaacccggacacccctaggtgccctgatctccccacagccctcccccacagggcagccaccctgtgctggcctggacttcctcccgttttaggggctcctcgtagaggcacatccacgtatgacacctgcctccgtgctcacccccagcccagacccca

SEQ ID NO: 8382 - DNA, 1133 bp, Artificial sequence
  DNA replication origin
agcctgccaagtcctgtcacagctgttgccctgtttgggcctcaccaacgtgccagtgaggtcccaccaagccatttgccagggagcctgaggctgacaaccgatcctcccctgctgggcccagcctgtgacccttcttgctccctcaggcacaggcttcccctggcacagtctctcccatctcctctgcttcccatctttccttccagaatggccggttttcagcaaactccacggtgtgagttttccgtgtgtggggtgtgccatgcttgtggctccgagcctcagttttctcatctctaaattgggggaacagcctatgccctggctgcccccgggcttgctgtggctcagatgggtcaggtgggcagggtgagcagcacgtagtgaggtggacggggctcgctggccaggcgacgtgccaggctctgaagccccccagcccattttcccccagaagaaagagaatgacgtcccttggccggggattgctggggagcctgccctgctcggagccaccaactctgtgcggccgggtgtggtatgggggtgtgtcttctgtgtgtgtgtgtggcatatgtggtatgggtttctgtatgatgtgtgtgatgtctatgtatggtgtggtgtgtgtgttgtatgggagtatgtttgtgtatgatgtgtatatttgtgtgtggtgtgtatctgtggtgtgtgtgtgtatgtggcatatgtggtatgggtttctgtatgatgcatatgtaatgtctgtgtgtggtgcatgggttgtgtttctgtatgatgtgtgtgcgtgcgcttgtgagtggtgtatgggtgtgggggggcgcatgtgttgtgtgtttctgcctggtgtgtgtgtgtgcatttgtttctgtatggtgtgggcatgcttgtgggtggtgtatgtatgggtgtgtgtggggggggcatgtgtggtgtgtttctgcatggtgtgtgtttgtgtgtgtgtgtgtttctgcatggtgtgtgtgtttctgcatggtgtgtgtgcgtgtgagtgtttctgcatggtgtgtgtttgtgtgtgtgtgtttctgtatggtgtgtgtgcatgtgtgtttctgtatgatgcgtgtttgtgtgtttctacatggtgtgtgtatgtgcat

SEQ ID NO: 8383 - DNA, 1365 bp, Artificial sequence
  DNA replication origin
cttttcaaaccccaggaccaatgaggacacagtcctgctcagagcacccggtggctctggtcacccttggacagcaaggtggacttcctgagtccaaggctcggagacccagaccctctgtgggttccttgccttccttctccttgcttgtacaccagctctctccatctggaatgttctattttttttttttccactgagtttgccttctttcttctttggagctcagctcagcataacttcttggtcagagtctttggggacctccccgttcaggcgggtgtggctctcccaccttcccattgggccagcttcctttcctttagcacacctgccagctatgccaaagcccacggggcagccagataggtcggaccacaaaaagtgggctcagtcttgcaatgtggaggctaggggaggtgagtggaggccatagaagtcagtggaggtcagggagctgagtggaggtcaggggaagtgagtggaggtgagtggaggtcaggggaggtgagtggaggtcagggagatgagtggagatcggggagatgagtggagatcaggggaggtgagtggagatcaggggaggtgagtggagatcaggggaggtgagtggagatcaggggagatgagtggagatcagaggaggtgagtggagctcggaggaggtgagtggagatcagaggaggtgagtggaggttggggaggtgagtggaggtcagggaggtgagtggaggtgagggcagatgaatggaggtcagggaggtgagtggaggtcagggaggtgagtggaggtcaggggagataagtggagatcggggaggtgagtggagatcggggaggttagtggaggtcagggtaggcgagtggaggtcggggaggtcagtggaggtcagttggtcaggggaggtgagtggaggtcagtgagtcagtggaggtgagtggaggtgcgggagctgaagcccccgcgcaggaaagcgaagaggcagtgcagacttcagacgacgggtggagaccatctggaaggactgtagaggggcagggaggcgtggaggctggcctgttggggacacaggaagagatgttttgtttgaatggggatgagcaagcgtgttgagagtctgatgatgaggggtcctggagggagggatgcttcaggagccaggataaaggagggtttgggaaaaggtgggaatgggaaggggtctagggccagggagcagggcatgcagcatgcgggagggaagcgagggctcgagggtgatcccgtctgccttgcacttcagttttcttctgtgtccttaataaagaaatcacattttcttctctttcctgaacattctgtgtaatttattgctagctcctttt

SEQ ID NO: 8384 - DNA, 1889 bp, Artificial sequence
  DNA replication origin
ggttgtgaagtaatttttgtgcagtcagggattgtcaacacattcagccaacgaacgagcctcgattccgtgccaggcagggagttggcatttgagatgagagaagcacagtcctacctgcacggtactcctgggttcagtagcttttgagggtgaaccgccaaccttcaagacatgtgaagactctgtcttcccacacctatcactgttgtgcactcatgctcttggcattccctactagacacatacttggggggggatcgagacggtttacatcacagtgggctctggatccttccctctgtttctcatctacctttccactaggctgatgttctttgatggctggacacacattggcaatgcctgctggtggtgatagtgataatggtggtggtgatggtgatggtggtgagagtggtggtagtggtgatgatggtggtggttggtgataatggtgatggtggtgatggtggtaaggagggtggtagtggaggtgaggagggtgctggggctggtggtggtgatggagatgttgatggtgttgatgttaatggtggtggtgatgacattgatgaggacagtggtaggtgtgatggtgatggtggtatggcagtgggaatggtggtggtggtgatgatggtgatggtggtgatgatggtgatggtggtggtaatggtgatggagatggtggtggtgatgatggtggtgctggtgatggagatgatgatgtggtggtgatgatggtggtagtagtgagaagggtaatgggggtggtggtgatggtggtcagcatggtgatggtggtgagggtggtgatggtggtgattatggtgatggcagtggtggtaagggtggcaatggtggtggtgtcagtgatggtgggttatggtgatggggatgctggtggtggtggtgatggtaagaaaggtggtggcggtgatggtgatggtggtggtggaggtgatggaggtgattgtgatggtggtcatggtgatggggatggtggtggtggtgtggtggttctgggatggtggtgatagtgatggaagtgtagtggtggtggtgagggtgggatggtgatggggatgtggtggtgattgtggtggcaagggtggtgatggggatggggatggtggtggtgatggtgttaaggagggtgacagtggaggtgagaagggtggtgggattggtggtggtaatggtagaggtgatggtgttgatgttaacggtggtggtgatgacactgttgaggacaatggtgggtgtaatggtggcaatggtggtggtggtgatggtgatggaggtggtggtggtggtgataatggtggtgatggtggtggtgatagaagggtgctgggggtggttgtgagggtggtaatggtggtggtggtgatggtgatggaggtggtggtgactatggtgatggtcgtggtggtggcggtagtgatagaggtagtggtggtggtgatggtggtgatagaggtggtggtggtggtggtgagaagggtggggagagtggtggtgatggtggagagggttatgatggtgttgacagtgatggtggtggtgatggtggtggtggtggtgagaagggtggggggagtggtggtgatggtggagagcattatgatggtcttgacaatgatggtggtagtgatggtgatggaggtggtgagaagggtggtggtggtggtgttggtgatggaagtggtggtggtggtgatggtgatgatgttggtaatgatggggatcgtggcggtggtggtggagtggtaatgatggtgatgagagtggtgatggtggtggtggtggtgatgggaatgtggtggtggtgagggtggtggtggtggtggtggtggtggtggtagtggtggtggtggtggtga

SEQ ID NO: 8385 - DNA, 954 bp, Artificial sequence
  DNA replication origin
ccccagctcgccggtctcctgaaggctgggccagcctcggctctccgccagcctctgcccggctctctgagctccagcgatactgtatctaaccgccagccctcctccgccgcccgccccatctgcgcacactcgcaggcacactgtccttggcctttgccagtgctgtgctctctccgcgaacgccctaacttcagctggccagctccttgtagtcagggagatccccttgcccctcctgagctttcctggaacgtggcgctgtcccaggatgctgttaccatctgatggcctctgccttccagagcagaggaggaggtggggaggagggcaggggcagcctcagcccctctcccagggctccacccacagtgaatgttgggcatagcagggccatcccccctaagtcagagtaacccgctggtgtggagggcgaggccatgggaggagctggcccttcctgtagcaccctgggctggtgggtggtggctccactagctgggatgggcaaggaggagggacacattcggggatagagtgggggaattagaatcctttcctagcagggcatttccaccctcctggagacctgcagctctgcagagactgatgttgtagcgcacagtggaggcttgtggcttgttgcaagatttttgttgctgttgaggtgtgtaccggtctgtaatgctgaacatctctgctctggagtctggggtaattcttatctgtagtctttttgcagtaagcagctcccaaaggctcacagtgtggacccaatgcatgagatgactggcattttcctccttcacaaaccacccatgactcccaccgcccccacgacctcaccagttcctcacatcctggcttccccagcccatctctcccctctccctgccacaatgtctcagccacgcctgctgcctctgtgttgcgtagacatgtcttcacacttgg

SEQ ID NO: 8386 - DNA, 1033 bp, Artificial sequence
  DNA replication origin
gccccgcccccgcccccgccccgggcagatgccgggagctctcctgccgccgtgggagggggagctgagctgccggagcgtgcgcactgggccagcgggcggccggggcagggctggggtcccggcgctgagcgcccccagccgcgccgggcagcctggcgcctcgctgagtcggagcaacccccggcaggagctttcaggctctggtcaagcctcgggacccgggaagctatccctgccctcgggggctcgagcctggagtggggcttgcaggtaaagcggggctggggccgtcctggccgtcagtggtcaggaagacgcagcgaccccggagatccatgtccccctctgtacgcatgagaggtctgaaggtcagaggttaaagcgcacgctaacggcggcagagccagcaagcggcagagctgggcggatgccagcctagggagcctccccccaccagcccaggctgcccccagcaaagccacatcagcaggtcatagccaaatgaaagatgtgctgtcgagctgagacttgggaggggcaggactcagctgggcaaacattcattcagtgtcattagacaaatatttattgagcacttgctgtgtgccaggtagtcactaagatgtggggacaccacagtgaacagcagagaggaagcggctgcccaccagagcttactttctagcaaggagaaggcagggaagagcacccaccaaagggagcagcatgggggaacaccctgactgctgtgaacgggacatatttgagaatctgataaaagtatctgggccacagaatggtgagagggagtgtgtggaagatggggggcgggggcacagaggggcagcacttgcaaggtcttgcaggctggcgagagtttggagactgtctcacctggaaggtggtcccatggaccattgtcagattgatattttttaaagtgcatcagtcaggataagctatgttagccacagtaacaaccaaacccaaatctccctggtgtgtcttgcccacatcatacatcctgcct

SEQ ID NO: 8387 - DNA, 1478 bp, Artificial sequence
  DNA replication origin
cccacccctctcccccgcccactgtccccgcccagccccgggctgctcggaaaggccggagtccggagcacagcaacgcgcggagcggcccggcccctctggtggtcccgcccacgcgacccgggcgcagcggcgggcgccggacagctgtcccggcgggcgaacgacatgcagcggaactgcgggaggctgcggttcggtggctggacttgcgtcccccacctcctctgtcgcgcgtgccctgctccccagtgagggcgtccctgggatgggatctgggcgcccggcgcagcgcggctgacaacagccgagcggttccggtgcgctggcacgtggctcgggcctgcccccccggcctggccgcctcccggcgcgttccccggtgcaggtgcctggcccgtgccccgccatctccgcccggcgccgcctgtgctgaaggagccacgccccgggctccggagcctgcctctgcaaagtccaggcccgcggcgcgcaggtcagggccgctgctccgggcggacggggacgcgcggtcacaggcaactcctgtcctaagggcaagtgagacaggatcagggctggtatgaaggcatctccattagcagggaaccagacaccttccatctgactgctctgctatccttcgcatgctgcctcatggtccaaagtggctgctgagcaccagccttcgtgtctgcattctagccagcaggaacgaggtaagagtgaaaaaagatgccatttctttatgaatatgtcccagcagttcatgtagatcacaagaagccagtccactttacaggcagaggtggactccaaaaggtctgatgactctcagaaggtaatgtgtgcagcgggggagcaggattcaaatgtaagtggactgccatccgtacaatagcagccaaccggagggcttcctgcagtccagcacctatccagcacttacctagtcgtttaatcctcacagctagtgagagaagagctggttaccctattgtacagaggaggtcactgaggctcagagagggtaggtgatgtgctcaagacttcagagccagtacatggagaggttgggactccaatccgggcagtctgctccagaatccacactttgaccaccaccctccactgtcgctcagccttgtaaactctccccttggaatcctgtctgcaaacctggttcaagttgagatgagaaatgaggcaagggagggccattggtgtctaacagtcccgtgttcaaaaataataaagtacagcgtgggcaacatagtaagaccaccgtctctacaaaaaataaaaattaactgggcgtcatggtgtgtgcctgtagtcctagctacttgggaggctgaggtgagaggatcgcttgaacctggaagattgaggctgcagtgagccaagttcacaccactgcactccagcctgggtgactgagtgagaccctgtctcaaaaataacaataataataataa

SEQ ID NO: 8388 - DNA, 1073 bp, Artificial sequence
  DNA replication origin
ggccaacatggtgaaaacccatctctactaaaaatagaaaaactagccaggcgtggtggcggatgcctgtaatcccagctactcaggaggctgaggcaggagaattgcttgaacccaggaggcggaggtcgcagtgagccaagattgcggcactgcactccagcctgagagacagagcgagattctgtctcagaaaaaaaaaaaataaaaacagaagaggaaactggatacagacacagagaagctaatgccatataaacagagacaaggaagactgtggaacaacggagacgcgatgggagcgatgctgccacaaagaccgccagcaaccagcgaagccaggagagaagcaaggacccaggaaggagccaaccccgcccacacctgggttgcagactcctgaccctaggactgtttgggagagtgcatttctgttggccgaagccactcattgtggcgctttgttacggcagccagggcaccaccagcgaggggcagaaaccagcgggtgagtcatgtgcaggccaggaacggagaaagaggaagaggcaattcacaggcaaagacacgaacaaaacacaaacaagggagaccaagagcgcctgcattgagcaggggtgggagggtgcggtggagggcagcaggagaggacgctgtgtgagggtggggaaggagggctgagagtgggcgccttcgtgaagcagggactctgggcagagagaatagcatggacgaaggctctgggctgggaaagagcttggtgtgttcaggggacaggaaggaggccggtgtggctgagtgggtgggaggggcagagaggggcctgagctcagcggggagggtcactctcggaggccacaggaaggagtgggcattttcttctaagtgcatcaggaagtctttggagggttttaagcaagagagtgacatgatgggattgatgtcatttggactgctgtgtggaggatgtgaaagcattcattcattcattcattcattccttcatttcaacaagtaataatacaaacaacctcaggaccgtgaccaggcctgtggacaaaagaaatggcaga

SEQ ID NO: 8389 - DNA, 1113 bp, Artificial sequence
  DNA replication origin
ggccgcacgcggcgctgcgacgccctggggcctctgggccggcagaaaagttgttcgggagcagctgaacgcggcgcaaacgggagatctgcggccgcgggggagcaatctgcactcgctgctgaagagccggctagcgcggccttctgcacgagggggcggggcaggggcggggccttcggcctccctccactccagacgcggccccccggatgcggcgccagctcggcctgctgagtggccggtgtagccgccaatcactccacatctccgccaatcacggtgcgcctcgcctagctgcggcccggcactccccctgcgtggttgggcccgaggggccagaaggcgggtccggctcgcccacagcgaaagtttccgagcggactcgggccccggccccgcccccgccccgcccgcggaacgtccagttgcttagcgaggccgctcgccttctcctgtaacaggtggtttggacccgtggaaaaggctccggccacctttcatccaccactccggcctcagcgtccccaactgcagattcattatatttgctgttgcaatattaacacacgtcttgagcgcctattccggcgctgcaagagagtctaagggctcccctaataacagcagcagagatggaaaaatggggcctgtttgaaacgagtgtctgcagccaagtactgctttcagtgcccagaatcaaatgcagtgtagcaagcttttcacacggtgactgtgggattcctttaaagtgtgtgttagcccagggagtgggcaaggctcaggcagtttggagactctgggagtttggttcctgtctgggaggcgtggtttggagatgagggcgagggtctatccttgagaggccctggggaacgtgagaccctgcctgctctgtctctggtccccacaaccaacctgagctacctgtcctagttatcacagcagaaactggggctcggagtgactgtcagagataatgcttaccaacatgttgggagcaaatattccagatggctttggagatgagttctgaacacactacttcggaggacttttgtcaaagcggcgtagttcatgtcagtcacctcatttgattctccagctgccccc

SEQ ID NO: 8390 - DNA, 1137 bp, Artificial sequence
  DNA replication origin
cagcagggctgcgtgcagccaggcccggatcgggaccagggaggagcctgggggtcgtccagggagaggcgagggtcctgaaccagggcaggcatccgagtgaggctcaggagccaggagagacccaactgggagtgaggaatgaagggcacagggggtggtctggtttgtggctggggctggctggctgtggtggtaccacttccggaagtagggaagtgggaggggaggggagccgtgtaggcataaagctcccgacctattatgattcttattgccaccgtcaaggatgggtgtttcgggtctgtctggcagtgcagacatctctgggggttgagactgagctgaggtcccctctgtgaccagccccagaagcctgtccagcactggtccgggatgggcaggggaggcctaagtcagagacgccctccatgctcttccatcctgggaaagaaggtgagatggggtctcccagccaacttttcctgtgtctgcgaagggaggacaaaccagcaggtagggaaaagaggctgaaatgtggagaagcctccctccaaatccctggttggatacaacggagaccccatgggaatcacagacccttggacacagaagtaaacaggtggcgacagtgacaaaggtggcctctgggcttcccgtgggctccctctcctgctgcagagaacaggcagccagcacatggggtacccagggcacagctccttgagtgatggatgctggcataagagaaagccctttacaaactgcaaagccctgggccaaatgccaggggtcactgtccaaggtgaggagagacggggctgcttctggagagatagggcagaggcctcacaccaggctctgccccatcagcttcgtggtcctgggctggcaccaaaccctgctgagcctcagcttcctggggtgtcaaacggggactataacttctccgcctaaggctactgagagggttaaatctgggtggtggggggttgcacaaatgcgacttccttggaattcataacatcatctgctaagtgggtgagaggccagggcgccatcacatccaaaagggctgggtaggattctccagaaagttttcgttgatcaaacaaaaagctaatgatccagagggtg

SEQ ID NO: 8391 - DNA, 879 bp, Artificial sequence
  DNA replication origin
gattgatgttaacgatcagattgaagctgcttcggagcagtgatgtggcctgcaccaggtcgcacagcaccttactgtggagcatggatccacacgtgcgtctgtgtcattgtgatcgctcacgctgctctgtgggcccatggccttggtgcctgcaggctctgtgtctgcagttcctctagggatagtgagtctgctgctgagcccgcagccagaaaccacgctggggggctggcagggtgacggcagcaaggaaggagaactgtccttgatggattcagggagcaccaaggtctgggggctctggggagggtgggtgtccaaaagggctgccctgcgggacctgatgccatctctgagcagcgtccttgaggaccccggcaaggaagctgagcccgaaactctgtgcaagagttgcgtccagggagagttacatccagggagagttacgtccagggagaggggcgtccaggaagaggggcattcagggagagggacattcagggaggagtcttccagggacggggacatccagggagaggggcgtccagcgagaggagcctctagggaggggtacatccagggaggtggcctgtcagggagggtggtgtccagggaaagcagcatcaagggagaggggtgtccagggatgggggcatccagggaggggggcttccagggagaggggcctttgtgttggcgagttgtccatccacagggctggagtgcgtgtgcctgaccacgagagcttgtgaagaatccatctgattctttccttctccaaacacatgcctcacccacacagccttacctgtgagggcctcacctgccacctgcgacttttgagttgtcccagcctccctctgccctctccaaact

SEQ ID NO: 8392 - DNA, 744 bp, Artificial sequence
  DNA replication origin
tctacagtgagctactgaggcctgtgctacctgccacttgtgtgggcccccccaaggctgcctcatctctttgctgcagctacacctgggtgctgccccgactcctctcctcttgcacacacagctgatccattaggaggtctgtcagcgcccactatcacggctgccatcttggatgcagcctgcctcctccctagggtttctgcagcaccctggcttgtctccctctgccctgccccagcatggtcctttctttcccatccttcccctggaggccctcctggtcaccatctcaccacggcaactggggtccttcaggggcctcattccctcctaggggatcatgttggatagaggggtcagtgggcacgtagctctcgcggatcacgttggatggagggatcagtgggcacgtagcaggctcttggtggaagatgttggatggaggggtaagtcggcccatggcaggacgcatgttgaatggacgggttagcaggcatgtagtaggcccatggcagacacttgttggatggaggtgtcagcaggcacatagtaggtgtgtggcagatcatgttggatggagcggtttagcaggtgcacagtaggccctgggtggatcacgttgaatggaggggttgggggcgcagatcatgttcgatggagcggttggcagggtactgccctacagggcggcttgtcacccgtgctgtgagaagccccacgctggctgaagaggagggtgtc

SEQ ID NO: 8393 - DNA, 1161 bp, Artificial sequence
  DNA replication origin
cccctggcacttctgaagatgcacagaacctgctttgtatgccacgccatgctgtgtgagcactggcaccatggccactttgtcccccatcccctccagtccctctgcctggctgccctgtgttctggcagggctcagggcctctgagttctgcacagaccaggaaggcatgagggctggccctgggtggcagcgctgcttcaccccatcctgaggctgctcccagcatgcctccctcagccctctgctcctcttggctgtggtgaaggccaagagctctttctgaccttagcgctgcatgcagagcaggggagcaggacccacaggtcgggggaaggcagcctttggccttgactatggggaggtaggggtgcgctggtgtgtatgtgtaggtgcacacgtgtaggggtgggtgtgcatgtgtgagggtgcacgtgtgggggtgggtgtgcacgtgtgtgtaggggtgggttgcgtgtgtgtgaatgtgtataggggtgggttgtgtgaatgtgtgtgtaggggtgggttgcgtgtgtgtgaatgtgtgtgtaggggtgggtttgaatgcaggtaggttgcgtgtgtgtgtaggggtgggttgcgtgtgtgtgaatgtgtgtgtaggggtgggttgtttgcgggtaggttgcgtgtgtgtgaatgtgtgtgtaggggtgggttgtgtgaatgcgggtaggttgcgtgtgtgtgtgtaggggtgggttgcgtgtgtgtgaatgtgtgtgtaggggtgggttgtttgaatgcgggtaggttgcgtgtgtgtgaatgtgtataggggtgggttgtgtgaatgcgtgtgtgtaggggtgggctgcatgtgtgtgtgtaggggtgggttgtgtgtgtgtgtatggggtgggtttgtgtgaatgcgtgtgtgtaggggtgggttgcgtgtgtgtgtgtgcacgtgtgtgtacgggcagaaggtggcctggcagctgcttctcagggtctccggccatagggagggcagctcacccggcagccccgtgcagctgaacggtatttttgctgggagagtggtgctgggccctctgcctgtgtctgcactgaactccctttccctaatgcttgctctgccacccctccggggactgcctgcggcttctcctcctcgtaaggatcgccatt

SEQ ID NO: 8394 - DNA, 1311 bp, Artificial sequence
  DNA replication origin
caggggcacactacagaccgccacggtgactgcgatcttggtgagctccagagacgtgaaccaccgggcgaactgcagcacgcccaccagggccaggccggccaccaggatggggagggcaaagaggaagaggaagtagccgatggaggcgcggagcagccccaggccggtggactccagcaggatgaccacggagagctcacaccacatgaagcacaccaggtagggcacaaggtagcagtaggtgcccttgaaattcctcagctgtgccatgcggaagaagagatagagcaggtagacatagagcaggcacgggacgctgacgttgaggacgaccaggtggccgacaggcacggtgatgaaggtctggccaaggaccttcaggtagggccaattcaagggcatggagggcagcagcgatagcaggccggcggtgacctcggtggccagggccctgcgcgtgtagggctctgcatgggtgctcaggctcaggtagctggtcacggtaaagaagccggtgatgacagccagctccgagcaggggatgcagtccttgctggcgatggggaaggagaagatgacgaagaagacagagagcaggaaatgggcatagggctccaggtggttccagccgaagttgacctcggcctgctccacatccaggttgggctcgaagcgcagcagcaggtcggtgagggtgcggaagttctcccaggccttgctgtcctggaacaccttgagggtgcagatcaccatggagatgaaggacaggtagaagatgaccagcgggatgaagaaggcgaagaagtcgatggtgaggttgctgacgatgaagaagaagatgagcgcgttgatgtggtgcgtggggatgatggtggacagccagtgcatgcctgccctggaggccatgtcaatcaggtactccttgatctccatgatggcgtgcagggggtacttgaccacctgggggaaagatggtacgtgggaacgaggctgggacaggacccccactgctcccatctcacgcctccctctgaccaccctgcctctgggcaaaaggaacccgcacccttgcgttttcccatcaccagccccatcctagtggtcctccctccccccttctccaggtggccctccccatgctcgcggtccctgtgagccctccctcttctgggcctggagcccccctctgccccgtgcctggctccccaccttctaccagcgtgactagatgcatgtgtgcttctctccctgcaagacctccagcactggagggacccacgggctccccacttccctcccctcagggtc

SEQ ID NO: 8395 - DNA, 1106 bp, Artificial sequence
  DNA replication origin
cctctgggctggccgaggccggagccggatccctcggcttgtggggaggtgtgcagggagaggcgcgggcgggaacggggctgcgcgctgcgcttgcgggccagcgagagttccgggtgggcgggggctcagctggcctcgctctcggaaaagccggtcggcgccgcccgccacgggcggtgaggggcttagcacccgggccagcagctgtggagggttcgccgggtcccccagcagtgccagcactgcgctcgaattctcgccgggcgtcagctgcctccccgtagggcagggctggggacctgcagcccaccatgcccgagcctccccctggccgtgggctcctgcgcggcccagcctccccgacaagcgccgccccctgctccgcggcacgccgggtcccatcgaccgcccaagggctgaggagtgagggcgcagggcgcgggactggcgggcagctccacctgcagcccggttgggggatccactaggtgaagccagctgggctcctgagtctagtggggatttggagaacctttgtgtctagctaagggactgtaaatacaccaatcagcactctgtgtctggctcaaggtttgtaaaggcaccaatcagtgctctgtgtctagctaatctagtggggacttggagaacttttgtgtctagctcagggattgtaaacgcaccaatcagcaccctgcaaaacggaccaatcagctctctgtaaaacagaccaatcagctctctgcaaaatggaccaatcagcaagatgtgggtggggccagataagggaataaaagcaggctgctggagccagtaatgttgacaccctcgggttgtcttctgtggtgtggaggctttgttcttttgttctttgtgatagatctaattgctgctcactctttgggtctgtactgcgtttatgagctgtgacactcgccgtgaaggtctgcagcttcactcctgaaccagcgagaggaggaacccaccagaaggaggaaaacgcggaacacatctgaatatcagaaggaacaaactccagacacgccgcctttaagaactgtaacagtcaccgcgagggtccgtggtttcattcttgaagtaag

SEQ ID NO: 8396 - DNA, 928 bp, Artificial sequence
  DNA replication origin
tttactacccctaccgtacccatcctcctccacaggcagggaggggttggagggctcacaggagggagggagggaaggaaggagggagggaaggagggatggagggagggagggatggaagcagggagggagggagggatggaagcagggagggagggagggaaggagggagggagggagggatggaaggagggagggagggagggagggaaggagggagggagggagggaaggagggagggagggagggagggagggaaggagggagggagggagggagggagggagggatggaagcagggagggagggagggatggaagcagggagggagggagggagggagggagggagggaagtaagtcagtagggctgcagcactcatcgtgcactgggctcactctgtacagcatctttgctgcctgcggccctgcctgtacccagggtggtgccaggcctggctgcaaccccctcctcctgccccttcctgaaaagcgcccttggctcctgttgtagggaggagcaaggccagggctcagggaggtgaaggcgttcaaggccacacgaggggctcggggattgagaccctggcagcctgttctctcccagctccctctgcgagcggcctcacccttccttcccatggtgctgattttctttctggtcctcccttcaatgtgcccttgtggaaagaggaaagctcgggccactgagaagggcgcccctgtgaacgatggagggagattgaggtcgcaggcaggcctggggactgggggcgtgtggaggggtgggttgggctcctggaaagggaggcgcctactgtcagttttgagtttcgttaaacacctgccagcctgatagcattctaattccaaaatatgacaccacttattagtggataaactaggctccctccctccttcctgatct

SEQ ID NO: 8397 - DNA, 1482 bp, Artificial sequence
  DNA replication origin
tgaggaaatgggagttctagagaaggagcggtgtgggggctgttggtgtggggggctgtcggtgtgggggggctgtcggtgttgggggctgtcggtgttgggggctgtcggtgtgggggggctgtcggtgtggggcggctgtcggtgttgggggctgtcggtgttgggggctgtcggtgtgggggcgctgttggtgtgtggggctgtcggtgttgggggctgtcggtgttgggggctgtcggtgtggggggctgttggtgtgtggggctgtcggtgtggggggctgtcggtgttgggggttgtcagtgtgggggggctgtcgggtgttaggggctgttgcgtgttgggggctgttggtgtggggggtctgtcggtgtgaagggctgtcagtgtggggctgtcggtttgggggggctgtcggtgtggggggctgtcactgtgggggggctgttggtgtgtggggctgtcggtgtggggggctgtcggtgtggggggttgttggtgtgggggggctgttgggtgttgggggctgtcgggtgttgggggctgttggtgtgggggggctgtcggtgtggagggctgtcggtgtgggggggctgtcagtgtgggggctgttggttggggggctgtcagtgttggggggctgtcggtgttggggtgctgtcagtatgggaaggctgttgggtgttgggggctgtcggtgtggggggactgtcggtgttggggggctgtcggtggctgcccatagcactggcattgcgtctgctcttatttcccaactcccaggaagcaccttgggtgggttagtgtcctgtggctgctgtggcaaattgccataaccttcatggcttcaaaatacagatatattctcaccgtcctgggggccacaagttctcaatccaggtgttggcagggccgtgctctctctgaaggttctaggggaggaggcttccttgtctcctccagctccggggctccagatgttcctgtagccatcgctcccatctctgcctttgtctccacatggccttctcctctggtgtctcctcttctgtctcttagaatgtcacttgtcattgcatttagggcccacctgggtaatccagggtgatctcatctcaagatctttaactacatctgcaaagacccttttcccaaatgagatcacactccacagtctctggggatcaggatgttatggacacatgctatgctgatgtatttgtgggggccattattcaacccactgcagtggagaaaaatagtctgtgctcagttgaggcatatgggattgaagagcgattttaccttctctccttttcatcctctctgcataacttgctcctctctctggaattcctacctgtgtctgacaaacttttcttgcagggaaaatgactcttagatgctagagtgtgattggaagggaaacaaatcccaccagacagttggagtggaattagatgggaaaacagaagatga

SEQ ID NO: 8398 - DNA, 1381 bp, Artificial sequence
  DNA replication origin
caactttaacagctgcttccccttgagatggtttgcaacctcctgccccctgagccctgatcagaggggaccacaatgggctgattcattcattcagtcagcaactacttactaaacacctactgtgtgccaggcactgaaggtgcagcagcaatcctgacaggcaggtccctgccctcgctggggacagatagcaacaaacaggccaataatgtaataagcagtgattaatgcttgcaaaaagagaaagcagaaaatctataattaaacaaggtaaaataaatgtttattttgaggggcagaggagatttacaggaggttactttgttaaggagcattgaggcagggatctgaagggcatgagtgtgagggccctgcagtgggaatgtgcccaacacgacctgggttgattggacacctcctccgtgcgcacaacctgcagcttcttctaaggggcaatggggcctggctgtggggggctgtgggcggaggaacccaagctggattcgcaatcacgcacccgggctcaggtatcagctctgctgctcactgactgtggaaccctctgagcctgtctctggacctaaggaaagcaaagtggagcaccagctgccttctgcaccctgttagtgtgtgttggggtgggggtggggggcaaatgaccgtgaacagagtttctaaattggaagggctgttcccagggaaaggttcagagtcgtctccccatctaatatttgcccacggatcagtcatgcagcgaacatgtcccaggcaccagctctgggcaggtcgtgtgtgaggggtgtgggggcacggaggtgaatcaggaggtggagctggccctggagccgactgcagggcgggacagatggtcacatacacagcacaatggtcctgaggatgagcagacgggtaaggccttgccttggtgttcaggcagagactaggaatgctccggcaacttcgaactgctggatatggctggcgggtatggagggagaagcggccaaggtgagactgaggaagagcaggcaggggcagcacgctgggcaagtccgacctcctcggtggggtgggagaggccaacacgcagggtggtggggagtcccgcagctgtttgaggaagttcactctagctgagcttgggcacggacccccatggggacagagatgctgatggcctgggctgaggggcagagcgcaaggggttcagatggaggaaccccaggacctgaaggctggctggacaagggaagggcttagaatgaggaagaagccccctgatgcctggcttggtgccccagggctggggatgaggaaatgggagttctagagaaggagcggtgtgggggctgttggtgtggggggctgtcggtgtggg

SEQ ID NO: 8399 - DNA, 948 bp, Artificial sequence
  DNA replication origin
tgggagattcaagacaggaggatgaggccacatccaggtggcttcagataccaccgtgagtcccatagagtgtccagttactataaagtctgccagccactgtggtcgccccaggcctgtgccaagtcccgagatctctgccctgcagccagtgcagagggaagaggagggcaggaggggacaggttggtggcccctcgccgatgctcctgacccctcaggctccctgctgcctcctgcccagggctgtggggcctcggggagcggggagctcgccattgctgtggcactgttgagcacccgggagaggcgggttctgacagccaccccttcccgtcttgctgttcccctcccagctgacatcatctctaccgttgagttcaaccacacgggagagctgctggccacaggtgacaagggcggccgggtcgtcatcttccagcgggaaccagaggtgcgaagccctgggtctggtgggaggtgggaggggtggggagcagagtcaggtgggaggcgggcatggtgggaggggataaggataagggggataaggggtgatgcggtgagaggtgggaggggactatactccaacccacaagagggcttttaactgacaggaggtgtggggtgtcttgcctggatcacatctcccaggggcatggattccaggggtgggaatgggatgctttggaatgccgaggtgggagtggcgggcggtggtagggggagtgcactgggtgggctggcaaagccaggttctgagccccctgccctcagccgatgtttgcggagagctgcctgcatcccatgctctgtcctagaccctggatgaatggtcaggatgtggcacaggcagctgctgccccagcttgtgccttcagtgaaaccttcctctgcctgggtgacctgcgttgtcctggccagactggggagcgggaggactccactc

SEQ ID NO: 8400 - DNA, 930 bp, Artificial sequence
  DNA replication origin
atcttaattttatttctctattttatttcattacagaaacgtttgaacgtgtagacagtagaataaaggggggggggggaaataacatccttcatttcactactccagaaacactgctcacattttgttgcatttccttctaactaccccctgcagattgtactatgttttgtgtcttttaaaatattaaatgcactgtcaacattttcccagatcatcctgcactctgagttaacaatttttattggctgcataatacttcacgatgtaggtattattattcattcaataactatttatggattcattgatccgattagtgttgattgtctataacaggtgtgtgggtggggtagggggattcaggaagaaggaatagggcgcagctccccccccccaggatttctggaatgagggagacataacagatggctgtgatccggtgtgaggggcagggatgcagtgggcccgttgcagcctgggagcaggtggtcagagatgcaaggctgtgggcagcagtggttggtggtccacagcagtaggcagcagggggagggggcgacattcatggcaggagggacattatgggcacagcacggcgtggtgtgttcagggttggtggagcgttcacttacagtcttgcagatcctggcaggtgtggtggtgatctgtccaggcaggggagggagagggaactgagagtcatcaaaagtctctgggagtttggaaaggagagtagggggctcagagggagtgtgagcacttccagcagaggtgagaaagcccccagtcagttgcccagggtgggcagtggaagggaagtggaggtgaacgttgtggggtggagagggttttcaggcaggctgggagctgcccagtgtgctggaggaaggctgggtctccttgaatggtgtttggtcaatgcaagac

SEQ ID NO: 8401 - DNA, 1538 bp, Artificial sequence
  DNA replication origin
cgagtgcggggactgtcagccgctaacccacgggctggcggcccggccgcagaagtgtgcgcggattccccgggtgggtgccccagtgggaggggccctgggcacgggtcccgcggggcaggtgcgcgtgggtgcctgtgtcagggagaccgagtgggccaggcggcggagaccgggctcctgcggctgggtccgcctcctcgaagcctggctctgccggaaatgaggccgagcggagccggagccccgcggaggcccggggagcgcagcgcgagcgcgggcgcgggcgggctcggggcgccctggcccgggaggcagaggctgggcgtgggacctgggcggagggaggctgcgggggccgcgcccgctcccggcgggagaaccgctgagtcacgcacgcttcgccgccgggtgtgtgcgagagaggggcagggctgcccgggcctccgggccggtggggctctgacccggccgcggctttgggaggcccggggagctgagagcggtcctttgtcgcctgcttcggcgaggctgagtcgggatcagcgtgggtccgggatgtggtttctgctcgcagcctgcagcgacagagggttggaggaagccgccgggttgctggcccgtgcctcggtggcctggctcgggccgagagcggatcttggcaggttgccccgctgctcccaggctcgctgtggtctggcttcctggagcaagcctctgtttgctcatctctacgttggggatgacggtgggatggggcgcagggctcgttgtgggaccaggcgtaaaaagcgccatggtggacattttcaaacattaattccctctgcaccctgcccgtccccttttctttcataaattcaccagccctcagcagggcacaggaacggggacggcacagttctggaggtcagagcagtgctatccaatccttcatccagacacgagatatttaccgagcacctgctgcatgccgggcactgttttatccctggggactggacaaagactccctgcccttgtgcggcctgaattctatcagggagctatatgaccttgaggtctgtcttctcaccagggctcagtctccccatctgtaaaatgggagtgaatcctgcctacagggtctggaggtttctgtgaggagcaggtgcaacggtgttgaaggagccgttcagagctatgcattgctaacgtgcagccaaaggatgctgagcacctgctgtgtgctgggacctcatacgaaggctcacctacgccttatccccaccttgagatgaacaaaccaaggcctggccttgtgcctggtccagaccgagtgccagtgtgtgcagggcatagggctcaggtgctgcggatgcagagagcaggatcggaacaagaaacaataataatcattataataggtagaattctggcctccctaatgaaaaacacactttcacactgttgcatcctgactatatttcatgctcagagcacagggaaggtcacagatttgaatgtcagaatgtcagacttgaatcatgttaaagtcc

SEQ ID NO: 8402 - DNA, 1222 bp, Artificial sequence
  DNA replication origin
acaccgatgcaatccgcagaggtcgcgccgggcgcgcgggccatgccgccgcagcctagcaggggcgcgggccgccggggccccgaagggagggcatcgcggcagggggacgggcgggggcggccgggggcgggcgccgcggtcaagcgagcgcgcggtgggcgggcggcggccgcgggttcgggcgggccggggcccaggcgcgcatcccggccggcccgtgcgcgctgcgtccgtgcgcccggcggcggggcctggtgccggtgcgcctggctgcggcgacggcggcgaggggacgcgcgcggcgctgcgctgcgccgaccaagccggggccgagccgggctgcgcgggctggggccgccgccgccgccgctgtcgcaggcccctccctcgcgccgcccgctctccgcccccgcggccctgcaggtggagccggcgcccaagccgaggctgcaccgccgtgctcgggccctcgcggtgggcaccttggtgctgggtgcgccacgggggagggaggaaggagaccgccagcttgcggggagagggtgatcagctgagcttggggggagggtaccttgggtgcccaggtgctccagttatgggagagaaggccaagagccggggtgctgggaagggggcaggaggagagcagcctcgcaggcagaaggcagaaaggactaggaaggaaggagtggggtcgcagttgaagagggcgcacctggagaatggggactcgggggaggggaaggacactgtctcccttcattagtagaagagggtgggtcgcgcaagttctggggcccgttgggagcattaagtacatgtgaagaagctggtggagggggtccagcagccgacaaggcaaaactggatgaaatggctggaggggtgattgggcctcccccaggcagggctctgagatctctcctcatgcccacctctcctgacgagtgagaaagttaaagaaatacagagctaggtacctccaaaaccaggctggaaaatgcgtccccctcctcccttccctccctcccctccaaacccagggctctgccaaacaggaacctccctctggtaatcagcctggcacatagtgggccctcaaaaaatatttgcctcctgttttgccaagctgccacctcctccaccgtgacccaccgcctaatgaatcacagtcccctgcacgggacacaagccccagtggggattcagaggtgtgggt

SEQ ID NO: 8403 - DNA, 725 bp, Artificial sequence
  DNA replication origin
agcccagacactgcttgtggtgggggtggggcaggatggggtggtgaggggtgaggaggggatggatgcaagccttggggcccagtcaggttggaaagaccacccactgcagggtccccagcatggctcagaagctgatgaaagggatgatgtactgtgtcaggccagagtggggctgttttcattgtagtccaggacatcccgggagatgaggctgatgccagcatagggtgggtgttttggcaggattgacagatagggagaggggacttctccatgatcagagagggaggctgaggaacatgcgggagggtgggcctcagcatgataacaagagagctcccaggaggcctgacccctgctgagcaggactggccaccccaacccagtggggccactcctgccatcacatccactttacagatgaggttgtgcctgggcccccttgtggtcaggacttgaacccagcctgtctttctcccagcatagccattttgctggctccagctagagaggtgagggggtgtggacagagagtggggggctggccttaggatgtgaggtggggggcatgtgagcagacaggtgagagagagagaggagaacatgccaggtgggtgggggccaatgtgggtgtcggtcactttcctacggggtagaaagtgacaaagaacaagcacatccttccggcccttgcatttacctggtccttgaatggagtctgc

SEQ ID NO: 8404 - DNA, 931 bp, Artificial sequence
  DNA replication origin
catctccatccccgccttcatctccatctccatccccatctccatccccgttcatctccatctccattcccgccttctcctctgcaccagtcatggcccacacagtacatgctcactttatgctgtccatctcaccccactgggaggccagctccacgagagcagagcatttctctattctgtcttccacactaccctagtgctgggaacatgcctacacatagtagatgctcaataaacattcctcattgaatgaatgaaagtacagagaggagtctgtacagagaggctgggggtggcaggatctggagctcaggctctgtcagcgggggcagggctgtgtgcagatacagatgaggaagcagcagattgtgtgatttagtggaggtggggggtgggcagggggctgagggagagtcctcggttgtgctggagggggagggcttccaggaaatggaggagacagtgtggaggagcccagacactgcttgtggtgggggtggggcaggatggggtggtgaggggtgaggaggggatggatgcaagccttggggcccagtcaggttggaaagaccacccactgcagggtccccagcatggctcagaagctgatgaaagggatgatgtactgtgtcaggccagagtggggctgttttcattgtagtccaggacatcccgggagatgaggctgatgccagcatagggtgggtgttttggcaggattgacagatagggagaggggacttctccatgatcagagagggaggctgaggaacatgcgggagggtgggcctcagcatgataacaagagagctcccaggaggcctgacccctgctgagcaggactggccaccccaacccagtggggccactcctgccatcacatccactttacagatgaggttgtgcctgggcccccttgtggtcagga

SEQ ID NO: 8405 - DNA, 897 bp, Artificial sequence
  DNA replication origin
caggcgtgagacaccgtgcccggcctcaacaaacattttctaagagggcctcctccgtatcaggcacatttccaggggctgggcgttgttgggctgagaagacattctggtgtgcgtgtgtgcgtgcgtgtgtatgtgcatgtgtgtgcctgtttgtgtgtgcatgcacatgcatgtggggcggggcagggacacagatagtgaagaataaatgaacagaaacaatttcgggtacatataagcaccatgaagaagttaaaacagggtgatggatagaaggtgatgatggagaaaggccatttgaggctggatgtccagggaagatcagagtaggtgtcatttgaaccaagaccagagaacaagggtgagatctggggatggagtttcagggaaagggatggtaagtgcccagctggtcagccttgctccagggacagaaagaggctagtgaatcttcagggtcctgagcaggggtgggggtggtgggaggtggtgaaagggggccaggccatgcaggttggagtttgggcttactccatgtaagatgggagggatttgaagcaggtgggtggcatgatcctgtgtaggttttgtaaggccatttgttctgctgagtggagaatggattgagtggggcaggaatggagatggggagaccagtctgaagttgcaggtgagagatgtggctggcctgactatggtggtggctgtggaatgagaggacgttagaagcacctgggacacttgtggaaatgacatagacaagaataacaaatcagttacacgtggagggtgcaggaaagggagggcccaggaccctggtgacagcccccaccaagtgcacttactgctcatgtgcattgcgtggagtcggccttgtgacagcccaggaaggtg

SEQ ID NO: 8406 - DNA, 1868 bp, Artificial sequence
  DNA replication origin
tccaaaaaattagccaggcatggtggcaggcacctgtattcccagctactcaggaggctgaggtaggagaattgctggaacccgggaggcaaaggttgcagtgagccaagatcacaccactgcactccagcctcggcaacagagtgagactccgtctcaaacaaaaaaaaacaaacaaacaaaaaaaaaaacagaaaatgtttgttgaatgaatgaataagaggaactttatttgatttctgtctccaacactcactagctgtccctgaatttgtccttctcttaatttcttcatctgtaacatggagataataatcgcccattgcatgcggtttagtgagtgttacatgagaaaaacacgcaaaatgcttagaacgatgcctggcatggcgtgagtgctcagtacatgttagtcgttccgctggtgatgctgatgctgatgctgatgctgatgctgatgctgatgctgatgctgatggtggtggtgatggtattgatggtggtgatgatagtgacagtattgataactacagtgatggtaatggtggtggtggcggtgatggtggtgatggtgatggtggtgatggtggtggtgacagtgatggtggtgatggtggtggtgacggtggtggtggtgatgatgacggtggtggtggtgatggcggtgttggtggtgatggcggtgatggtggtggtggtggtggtgatggtggtggtggtggtggtgatggtggtggtggtggtggtggtggtgatggcggtggtggtggtggtggtgatgggggtggtggtggtggtgatggtggtggtggtggtggtgttgatggtggtggtgatggtggtggtgatggtggtgatggtggtggaggtgatggtggtgatggtggtggaggtgatggtggtgatggtggtggaggtgatggtggtgatggcaatggtggtggtgatggtgatggtggtaatggtggtggtgatggtgatggtggtgttggtggtggtgatggtggtggtggtggtgatggtggtggtggtggtggtggtggtgatggtggtggtggtggtggtggtggtggtgatggtggtggtggtggtggtgatggtggtggtgatggtggtgttggtgttggtggtggtggtggtggtggtgatggtggtggtggtggtggtgatggtggtggtggtggtgatggtggtggttgtggtggcggtgattatggtggtagtggtggtgatggtgatggtggtgatggtggtgatggtgctgatggtggtggtggtggtggtggtggtggtgatggtgggggtggtggtggtggtgattatggtggtagtggtgatggtgatggtggtgatggtgctgatggtggtggtggtggtggtgatggtggtggtgatggtggtgttggtggtggtgatggtgggggtggtggtggtgatggtggtggtggtgatggtgggggtggtggtgatggtggcggtggtggtggtggtggtgattatggtggtagtggtggtgatggtgatggtggtgatggtgctgatggtggtggtggtggtggtggtggtggtgatggtggtggtggtgatggtggtggtggtgatggtgggggtggtggtgatggtggcggtggtggtggtggtggtgattatggtggtagtggtggtgatggtgatggtggtggtggtggtgatgttggtggtggtggtggtgatggtgatggtggtgatggtggtgatggtggtggtggtggtgatggtgatggtggtgatggtgatggtggtggtggtgattatggtggtagtggtggtgatggtgatggtggtgatggtgctgatggtggtggtggtggtggtggtggtgatactgg

SEQ ID NO: 8407 - DNA, 1455 bp, Artificial sequence
  DNA replication origin
gccgggcagcagcgccggtgagcttggggacgtgggctgtgggtcacaggcgcccgacacagcgccagcctgacagcgggaagccgaccccaccgtgctgggatccggtccctcccctgctctggcccctgggcccccgaccctggctcctgccgcctgggccctggccccaccccaccagcccccattgccgcccctgtctcccaggccgatgggtgaggcccccttcatgcgccacctccttgtggactgtggcagggtcactttgtcaggcagctggggcaggagccaggagcgttgtttactcactgggccaacagtgttgagtgcccgctgtggccagcactgggccggcccctggggtcgcagcagtgggcaagcggacagtgactcctgaggctcacactgagcggccgacccagacagacagagtcagtctgttaactagaccccgactgggggcgagtgccatgagaaatccaccagggcagccatgcggaggcggggttgtcactgcgaagtacagggtgcaggaaggcgcccgagggagtgtgcgggccgtgcgtgttggggggtgtgtgttggtgtgtatctctttggggctgtgtgtgttgatatgtgtgtgttcatgtatgtgttgatgtgtgtgtttaggatgtgtgtgttgtatgcgttgatgtgtttgtatggtggggcatgtatgttggggtgtgtgtattgatgtgtttattgatgtatgtgtgctgtatgtgttggtgtgactgttggagtatgtgtgttagggtgtgtgtgttggtgtgtgtttgttgatatgtgtatgtgttggtgtgtgtgttgtatgtgttgtgtgtgtgttggtgtgtgtgtatgttggtgtgtgttagtgtacgtattgatgtgtggcattgatgtgtgttgatgtgtgttttttgatgtgtgtatgtgttggggtgtgtgtgttgggatatgtgtgtgtcttgctatgtggtgtgcttactgtgtgtgtatgtgtgttggtgtgtgtttgttgatatgtgtatgtgttggtgtgtgttgtatgtgttgatgtgtgtgttgatgtgtgtgtgttggtgtgtgtatgttggtgtgtgtgttagtgtatgtgttgatgtgtatgttggtgtgtgttttagtgtatgtgttgatgtgtatgttggtgtgtgtgtgttgatatgtgtgttggtgtgtgcttgttgacatgtgtgtgttggggtgtgtgtatattggggtgtgtgtgtgtttggggtatgtgtattggggtgtgtgtgtgttgctgtgtggtgagcttattgatgtgtatgtgtttgtgttgggatatgtgtatgttttgttgtatgttgatgtgtgcgtgtattgggggcgtgttcacacataccttttcaccgagcagcctgctatgtaacggccacccgggtcgacgggcctgtaggtaga

SEQ ID NO: 8408 - DNA, 1066 bp, Artificial sequence
  DNA replication origin
ctccactgcacccaccctgcacaggaggggctttccccactgataacactcctgcggggtatgggccacagggcctttttttggtcactgccatatttgaaaagtgctacgtttctggtttaattcacattcttttaaaatgatgagtggacacaccttttttcacttgcctttcttcttatgtggattaaataattatttctttttctttcttcgtgtgtgtttctttttatgtgaatgactggtgagtctccttttctcacttttctgcagagcttttcatctttgtcttcttgttgatttgtaagagttctttacatagtgaggaaagtgcactgtgcatgctagttgttgaaatctgttcaactcagggtcatctctaaacatcttaccttctttgaagttacccataaaactttgtgtgcccctgaaacagcaatgtttccttccataatcccgggtttatagttcctatccttcaccttgaggctgagaggctctccttcagtgtctgttgataatttacctaaccctcatcccttcctcaggctacacagagtgaggtggggaaaagatgatggtcagatgctaaggaaggagctggaaagaagctgtcaggggtgggggtggtgcgggactaacactgtgataaaggcagccaagcaacctcaaggtaagtattagttcagtggactgcagcgtggggtgttgtccctgccacagggcatcagggaaggcttcctggaggtggcgacagttcagctgagccacagtgggacctcagtggccatgtgctctcatccgcaggctcagaagttggccaggaaaagctgtccctgtgcctgagtgggctgtgggcctgtatggggtggggcggggcttctagttccatgtttttaagcgggagtgacctggagtccctagtgagggatttcgtaggctgtggggaaatagctgctgcggggtgaagtttgaagacaaacgacagacgggagatggggaggagtaaccccatttggggccaaaatagcccgaggggaaggtggtgtgtcgtccccatttcaca

SEQ ID NO: 8409 - DNA, 998 bp, Artificial sequence
  DNA replication origin
tcagagagcccgggcaccgaccccggggcggtcctggggcagggctggctctgctagggtccgaagtgccggggtccctccggagcgcgtgctctcggggtcttgagggaacccgacagaaccggcttggaaccctgcctccagcacttgctcgccgcgcgagccagggcagatcgctccaccggtgtcagccacagcgtctcggccgagaaccggcgcgctcgagccccccctcgctgcccggctgaaggtgcgggcgcggggtccggctcggagtccggggtaagacccaatgcggcggagttcagtcccggccgcgggtaccatccagcagcgtctacgcgctcctcccgctgcccgcgccggtgggtgctgagtcaggcccggctgctgctctggtttggagaagccttttttttttttttttggctggcagggacagtccatgacagtggcgcgcccagagcccgaagagcgttggtgggatggacagctgctctcgcaccctgggaagtgacccgggttggcttttatgcggagggtcccagggacagggaccacacactctgtggcccgagacgctgccccgcctggattgaatcctagcttcgccctgaccggccgggtggccttcagcaagtggcttactctctcagggcctcagtttctcttctgtgaaatggggatgacgttgcttagcgggcaaggttgtggcagagataaaagaagaggcctatggggggtactggtgagggcccaggaatctgtttttgctttcttccctcctcccttcaggggcccagtgaggtgggtgatggaaggtacagagggctggtggaccggggtagggtgctggtctctgtcactttatataacaaacacactgttccaagagctttcaaatatccaacccccccccccgactccgttgaatcctccccacattatccccattataggataaggaaactgaggtgcagagaagttaagtaacttgc

SEQ ID NO: 8410 - DNA, 1361 bp, Artificial sequence
  DNA replication origin
actaccagatttggcacctgggagaaaggaggggctgtctaccttccgtcgaaagaataaatgaatgtattattacctgcatgcctgtctcccttgcacactcaaggaaatgggccatgccctggtgtgtgcagaaagctcagctgaggggctcatcccacctccacagctcacctgcagtgtgagcaagtcacttaaccctggggcagggacgatgcatcccatggctcctggcagcctgacccagagcctccaggttctaacctttaaaatggggatatttatgcctattcatagggttgttgtaaatatgaaactaggccatgccaagtgactgcccgggacctgacccaggtccaccccacctcaggctgtaaggctacccgtgggacatgtatttatcaggaaaccccgccatgccctgacgctgtgccaggcagagggctgggaactgagagaacaggggctgatgctgctgcaggatgacctcgtgttggaagacaggcactgccccggggagaggctgctctggggcttttggggctcctgggaggaccctggaggccttcctggaggtggaggtgacgaaattggactttcaaggccaagaaggaagagggagggggtcagaggcttagaaggcagatccctcctgctaggtgaggtgtagaggggctagggtgcagctcacgggcctagaactgggctaaggtggggtggggtggcctgacctttggcctggggcctgcagcactctttccttccctctgctctccttcttctgctccctggagagcctatccttagccatccctgctcctctcccttcctgggaggggagggtaggagaggggggagtggggggattaacgtgtgtccctgtggctgtctgcttccactttgtgcacattggcatcacggggttctgtgctcagttagggtgaggcagctgggaccccaagagggccagcggcccctcgtgccttaggatcaccgtgggagcacgctctctcctccctccttggatgggcttctctagccctggcccttcccgcgggacgtccagcctcctcctctcggcgtggctgattgctcttcctccttcgtctgttgcacgtggaaggtcggagggcgtggctgtgaagctcccgttcctcctcatggcattgattgctgtccccttcgcacccggtgggggggcgggggtgggcagcgaccccagctcccagcagggcgggtctggggaagggcaggatgcaaaggggctcaaaccagaatcgcaatctggagctgagccccgccttggccgcttactccgcctgagtccctttccctctccgtgcctcagtttctcctcagta

SEQ ID NO: 8411 - DNA, 883 bp, Artificial sequence
  DNA replication origin
ccctccagaaggggaaatgggggttcagaggcaggaagtgactggcccgaagttagcgacgcaaccagtcaatggcagcgtggggtcctgaacccactgagcctccttctgcgccggcatcgggccccgggacgcaaacccacactcagatcccgcggggagagggaagctgcagcctcaggggcgcgcggggcgtggtcggcacctacctgcacagtgtagacccagcccacgtccatgtggctgtggggcaccacgaaggcccggatggggccggcggactggacccctggcggtcgcagcaacaggagcggtgccagcagcggcagccagcacagctgccccatccctgcggcaggccgggaaggtgccaggcccacttccgggtccgcgaggggcggggcggccgcgcgggcggggacgcggcccattggctgcgggcgggggcggggcccattggttgccggctggacgccgaccccgggaagctcgggaaggaggagctggaggcgcggggccctcagcggggcagggcgcctgctctttgcggtttagctctccatccccgtctccagctttctggccttccctccctgtccatcctttcagccccatctcccccaagcctgccagatctcccccaaccagaggagacccctcctcgcccaaagcccacgctctggtggttcctctcggagcgtgtgcctcttcgcaatacctgcatcccgccctctggactcggctccgggactctgaggctaccgtgcaaaattcggctcagcacggaccctgtgagctctgccaccaggaaccttccctgataaccctttccctcctctccctggcgtcgaaaccccatctgggcggcgccatggggggcttg

SEQ ID NO: 8412 - DNA, 2241 bp, Artificial sequence
  DNA replication origin
gtcaggcatgcctggctcagaatcccacctgccgcttacaagctgtgtgactgcaggccagtggcgtgccctctctgaacctggaatgtctctttaacttgaggtaagaaccccactatctggcagcatcaagtggccattggatgtccggctccttcccgtgactctggcggggcctggtggacgccctgctctcccttctccgcttcactcccttgagcaagtcacttggcgtccctgaactttatgttcagcaactattctgaaggcaggtggatacctgggaggaaactaagaacccccgagtatcgtcctgggtgctcacgccagggcttcattcttggcatgacttttctgcaatggggcggtcacccccgtttaatagaagtggaatctgtggctcgcaggggctagtcgtgtcccctggtgcgggagcaggatgggacccaggctgcctcactgtgcagcggggactctgactctccatgctgtatgaagcaacctgctgcctaccctcaaaccacagggactatcgcaccctcatcaagggtcaccagaccctgggcccgggggccaggcagataacacaaatgagagaagagggtgagggcttggggacacctgggatgcctggtgtcagggggcactgctgacttagtgccagctggcacggaagtgcacagctgggttgccagagctggcagttttttcaagaatagacagaaattcaggattaaattgaaagcaatctctcccaggcatggaactcaccgtgaaccttgatctaaacaaggctgtgaatagcccggtggggttttggccctgtggtttatgccagcctggccctggccctggctagaactgccccattgagttttccacctgggtctttgccaggatactgggccaactgtgtcacctggtgacctcattacctggtatttctgctggtccgaggcgacgccatcccaccacagccggaaaaactcctgctccacagcgatgaaccggcgctgctggccgcgggccagctcttccaccactgaggtgtagacattggcggcgtacgcccgcatgctttcctggggaggggacagcatcatgccagccccggtccaacaagaccaagtgtccctggggcccctgccattcgccaggtgtgtctgcatggggttgggggctctgcccttccttccctgctgctcaccccccacacagctattaggcactcgctccataccaggctctccccactggatgggatcgtgctctcctgggggagagggacggggaaacagacaccctacatgggcagagacaggtgccctcccagcccaggggtcagggacagtttctcagaggggtgagcaagctgggccttgagtgtgcaatttggggggctgggccctgagtgtgccattgaggggcagcacaggaaagtcttaggcctcagtcggggtgtggtccagtgaccccaaaggggcctgctggggctgaaatgaggaaagctggtgctgagaggaagagctccccaggctgtccctggcgtctaggcgtctgcctccccaaggctgggagctccaaggaccacagctgtagtgtgttcccatccgagtcccgagggccctgcacacagggtgcccacagagtgcttacatgaatggaaggagcaccgagcagggagtcaggaggcatgagggttattcccgagcgaccttgggcaaggcagcaaccctctctgggcctcggttttctcctctggaaactggctgtagtgggcatgcttcccctaccctttacagatggggaaactgaggcttagggaccaaagcccctcgcccaaggtcctgagcagaaccaggaggtgaccacaggtccaccttcacccctgtcctggggggcggaggacgctgagctggcctccaatattcagccccgcaggggaccagcccggccccttcccagcgggcacctgacatccacctgctctgaagccagccccaccctctcctgctccaggcttccctggaaaatgggttaccactgtcaacccccaagcccctccccagccgggaatgcaggggtccctccaatctgcaccaccctccagaaggggaaatgggggttcagaggcaggaagtgactggcccgaagttagcgacgcaaccagtcaatggcagcgtggggtcctgaacccactgagcctccttctgcgccggcatcgggccccgggacgcaaac

SEQ ID NO: 8413 - DNA, 998 bp, Artificial sequence
  DNA replication origin
gcccgccattaggattggctggggtgtcactgtgaaaggcatttggtaaatggtgagtagagtgccccacggcactgtgggtgatggtgctgaggacagtggacacaatggtgagggagatggtcatggtggtggtgatgatgattgtggaggggatggtagtaatggatgtggtgatggtggtggcgacagtgatgggtggtgatcatggtgatagtgtttagggggtggtggtgatggtagtggtagtaatggtcattgtagtggtgaagatgatggtggtagtggtgatggtggtgatggtagtggtagtaatggtagtggtagtggtggtcatagcagtggtgaagggtggtggtgatggtagttatgatggtggtggtgatggtagtggtagtgatggtcattgtggtggtgaagggtggtggtgatggtgaagggtggtggtgatggtggtggtgatggtgatggtggtggtggtgatggtgaagggtagtggtggtggtggtgatggtgatggtggtggtgatggtgatggtggtggtggtggtggtggtgatggtggtggtggtggtgatggtggtggtgatggtgatggtggtggtgatggtggtggtggtgatggtggtgaagggtggtggtggtgatggtggtggtggtggtggtgatggtgatggtggtggtgctggtgatggtgatggtggtggtggtggtggtgatggtgatggtggtggtgatggtggtggtggtggtagtggtgatggtgatggtggtggtgctggtgatggtgatggtggtggtggtggtgatggtgatggtggtggtgatggtggtgatggtggtagtggtgatggtgatggtggtggtggtggtgatggtagtggtagtgatggtcatcgtggtggtggtggtgatggtagtagtcatggtcattatggtgctgaaggtggtaattgtgatggaaggcagcaaacacttactgagcatttactagggaa

SEQ ID NO: 8414 - DNA, 839 bp, Artificial sequence
  DNA replication origin
cctctgggcctgtggggatgcagggggacaagcaggggctgagctcctggccacaggaggagctctgtctgtagggctgtgtccatcacgcctccttctcatggaagggcaagtctagggtttgagcaaagtccagatgtaaggcagtaagaaactgagacaggggaacactccagattacagatgagaaaagggagagtgccaaaaacatcctttgacaacattgctctctgcctggatgttttacaaatggggaaatcagggcccatgctgtagtggagtgactgtggactcggagcttcagtccctaggcctggactcaagtcctggccatctaccctggagagagttactgcatttctttggatctcagtttctacatctgcaaaatgaaactgggcatcaccatgcctcaccatcagcccgccattaggattggctggggtgtcactgtgaaaggcatttggtaaatggtgagtagagtgccccacggcactgtgggtgatggtgctgaggacagtggacacaatggtgagggagatggtcatggtggtggtgatgatgattgtggaggggatggtagtaatggatgtggtgatggtggtggcgacagtgatgggtggtgatcatggtgatagtgtttagggggtggtggtgatggtagtggtagtaatggtcattgtagtggtgaagatgatggtggtagtggtgatggtggtgatggtagtggtagtaatggtagtggtagtggtggtcatagcagtggtgaagggtggtggtgatggtagttatgatggtggtggtgatggtagtggtagtgatggtcattgtggtggtga

SEQ ID NO: 8415 - DNA, 1626 bp, Artificial sequence
  DNA replication origin
ggagggtatgggtctgagcagacccccacacacaccccttccccactcagatgcagtatccgttaggagtagattccctcagcatacatttctggagctcctactgtctgtcagcccctgttctaggcgctggggatggtgtactaaccaaacagacaaaatcccactgcctggggcatctattccagtaggggagacaggtgataagtaaaataagaaaaatatggaatatgataggcgatgaccaccgtgagggggacagtcactacagcaagttgcaggggctggggacacattttaaataggtgggccaggccgcatcaatgtgggatcaggcagacagggaacaggtatctgctgtatttgggataaaggctgggtcgggaggcgtgtacaccattattgggggggcctccccactggggcacaggaactgagggggcacagtgccctcctccagcctccctctccaaatcagacaccttggaggtgagcagaggccaggagggttaacctggaaaagtccgtccacgtggggatgagaagattgggggatggcccctcccaggagaaggtagtccaggtggagggcacagcgtggcacaggctcagaggcaggaaacggcaggagtgtcaggaaggaagggttggtgatgctggagccccaagggccagaggacagagtaaggtcaccgcagggaggaggctgggtcccagaggaggcttccttccccagttgcagcagacaagagtctcgaaaagcttgctttggttgctgcagtggatgggttggtaggcacaggagtggatgtggggacagcagtgcagatgctgggcagttacctagggaggggccacagcagctgtgaccaggcagaggccacagggaagggagatgaaaggcctcaagaaggcggtggggggccttggtggtgggtgggagtggctggaggatgggggatggggattcctgggggatggggaaggggagtgactgagggatgggatgactagggggtaggggtggagaaagccggacagcggggagcagaaggtgcagggtaggtgctggaagggccatcgttggatggggatgctgcagggagcagatttgggtgggatggggtagctggtgaggtcagctgttgacatccacgtggaggcgtcaaacaagaagctgtattcgtggatctcgggttccagaagaggtcagtggatttgggtttgcttttgggagtcatcactttggttgatgaaggatgattaaaggagctgggggtgttcaggagctcccagttcaggaggtgggagtaagagaagctttggggaccccaagaaccagctatcttcaggtcgctgaagggttctcccaggactgatgtggtttgtgggggtccaaggggagaaagccagaactgggggcagggaggagaaatcggcaggatccgagagatggaaagacactgctgcctcagcaagtagtgagcaccccattccagaaagtgtgagagctgacagttaacaagtctcatcctgctggccttgcagatccagaactcaacagagaccccatctgcgtatgacctgcttattctgaccacaatcccaggcctcagttaccggcac

SEQ ID NO: 8416 - DNA, 1117 bp, Artificial sequence
  DNA replication origin
cagtagatgacaaaacaggggtggaactggcatcccagatcttgagtagaaaacagggttctggccggacatggtggctcacacttgtaatcccagcacttcgggagggcaagacgggaggatctcttaagcccaggagtttaagactagcctgtgagaccctgtctctacaaaaaaatttttaaaaattggccagggtggtggcccatagtcccagctacttgggaggctgaggtgggaggatagtttgagctcaggagtttgagactgcagtgagctgtgattgcaccactgcactctggcctgagtgacacagcaagtccctatctacaaggaaggaaggaaggaagggagggaggggaatggaatggaagggaggggaggggaggggagggaaaagaagagagggatggaaggaaggaaagaagggaggaaggaaggagggaaggaaggaaggaagtgagggagggaggggaagggaagggaacggaagggaggggacgggagggaaaagaaaagaagagagggagggaaggaaggaaagaaggaagaaaggaagagggaggaggaaggaaggaaggaaggaaaaaagagggagggaggaagaaggaaggaaaaaaacgaaggaagaaaggagagagagaggagagggctgtgcctgaacttgccttgttatcttgaataagctttgtgccctctgagctctttcctcgtctctactttgagatggttaggctgaggagagtcagggtcctcccagctcttaagctctatggtctgagcaaaggcagggaagtggaggcctggggcattgggagcacaaacactttgggctggtgcggggtaggctacccacaaggatgcatgggaagtggctggcaggggcaggggcatgtaatgtgcagagctctgagtgccaggaggaggagttgagccccaaaccctctcctcactctgtccatctgccttgcagggactgcgccgaagctcccaggaccccagcagcaagaggccgtgacgctgcccccgaatcttcacctgcagatcctgagcatccctggctggcgctacagctccaaccacacggagcactctcagaatctccggaaaggtgagg

SEQ ID NO: 8417 - DNA, 1280 bp, Artificial sequence
  DNA replication origin
ccgaggcagtgggaagagatgcggcccctggacatcgtcgagctggcggaaccggaggaagtggaggtgctggagcccgaggaggatttcgagcagtttctgctcccggtcatcaacgagatgcgcgaggacatcgcgtcgctgacgcgcgagcacgggcgggcgtacctgcggaaccggagcaagctgtgggagatggacaatatgctcatccagatcaaaacgcaggtggaggcctcggaggagagcgccctcaaccacctccagaacccgggcgacgcggccgagggccgggcggccaagaggtgcgagaaggccgaggagaaggccaaggagattgcgaagatggcagagatgctggtggagctggtccggcggatagagaagagcgagtcgtcgtgagcgcggtcggcggtaagtcgggcacccgcgccaggccgaggagcggccccagcttggccgctcttcgagagcgatgatttcatcgagatgcaccggaatcgggggtggggcgggagaataaaggcgtgctcgggtcagggccgatctgggccccgtcttcgtgttttgttttttgacggtggcggcgtgggataatcagagtggccgggtttgggcgtgatgcgtgttcagtggaagggtcataaatctcagagtcgccaaggaaacagaaacggacaaggtcccgggccgtccagcaagcgggggtggaaatagaggattttcggggaagacgttggacaagtcaacgttgctagagactggagtgagtcaggtggtggccagaagaggtggcgtcctgcacagtggcgttcgtgagggtttgggggtcgttgtgcctgggattaacctctcgatgatgaatttcttcccattgtgctttaggtttccagccaatggattctggtcaactggtggagattggctgacaccctggagaagccgaaaccagagagccttttgttttctcttttttcctgtctatgctctgtctcacttaacactacgttttctgctatggtctgtggttgatgacctcaatatgagtttcgattgttaacgtgtttttgtttgggaagtaattttgtttgaaaatgctctcacatacaggaattagggcctagattgtaagctcttgcagcagtcacatttgttcccgggctttggtggttatttctaaatttttgaggtgctttgctatttcttgtgtgacctgatagctccctggaactttgggtctgtgtgtgacacatgagactcacagttggagttctccagct

SEQ ID NO: 8418 - DNA, 1305 bp, Artificial sequence
  DNA replication origin
ccccagaccttggtgttttcccttgattcagctttaggaagtcagcaggaatctgccttaagttccctacctccagaccctgttctcctgcctgacgtggacacggaccaggcgagagcccgcaaagacccaggtggcccggcgccccgcgtgggcggcgaggacctggcctccctggagtgcgagcgtgcccgggcgcactagcgggcccgcagggagctgctggagatccagagcctgctcgacgccatcaagagcgagatggaggcggaggagcagggcgcccgggccccagcacccagcccgcgcgcggaggcggaggatctggtggccaggctgtgcgccgaggcggagaggaaggccgcggaggcggcgcggatgggcaggcggatcgtggagctgcaccagcggatcgccggctgcgagtgctgccgagccggcggggcagcgcggggtggagctgagaccggcggggagtttcccgcgtggaaggcgctgggcaggcagggaggggtgcgtagagccgtgccacgctctccgccaaggtatactctttttacgtaggtaaaagaaaataatttcatttcttaaaaagaaaaaaaaaaggagaaacagaaacccaaagacctttagcagtagaacaataaagggcatagagctgccatgtcgctaagggggttaaaccatttcttctatgccgtaaagctaaatatcaggcggagaacaaaatttaaaagtgtgtgagtcgggcgctgtgtctcatgcctgtaatcccagcactttgggaggctgaggcaggaggatcacttgagctcaggagttcgacatcagccttgacaacatagtgagacctctctctaccaaaaataaaaaacaattagccagatgtggtggcacacacctgtggtcccagctccttgggaggctgaggcaggagaattgcttgaacccgggaagtcaaggcttcagtgagctgtgttcaggtcaccgcactccagcctgggcagattgagtcaccgtctgtaatttaaaaaaaaaacaaaatacaggccgggcggggtggctcatgcctgtaatcccaacactttggaaggctgaggctggtggatcatctgaggcgaggagttcaagaccagcttggccaacatggcgaaaccccatctctactaaaaatataaaaattagctgggtgcggtggcgggcgcctgtaatcccaactacttaggaggctgaggcaggagaatcgcttgaacccgggagacggaggttgcagtgagctgagatcgtacctgtgcactctggcct

SEQ ID NO: 8419 - DNA, 1251 bp, Artificial sequence
  DNA replication origin
cagggcacaccctgggggtgggctgcacctacctacccacgctgaaccctcaggcgcgccagcagcggctcccggcaaggggaacagcctgggactgtggggttgagctgcagtcaagtggctgaggcttctgaactgtgataaaagcaccgcgggctcacgcctgtaatcccagcactttgggaggccgaggcgggtggaccacgaggtcaggggatcgagaccatcctggctaagatggtgaaaccccgtctctactaaaaaatacaaaaaattagccgggcgtggtggcgggcgcctgtagtcccagctacttaggaggctgaggcaggagaatggcgtgaacccgggaggcggagcttgcagtgagccgagatcgcgccactgcactccagcctgggcaacagagcgagactccgtctccaaaaaaaaaaaaaaagcaccgcggagagcgggaaggaggcctgggaggagactgcactatcacccagtgagtgtgagtatgcgtgtgtgtgagcatgagtggtgtgtgagcgagtgtgtgtatgcgaatgcatgtatgtgtatgagtgagcatgagtgcacgtgtgagtgtgagcatgtgtgagtggtgtgagcaggtgtctgagagcatgtgaatgcgcatgtgagcatgtgagcgagtgtgagcatatgtatgtgtgggagtgagcatgagtgtgagcttgtgtattgtgagcctgtatgaatgtgagcatgagtgcacatgtgagtgtatgggtgtgagcataaatgtaagtggtgtgtgtgagaacatgagtaagaacgggtgtgagcatgtattgtgggtgtggatgagtgtgagtgtgcatgtgcatacatgtgggtataagtgtgagcgagtgtaaatgtgtgtatgtgtgtgacattgtgtgagcatgtgtgtaagcgtgtatgactgagcatgtgagtgcacatgtgagtgcatatgcatgtgagcatgagtgtcagcgggtgtatgtgtgagcatgagtgagtgggtgtgcgtatgtgtgagtgtgaccatgactatgtgagcgtgtatgagtgtgagcgtgtgagcgcatgagtgtacatgtgagcatgaatgtgaacggatgtatgtgagcatgtgtgaacctgtgtatgtgtgtgagcatgagtgtgtaaatgtgtgcgtgcgagcgtgagtgtgagcatgagtgtgtgtgagtgggcatgatgagtgtgcgtgtgaatgctcgtgtgagcgtg

SEQ ID NO: 8420 - DNA, 1199 bp, Artificial sequence
  DNA replication origin
tcctcagcccttgggtggtgatgggactgggcgccgtggagcagggggtggtgctcgtcgaggaggctcgggcagcacaggagcccatggagggggtgggaggctcaggcatggcgggctgcaggtcccgagccctgcccctcggaaaggcagctaaggcccggtgagaaatcgagcacagcgccggtgggctggcactgctgagggacccagtacaccctccgcagccgctggcccgggtgctaagcccctcattgccgggggctggcagggccagccggctgctccgagtgcggggcccaccaagcccacgcccaccctgaactccagctggcccgcaagcgccgtgtgcagccccggtgcccgctcgcgcctctccctccacacctccctgcaagctgagagagccggctctggccttggccagcccagaaaggggcctccacagtgcagcagtgggctgaagggctcctcaagtgctgccaaagtgggagcccaggcagaggaggcaccgagagtgagcgagggctgtgaggactgccagcacactgtcacctctcaccaacattctaaatcataaacacccaggccgggcgtgtggctcacgcctataatcccagcactttgggaggctgaggtgagaggatcgcttgagctcaggagttccataccagcctgggcaacaagggaaaaaaccctaccaaaaaaaacacaagaaattagctgggcgtggtggcgcgtgccgatagtcccagctacttgagaggctgagccgggaagattgcttgagcccagcaggtcgagaccgaggtgagctctgaacgcctgattgcgccactgcaccccagcccagtgacagggcgagaccctgtctcaaaataaataaataaaaataataaacaaccgaattcagtggtcccgttagaatattccaggctccgagaagccaggtgctcacagcgtcgggatttgcccccagccagggcctccgctccctcttgcctcgggcagatgctcctggaacacagagctgcggcctcggtgctgatgctgagtgctgtgacccagcctccccctacttttttcctaagggtataagcttcactctgcctggggctttggctgtaagttggagtctggctttacccactgtgggcacccaaggccaaggtgggtctgattcaccactgtttcctcag

SEQ ID NO: 8421 - DNA, 943 bp, Artificial sequence
  DNA replication origin
gccccggcgtgccccgcgggctggaagaggcggcggcgtgatgcggcccgtggacgcggacgaggcgcgggagccccgcgaggagccgggcagcccgctgagccccgcgccccgcgccggccgcgagaacctggcctccctggagcgcgagcgcgcccgggcgcactggcgggcccgcaggaagctgctggagatccagagcctgctcgacgccatcaagagtgaggtggaggcagaggagcggggcgcccgggccccagcaccccgcccgcgtgcggaggctgaggagcgggtggctcggctgtgcgccgaagcagagaggaaggctgcggaggcggcgcggatgggcaggcggatcgtggagctgcaccagcggatcgccggctgcgagtgctgctgagccggcgaggccgcgcgggtctggagcggagcgcggcggggagtgtcccgcgtggaaggcgctgggtaggcagggaggggagcgcagagccgtgccacgctctccgcggagttggtttcattcttttttcataggtaattagagaaaataatttgatatgttgttgtaaagagtcatgaccactggaagtattttcaggacgtagacctggtgggtcactacgtggggggagagaggtgtgaagcggaggtacatgctggaaacgtgtgaatgttgttacgagattggagcgtttgcgatgaccttcctgcaggtggaagcattgtgcacaggtggttgggtttgtttgactcccggatatgagaatatcaagctcaaaatttatgttgtgatgatgaatttctcccacttgtactttaggtggccaactgacgaactgtgttcacctgataaggagtcgtggctgcttggacaggctcaaaccaagagagcctttcgttttgtctcccctgtttttctgcctgcgttttctccacattagcc

SEQ ID NO: 8422 - DNA, 939 bp, Artificial sequence
  DNA replication origin
acagccagactctgtctcaaaaaaaaaaaaaaaaaaagaggccagatgaagagctcgaaccacgagcttctacatgttaaccagggtaaagagcaaccgctgacaggaaggggcccagcagtcaacccccgggaaggccaggatgtggccttgtttcggcaaggccgccctatcaccacggagatgggcaggcaggagacatccccagtcagtcgggcccaggtggggatcaggaggtttcaggaaaacacaagctatgcagtggggcaggtgaggcttggcctgcccagcctgtcctgagtgtcatgggaacagctctggaagtgactcctctgtcctctggaatctggatcagatggggccttctccagacatctgtgctcagcagatgcgacagacggcccctcgagtgtagcccaggatccagcaccggcccaagcaggtgggagctgtaagttgatccaagctctccagtccctgtgctgggctgggggatgcacgatgaacgaggctgggatcctggtgtcagggagtaccagccacagagggcgccatgtgcatggaggaggtggcaaggaagaggtgactgggaaggggagaagcagagaggccaggaggagggcggggcctgtgctggggggtggaggaactcatgcccgggaagggcatggggagagtgaagtgggagtggagtgggaggcaggcttggaggagtcggtgccttgggatgtgggacagtgaggaacaaggcacaaacaaccagtcagtgctctggggaatcaagaagttgggatgggcagcgggggtccagggtggagatgggctggagggggaggagggcaccaaccagggaaggcccctcaggggcttgatcctgtagttctgggcctcgcagagccagccacacgtccgagctcctaggtgattttaagaactagc

SEQ ID NO: 8423 - DNA, 1432 bp, Artificial sequence
  DNA replication origin
ttaaaaatgtttccactgaaaggtgaatagtgcctcacaaaactctgtcctcctcgccccctgagctcaaggactctccaacaatttcagaaagtaggtgccttgagtaaccccattctgcagataaaaagactgagggtcagagagcaccagtaacttgcccaaattcacagctagtaaaataatggtacaggaggctggatgtggtggctcacgcctgtaatcccagcactttgggatgctgaggtgggcacgaggtcaggaggtcaagaccagcctggccaacatagtgaaaccccatctctactacaaatacaaaaaattagctgggcatggtggggggcacctgtaatcccagctacttgggaggctgaggcaggagaattacatgaacctgggaggcagaggttgcagtgagccaagatcacgccactgcactccagccagggtgacagtgcgagactccatctccgaaaaaaaaaaaaaaaatggaacagggatggaaccaatctctgcctgaatgccatgcccatgtattttatcaccacagtgtgtgtgtgtgtgtgtgtggtacgttgtgtgtgtgaggcatgtgtgggatgcatatgtgcataatgtttgtgtgtgtggtatgtggcgtgtgtgtacatgatgtgtgttgtgtgtgcatgtgtgatatgtggtgtaatgtgtgtgatacacatgcatgcatgcatgtgtacgtgttgtgtctgcatgcgtgtgtggtatgattgtgtgtgatgtgtgtgcatgcgtgtgtggtatgattatgtgtgatgtgtgtgcatgcgtgtgtggtatgattgtgtgtgatgtgtgtgcatgtgtgtgcatgtgtgtgtagtatgattgtgtgtgatgtgtgtgcatgtgtgtgtggtatgactgtgtgtgatgtgtgtgcatgtgtgtgtggtatgactgtgtgtgatgtgtgtgcatgcgtgtgtggtatgattgtgtgtgatgtgtgtgcatgtgtgtgtggtatgattgtgtgtgatgtgtgtgcatgcgtgtgtggtatgattgtgtgttgtgtgcatgcgtgtgtggtatgattgtgtgtgatgtgtgtgcatgtgtgtgtcgtatgattgtgtgtgatgtgtgtgatgtgtgtgcacgcatgtgtggtatgattgtgtgtgatgtgtgtgacgtgtgtgcatgtgtgtggtatgattgcgtgtgatgtgtgtgcatgtgtgtggtatgattgcgtgtgatgtgtgtgcatgtgtgtggtatgattgtgtgtgatgtgtgtgcatgcgtgtgtgtatgattgtgtgtggtgtgtgtgcatgcgtgtgtgatgtgcgtgatgtgtgtgcgtgtgtgtgtggtatgattgtgtgtgatgtgtgtgcatgcatgtgtgatgtgtgtgatgtgcgtgcgtgcgtgt

SEQ ID NO: 8424 - DNA, 933 bp, Artificial sequence
  DNA replication origin
ggaggggagggggaggatgggtgggggaaggaaggggaggaggacaggagagggggaggagggggaggggaggagaaggagggggaggaggagggggaaggggaggaggggagtgggggaacgaggaggaggccaccccaggaagatcagaggaacagctcgtgcaaaggcccggcaccctgtggccttggtgagcgtgcatcccagagggaggcctgccctctctcaagggagtgagcagcagcagcctgctcgccgaacacgtgtcttacccctaacaaatcgcccctaagtcaatggggccgccaacaaagaggtgccccggtctctggccacacacagcgtgtgcgtcttcctggaagccagcaaagcgcagcctccccacgcccccggctcccgggctggcacggcctcctccctaagaaggccccaaggagcaggcggctgcgcggtgggagagagaacagggctgctttatgaaagccccacagggcggccgtgggcaaacagaaggcccgagtgtgtccacggcgggcaggccgggagctcagaatagctcattgagccttggtggctgggccaagagtgcagccgggaagaaacaggtctttattaaggggaggcccggcacagcctgaaacgaagaatgctcacgccaggccacccatctgccacccgggctctgggaggccacacgagcatgcacagatgcggcgagtctaaattcatcgtccataggaagctgtcttacgtgggagaacttacccccagtcttccttctctcctcctcccccaggacagaaacaaaattaaaaatgtttccactgaaaggtgaatagtgcctcacaaaactctgtcctcctcgccccctgagctcaaggactctccaacaatttcagaaagtaggtgccttgagtaaccccattctgcaga

SEQ ID NO: 8425 - DNA, 885 bp, Artificial sequence
  DNA replication origin
tcccagctactcaggaggctgaggtgtgaggattggtggagttgaggagttcagggctgcagtgagctacaatcgcaccactgcactccagcctcactccagcaagaacatgtctaaaaaaatttaaataataaaaaattggggccagccgccccgtccgggagggaggtgggggggtcagccccccgcccggccagccgccccgtccgggaggtgaggggcgcctctgcccggctgcccctactgggaagtgaggagcccccctgcccggccagccgccccgtccgggagggaggtggggggggtcagccccccgcctggccagccgccccatccgggagggaggtgggggggtcagccccccgcccggccagccgccccgtccgggaggtgaggggcgcctctgcccggccgcccctactgggaagtgaggagcccctctgcccggccaccaccccgtctgggaggtgtacccaacagctcattgagaacgggccatgatgacaatggcggttttgtggaatagaaaggggggaaaggtggggaaaagattgagaaatcggatggttgccatgtctgtgtagaaagaagtagacatgggagacttttcattttgttctgcactaagaaaaattcttctgccttgggatcttgttgatctgtgaccttacccccaaccctgtgctctctgaaacatgtgctgtgtccactcagggttgaatggattaagggcggtgcaagatgtgctttgttaaacagatgcttgaaggcagcatgctcgttaagagtcatcaccactccctaatctcaagtacccagggacacaaacactgcggaaggccgcagggtcctctgcctaggaaaaccagagacctttgttcactt

SEQ ID NO: 8426 - DNA, 1332 bp, Artificial sequence
  DNA replication origin
gtggtgcccgggcgtgcgggtgagctgtgggccctgggacccccgccccgaccccaggacgccgggacaccagcttgcggctcttgcgcccgggtgggctgtggacgatgagtccgcacaatgggttgccgttggctgcctcctgcctggggcaggtgtcgccgcgccggggcggctcttctaggggagacgaggcgggggtgcttagacttgataggacgtagagccccgaaagtgggcgcgggaggaaggcttcggccggtgggaggcgcccggcgtccccggcagcggggtcaggccggcagcctgggccgctcgctcgcgttccctccgttcccctcccctccagcattgtccttttggggccccgggaagggaaaaccgccgggcgggggaggagggccgcaggcgggcggggccgggaggccggctgagcgactggcgcgccggcctatggcgcggggcgcggcgcggggggcgggcctggcgggcggggccggtgcggcgcaaggtttggcgaaggttacagctggagctaggagtgacaggcccacagtcatccgtgcgctgcgcggcaaaccctgtcgcgagggcgccccgagttgctgcggggcctgatccggctcctttccaacaatacgcgtctgcagccggcatttctagagctctctgcttcttcccgctggagaaaccagtgtgtgtcgtgttggaatgcttcgtcttgccctagaattcagcttgcgtcttgtggtgcgcaggtgacaggacctgccgaactcttggtacagacccctaaatcatggcagaactgtcttgatttcttttttgccacctttccgtttttgtcctctataggcaagctataaagatttaacccagttaaaaacaggagggagattcagcggagaggaggcatgcgagattctttggaaaaaattatataaatgtagttcttgctaataattacctgggttggatactttgacttactgttcaagttcctaagaagggattttacatttctgggtcttgttttaaaaactgttagaaagctcgtgagggggtagggacaagcagttttggtaataggcgatgctgtggataaaactgtgcggtaaaatgcccaagctagattcttcctatgcaaaataagacccgttccagaacactttgaccatttcgtggacttagaatttaaaggcgggtgagggcggggggggaggaggagcggattctatcactctgcatcctcaaggtcaaatattcttccatcagttattttggattgaaccattcttaaataggtctcaggatctctatgtcgcttcctta

SEQ ID NO: 8427 - DNA, 719 bp, Artificial sequence
  DNA replication origin
agcgtctctgcccagccgcccatcgtctgggatgtgaggagcccctctgcccggccgcccagcctgggaagtgaggagcgcctcttcccggccgtcatcccgtctaggaagtgaggagcctctctgcccggccgcccatcgtctgggatgtggggagcacctctgcccagccgcgaccccatttgggaactgaggagcgtctctgccccgccgccaacccgtctgggaggtgaggagcgtctgtgacccgccgccccttctgagaagtgaggagcccctccgcccggcagccgccccgcctgggaagtgaggagcccctccgccccgccagccggcccgttcgggaggtggggggcagcccccgcccggccgctgccccgtctgggaggtgggggcccctctgcccggccgccaccccgtctgggaggtgtacccaacagctcatggagaatgggccatgatgacgatggcggttttgtcgaatagaaaggggggaagtgtggggaaaagaaagggagatcagattgttaccgtgtctgtgtggaaagaaatagacaggagactccattttgttctgtactaagaaaaattcttctgccttgggatgctgttaatctataaccttgcccccaaccccgtgctctctgaaacatgtgctgtgtccactaagggttaaatggattaagggcggtgcaagatgtgctttgttaaacagaggc

SEQ ID NO: 8428 - DNA, 942 bp, Artificial sequence
  DNA replication origin
tgtctatttctttccacacagacacggtaacaatctgatctccctttcttttccccacacttcccccctttctattcgacaaaaccgccatcgtcatcatggcccattctccatgagctgttgggtacacctcccagacggggtggcggccgggcagaggggcccccacctcccagacggggcagcggccgggcgggggctgccccccacctcccgaacgggccggctggcggggcggaggggctcctcacttcccaggcggggcggctgccgggcggaggggctcctcacttctcagaaggggcggcgggtcacagacgctcctcacctcccagacgggttggcggcggggcagagacgctcctcagttcccaaatggggtcgcggctgggcagaggtgctccccacatcccagacgatgggcggccgggcagagaggctcctcacttcctagacgggatgacggccgggaagaggcgctcctcacttcccaggctgggcggccgggcagaggggctcctcacatcccagacgatgggcggctgggcagagacgctcctcacttcctagacggggtggcggccaggcagaggctgcagtctcggcactttgggaggccaaggcaggcggctgggaggtggaggttgtagcgagccgagatcacgccactgcattccagcctgggcaacattgagcactgagtgagcgagactccgtctgcaatcccggcacctcgggaggccgaagctggcagatcactcgcggtcagaagctggagaccagcacagccaacacggcgaaaccccgtctccaccaaaaaatacaaaaaccagtcaggcgtgggcggcgcgtgccagcaatcccaggcaccgggcaggctgaggcaggagaatcaggcagggaggttgcagtgagccgagatggcggcagcacagtccagcc

SEQ ID NO: 8429 - DNA, 1308 bp, Artificial sequence
  DNA replication origin
aagtacaacgtattttcttctttgaacacatctgaattttccatttttgttgttgtttttgagacggggtcttgctctgttgctcaggccggagtgcagtggtgtgatctcggctcactgcaacctctgcgtcctggggctcaagtgatcctcccacctcagcctcccaagtagctgggactacaggcgcgcaacaccatacccggctaattttttgtattttggggagctgaggtgaggggtttagccgtccattaaaaaaatgctgtgggccaggcatgatgattcagacctgtaattccagcactttgagagacagaggtaggaggactgcttgagcctagcagtttgagaccagcttgggcaacatagtgagatcctgtctctaaaaaaaaccaaaaatgtagctgggcatggtggcatgcacctgtggtcccagctacctgggaggctgaggtgggaggatcacttgagcttggaggttgaggctgcagtgagccgtgatggcaccactgcactccagcctggacaacagaaaaaaaatgctgtgagaaagggtgggaggcagtgtagaccggtgtgtgtagaccactctttctggaagcttgaccatgtggggttggagagaagtgggtgcagctggcaggccacgaggaataagccttggaagggtttctccttcaggcaggggcagctgagtctgagtctaggctgaaggcaggtgctggtgatgaggagaggcctgagctccgggggcggaggctggaggctgggttggctgtgggtgtgaggagcctgctgttcctgggcctccagggaaggtgcttggtggaccctcagggaggcgaggtgagtggctccttccttccctgccctgaaccccagcccccgctgtgtttccaaccccaggcccacctgttctgggtttctaccttgcggggaggatgattctgtgtttgttgggtgaagctcggatcttccaggaggtccaggctccccgggactgggaatgtctggagatgagatcctataacctggacccaccagcctccaactgtcctgagctcctgtgtgccagggtgggctcacagtctaatgggggacgcagagggtcagacagtgctagaggccatggagtgggaccgggacaggcaaatgtctaggagaggcgaatgtctaagggctgggagagggacactcacggaaaagactggagaccacagggccaggccccggccccacccacacctccagacggcacccttcatggtgtgctccttggcaaatctcttggccagttttggagtt

SEQ ID NO: 8430 - DNA, 805 bp, Artificial sequence
  DNA replication origin
gtgccagggtgggctcacagtctaatgggggacgcagagggtcagacagtgctagaggccatggagtgggaccgggacaggcaaatgtctaggagaggcgaatgtctaagggctgggagagggacactcacggaaaagactggagaccacagggccaggccccggccccacccacacctccagacggcacccttcatggtgtgctccttggcaaatctcttggccagttttggagttcaaaggcagtcccacccgctccctgttgtgtgggaggaggaggactggtcattcagcagacatttactaccaagaccttccccggctgtgcggcgcggggctgggagccctgaactctgctgctgcctccagccacagaggggccttggaggcccctctggagggagtagccaggctctgccaggcatgggcagtcaggggaggggtggggaggtacgtggcaggagcacggttgtgatggccggagaaggtaagagggaggtccgggcaggggaacaggacaggggaagcttggactggtgcatccaagactggtgtgcttagaaactgcacatcagacggggtgggagagtgaaggatggggttgcaagtttaggctggagccaggtttgggaggaggtacaggaaggatcggggctgatggccccacagagcatcttggtggccttggtgggtagaaatgaagcggcattggaggtggatgtgtttctgtctactgtgtcgccccagcctgccccagaaatatgaggtccctcctcctgggacactgggtggcccctgccttgct

SEQ ID NO: 8431 - DNA, 1554 bp, Artificial sequence
  DNA replication origin
gcaggtgcgcgcgagcagcccgcggcgaacagcggcgcgcaccctcgcttcgccccgccccctcgcccgccccctgggcacgcccccacgcacttgcgccccgccccctgccggcccgcgcccgttcttccgcccgtgccgccgcgtctggagctcggcgctcgcccggctgtccctcttccgggggccgcccgccgcgggcctccggagcggcgtcgccggccctttttttttgccggagaaccaaccggagtggcgaggagctgccttgagcgggcctttgtgcccgcagggcccccacggacatccgacagggggccccttacctggtcggctccacccgcagccatcttggaagtgggaagcggccgggagggggaaggggctcgagcgggcagggctcaggcgtagggagccgagcggcggagcgcatcgatggggctcccctgccccggccggtgtgcgggagacggcccgggccccgccgcggaagggaagctttgcgtgacaccggagctcaggccccgccgcggtggtcttgggagcggcgccgtggcgtcctcccagccagcctcagtctcttaatctataaagggcttttccgaacgttctctcttatcgcgctgtgacacggtgcctggcgctgtagttcccaaactggtctgcactttagtattgcctgcggagcttttaatattctgaagcccaggccgattaagtcacagtctctgaagatgagatggaagcatcatcagtttgggaagctgtgtaatgtgcacgcgggtttggaagccactggcctggcgttatctgcatatttggcctcaacattgcacaaactccagagacgggatctatgatcagagccattgtacaaagcgggaaacgggctcagagatgaagccctccgcccaaggacccgggtgggtcagtagctgagaggggcagaagccaggttccctgccccagagccctccatgagctggtagagagtatgtgaggagcccctgttgacgggcagtgggtctccattccccttctaggctgtgggttccatgaggaaagccgggcttatcttgtttactgctattttccctgggcctggcaaatagttggtatttgacgttattgggttgtcgttagactctggggacttgagggcaagaggagagacccagcgctgggagccagaagtcctggatttccacttggctttggctcctgccaaccaggagccctgagggttgtcactggcagataaattaccagagaggaaacccgggagagactgactgcagcccaatctaagggaagactcagccactcagaaaggtcaggggcaggaggagtttccgcattacaggaagcatctggaagcatgaaatggaagatttgtctctactgcggtcgttagggatgggctagggaaccccgaacttgggtctcctctccagctcatggctgtaaaaaccctgagcatctatgagatatgacgcagaagcaagagagatttttaaaggcgatctcttgaaagcaaaaacattaacatccctc

SEQ ID NO: 8432 - DNA, 880 bp, Artificial sequence
  DNA replication origin
cagggggcggggcgcaagtgcgtgggggcgtgcccagggggcgggcgagggggcggggcgaagcgagggtgcgcgccgctgttcgccgcgggctgctcgcgcgcacctgcgggtcggacccgctgcctaccgcgtgcccggcgtcctcgtcgcgcgagttgccggtcccgcggggcctgggctgcgggcccacgggtcccggggatggcgtcggagccgcgctaactccggtactgagagcctcccgcgagggccgggccgcgggccgcgagggagggcagggcgcgcggggccgccacctgctgcagcgccggccgaggcggggagcggccggggcgaggcaggtcgccgggcgcgggtcctgctgggtgtccctcgccgcgcggccgcggctcctgcacgccagggcagcgcgtgcgtggcgcccggggtgccgttacggggcctccggggcgggggcgactctcgggactcggcggccctcgcggaggcgcgcgctgtgtcccgctcctttacggaacttgacgaaaagttttcctactccgacgcgaggctcccggcctgagaagaggcgcctcggtgcgccagaccccgaccccggagcccccttccacctcggaccctcagtccccaggcagcggaccctcctccttggagcccctgaccccgctttcatctctgacccctctacccctggagcccctgacccgcgaaaccccctttcatctcggagccctgacctccttggacctccacccacgcgaaccgtctgtccctgggctagggaatctctctgcctccgccttggagcctcccattaccgggccgcgaagaccctggcccggggactgtctcggggccggggtagctgccttgagga

SEQ ID NO: 8433 - DNA, 989 bp, Artificial sequence
  DNA replication origin
tcgggactcggcggccctcgcggaggcgcgcgctgtgtcccgctcctttacggaacttgacgaaaagttttcctactccgacgcgaggctcccggcctgagaagaggcgcctcggtgcgccagaccccgaccccggagcccccttccacctcggaccctcagtccccaggcagcggaccctcctccttggagcccctgaccccgctttcatctctgacccctctacccctggagcccctgacccgcgaaaccccctttcatctcggagccctgacctccttggacctccacccacgcgaaccgtctgtccctgggctagggaatctctctgcctccgccttggagcctcccattaccgggccgcgaagaccctggcccggggactgtctcggggccggggtagctgccttgaggagtaagtccggggactcctggtctccctcccgccaggagtctctctaggctgtgggttgcggtcctgatgggaacagctggtcaggaggataggagaatgaccctgtggactccagagccagcctctgcgagccccggggtgaccgcgcctgaccaggccacgtgaagtcgtttctgtcctaaagttgcataggacgccgttttctctagcgtggaattggaagctttgcttgggaaggttttataggcaccggtgcgttttgcccctactggaggtccctgggcatcaccttggttatttcacgcactgaggctagatgaggagggtagtcgtggtggtgtcttggggacaaaatgctcactgtcttgtccccagtattgtaggatgttggcacctagttgctgtcttgcctagcttttatagcggtgggttgcctgttggaaactggtggttgctttgtctggaccgggctagtccttacagcagtcttagaacacttcctgttgcccagtttatctggccagtaccaacccatatctcagtttgggtatggcttcccccctccgaccaaccc

SEQ ID NO: 8434 - DNA, 1109 bp, Artificial sequence
  DNA replication origin
gggattacaggcatgtgccactgcgcccggctaattttgtatttttagtagagatgggatttctctgtattggtcaggctggtctggaactcccgacctcaggtgatctgcccgccacaacctcccaaagtgttgggattacaggcgtgagccaccacgctgggcctttttaaaaattttaaacataatattgtagacgaggtggcttgtaaacaacagaaatttgtttcccacagttctggaggttgggaggcgtaagatcaaggtgccagcacgttcagtgtctggtgagctgttgaacatgtttttttataagggcactaatcccactggggagggctccaccctcatgacctagtcacctcccaaaggcttcatttcctaatactgtcaacctgagggttaggatttcaacatgtgaattgggtgggggcacaaaccctggggttgtagcagtggggatggtgtgctgggttggaagctgtgtgaaagccatcaaggcgtgtgggagaatggatagagagggaaggaagcgttgctggggggcagcaagggccctgccaggtgatcagggaccagtcagcgtgctgcgcgtctttctccagccatgttttttgcacaggtacacgtgcagggcaggcttgtctttgagctaagtgtgtacagggaagggagagagaggcagggctcagggacgtgtgagggtgattacattggggcatggattctccgggcggtggaaggagggtggattagagaagcaggatggagaccctgaagcctggagggtagtggggggtcgtcaccgtgtgggcggggaggctccagtcacacagccggctgggagtggaacctgcagggtcagtttccaccacgtctgacgtaggctccccccggggccgttgcattgctgattgagccgcatctggtgagcctggtccaggagtgttggagaaaggaagtggaggtcttcattccactcctcccgggtgctgggtggggagagggaggcagcagtgccgtcccgggcgttgtggtggtgggcgctactttgctgggctggccttgccgagacacagcttcttcccatggtgtaagagcctccccat

SEQ ID NO: 8435 - DNA, 1385 bp, Artificial sequence
  DNA replication origin
caccgcccttaatccattcaaccctgagtggacacagcacatgtttcagagagcacagggttgggggtaaggtcacagatcaacaggatcccaaggcagaagaattttccttagtacagaacaaaatgagaagtctcccatgtctacctctttctacacagacacagcaaccatccgatttctcaatcttttccccacctttcccccctttctattccacaaaaccgccattgtcatcatggcccgttctcaatgagctgttgagtacacctcccagacggggtggtggccgggcagaggggctcctcacttcccagtaggggcggccgggcagaggcgcccctcacctcccggacggggcggctagccgggcggggggctgacccccccacctccctcccggatggggcggctggccaggcggggggctgacccccacctccctcccagacggggtggctgccgggcggagtcgctcctcacgtcccagacggagtggctgccgggcggaggggctcctcacttctcagacggggcggttgccaggcagagggtctcctcacttctcagacggggcggccgggcagagacgctcctcacatcccagacggggcggcagggcagaggcgctccccacatctcagacgatgggcggccgggcagagacgctcctcacttcctagatgggatggcggcctggcagagacgctcctcacttcctagatgggatggcggcctggcagagacgctcctcacttcctagatgggatggcggcctggcagagacgctcctcacttcctagatgggatggcggcctggcagagacgctcctcacttcctagatgggatggcggccgggcagagacgctcctcactttccagactgggtagccaggcagagaggctcctcacatcccagacgatgggcggccaggcagagacgctcctcacttcccagacggggtggcggccgggcagaggctgcaatctcggcactttgcggggccaaggcaggcagctgggaggtggaggttgtagcgagccgagatcacgccactgcactccagcctgggcaccattgagcactgagcgaacgcgactccgtctgccatcccggcacctcgggaggccgaggctggcggatcactcgcggttaggagctggagaccagcccggccaacacagcgaaaccccgtctccaccaaaaaaatacgaaaaccagtcaggcgtggcggcgcgcacctgcaatcgcaggcactcggcaggctgaggcaggagaatcaggcagggaggttgcagtgagccgagatggcagcagtacagtccagctttggctcggcatcagggggagaccgtggaaagagagggagagggagaccgtggg

SEQ ID NO: 8436 - DNA, 940 bp, Artificial sequence
  DNA replication origin
ccaggccgccatcccatctaggaagtgaggagcgtctctgccaggccgccatcccatctaggaagtgaggagcgtctctgccaggccgccatcccatctaggaagtgaggagcgtctctgcccggccgcccatcgtctgagatgtggggagcgcctctgccctgccgccccgtctgggatgtgaggagcgtctctgcccggccgccccgtctgagaagtgaggagaccctctgcctggcaaccgccccgtctgagaagtgaggagcccctccgcccggcagccactccgtctgggacgtgaggagcgactccgcccggcagccaccccgtctgggagggaggtgggggtcagccccccgcctggccagccgccccatccgggagggaggtgggggggtcagccccccgcccggctagccgccccgtccgggaggtgaggggcgcctctgcccggccgcccctactgggaagtgaggagcccctctgcccggccaccaccccgtctgggaggtgtactcaacagctcattgagaacgggccatgatgacaatggcggttttgtggaatagaaaggggggaaaggtggggaaaagattgagaaatcggatggttgctgtgtctgtgtagaaagaggtagacatgggagacttctcattttgttctgtactaaggaaaattcttctgccttgggatcctgttgatctgtgaccttacccccaaccctgtgctctctgaaacatgtgctgtgtccactcagggttgaatggattaagggcggtgcaagatgtgctttgttaaacagatgcttgaaggcagcatgctcgttaagagtcatcaccactccctaatctcaagtacccagggacacaaacactgcggaaggccgcagggtcctctgcataggaaaaccagagacctttgttcacttgtttatctgctg

SEQ ID NO: 8437 - DNA, 1420 bp, Artificial sequence
  DNA replication origin
acagatacacgtgatgctcgcacacccgcacaaccgcacacatgcacactcgcaccctccacctgcgcggggccgcagggctggcaggcccaggacaggacaggcccacgggaccgggcaggcctggggcgcagggagaggcaccggcccgcaccccgactcaccatgaacgccggggccttagaggcgcgcggccggaggctccatgcccagcgagcggagggccggcctccctccctccctcccggaccgcgggcgggcgggcggacgcggcggctcctcagactcgcggggcggggcggggcggcaggccgctcaatcgcgcgcagacacagcgaggcgatccgcgctgccggctcggcgcgtcaggcctggctggagactcccaagggggcggggctgatgagcggcgaggggcgggcacaaggggcggggctggggcgtccccgtggtacggccccaccggccgtaaacaccggggacgcgcgccgacaggcggagagccagcttctgccttaaagatcacccgagagctgagaaacgtgttgccaaaagaaattgcacaaaaatagtcgcactagtgagctctgggtggcggggtgattgtgagcagtttttacgggctaccgtggctcctgtttttcacaaagtattaacaggtgggtttaaaacgtcagggagcacacaaaacactcagagaagccgaacaggcgccccggggctgccgggagggagacggaagctggcgggacagcgcccttcagatggcgcggtacgctgtcgatgagacctcaggtttttaaaaacagtctttaaacttcgaccctacaccataaggactacgtcgggtcaaaattacttctggtcagccgcgggccccaggtcccagggctgagcaagtccggtctgcgacaacacgaggctctcccgtgacggggcctagcccaaggctccccccgcagatctcctgggattcagaactaccaaatcgccggcagacaggtctccatcagaggaagcctgtgacggccgccaggataaaataaaaaggacaatggcaagtgatagcaaagacttagagaagctggaattctcctaaatccttggtaggagtgtaaaatggtgcagcttcttctataattcagcatcccctaccatactccctggaacccacccaagagaaatacgaccagagagacttgcatgcaaacattcctaacagcattgtccacgccaaccagaacgtccaccaaccgcggatgcatgagcagcagggaaatggccatgaaaagaaactgctgagacatgggcctacatggatgaacctcaaaaacgctaggccaggtgaaagatgccagacaagaaaattccattattccatttatgtgacacttcttaaaaaggtaaatctctagagagg

SEQ ID NO: 8438 - DNA, 1213 bp, Artificial sequence
  DNA replication origin
tgcaatttcttttggcaacacgtttctcagctctcgggtgatctttaaggcagaagctggctctccgcctgtcggcgcgcgtccccggtgtttacggccggtggggccgtaccacggggacgccccagccccgccccttgtgcccgcccctcgccgctcatcagccccgcccccttgggagtctccagccaggcctgacgcgccgagccggcagcgcggatcgcctcgctgtgtctgcgcgcgattgagcggcctgccgccccgccccgccccgcgagtctgaggagccgccgcgtccgcccgcccgcccgcggtccgggagggagggagggaggccggccctccgctcgctgggcatggagcctccggccgcgcgcctctaaggccccggcgttcatggtgagtcggggtgcgggccggtgcctctccctgcgccccaggcctgcccggtcccgtgggcctgtcctgtcctgggcctgccagccctgcggccccgcgcaggtggagggtgcgagtgtgcatgtgtgcggttgtgcgggtgtgcgagcatcacgtgtatctgtcctcaacagccgaagcttgctgtgcatgctgctgatgcgctctcctccctggtactctttgtgtctgtgtttccacgtattttcttctggttcacgtttactaggacgacgagagacagcgtgagcgagcacgtcctttgagtcctccttaccctgttttcagagccgggccaggcccagcagcccccttagaggtcagaagggcctcgcctgcgatccgatgagcctttgtatggagatgagactgcgctccgagctctagagcccaatgaggtggtcaggttgcaacagcaaccgggcgtgttaaaacctagttcctttgaatatgtttcattcaccagcccgcatattaacttttgatgctctgggaggaatatgactattagaaaaggactcctgagagtgcttcccagaatgccaacattcccagtaacttagagaacgctttccaggaggggactgcagcttgttaaagaacccaggccagaggaaccactcagatgttctcagtggctttacttactgtgaggtcaggcttcaggggttagccggggctgccttttggaaggtgggacctttctaagacctgtgcaggccattcttccccctcaaaatggcaaaacagcccctcccagatgctaaactgggct

SEQ ID NO: 8439 - DNA, 791 bp, Artificial sequence
  DNA replication origin
gagaaatggtatcttgggcctgtttgtttccaaagtgctgtccattccttaaaggacccgtcctaagcacccggcctgtgcaggccctcgctgggtatagaggtggcctgaggagcaagggcagcgcttgcctgtcaggagctcctggcttgtgggagacacgtgtgtccatggacactgtccacgtgagatgagtgccgtcttggaaggcaggaggtcctggacccagcacagggttcagagtacatagagcgaaggtgacaagtgcatgtgccattccagagtcagcgggcactgtagccaggtctggtggggtagaggttgaaagtaaagggcagaggacggcaggcgatgaggtggggaggccaggtcacggtggctcttagacccaagctctggagcttgggcaggattgcggggccagggggagtgggagaaggcttctgctgaggatgagggtggggcagatccagcggcgagttttaagttacctggaaggcaggagagcctgggaacagagagaccaattaagggggaaaaagctgaagtaggtggagagaaggccccgtggaaatattgtgggtatgtcagagaatcatggtcagctcttgactgcggttggggaaggggtttgctgatgccttcagctgagaccaaagacaaagggagaagattcggccagggcagttagtggatttgacttcagatgggtgattttgaggtgcctgcgggacatgtgagtacaggcatcctgagacagatacaaggatcctgagaggtctacgcagcag

SEQ ID NO: 8440 - DNA, 1341 bp, Artificial sequence
  DNA replication origin
actaaaaatacaaaaattagctgggcatggaggcgggcgcctgtaatcccagctactcgggaggctgaggcaagagaatcgcttgaacccgggaggcagaggttgcagtgagccaagattgcgccactgcactccagcctgggcaacagggtggagactccgtctcaaaaaaaaaacaaacaaaaaactgacagcacgtcactgatgcccaagccccccacccccatcatcagactaactcctatcaccatcccattaataacaatgtcctacggtcaaataatctgacccagttttaaccaatagtttttacctagtccctaaaatatgcaaggatcaaaatggctgatctgggtttaatcctttcctgtgtatgtgggtgtgcagtatgtggatgcgcagggactgacctgcacctgtacgtgggtgtgtatgtgcatgtgaggtgtgtgggtgtgtaatgtgtacgtgtgggtgtgatgtgtggggtgacgtgtgtgtggggctgtgataggtgtatgtggggggtgatctgtaggtgtgtgtgtgggtatgcaatgtgtaggtgtgtgatgtgtgcatgtatgtgtgggtgtgtgtggggtgatgtgtaagtggtgatctatgtgtgggggggtgggcaatgtgtgtgtggggggtgatctgtgcgtgtgggtaactgtgtggggtgattgtgtatgtgtgtgattgtgggtgactgggtgtgcaatgtgtgtgcatgggggtgatctgtgtgtgtgtgggtatgcctgtgtggggtgactgtgtatttaagggtgtgtgatatgtgtagggggtgattgtgtatggatgtgtgatgtgtgtggggtgattgtgtatgtgggtgtgtgatgtgtggggggtgattgtgtgtggttgtgtgatgtgtggggggtgattttgtgtgggtgtgtgattgtgtggggtgattgtgggggtgtgtgatgtgtgtggggtgattgtgtgtggatgtgactgtgtagggtaattgtatgcgtgggtgggtgtgtgatgtgcgtgtcgggtgattgtggtgtgtggtgattgtgtatgtgatgtgtgtgtggggtgactgggtgtgaggtgtaggggtgtgactgtgggtgtgcaatgagtgtgcgtgggggtgatctgtgcgtgtctatgtgtggggtgactgtgtatgtgtaggtgtgtggggggtgattgtgtgggtgtgtgagatggggggtgaatggatgtgcaatgtgtgtgcgtggaggtgattgtgtgtgtggggtgattgtgtacgtataggtgtgtgatgtgtgtggggggggtgacatatgtatatgccataaa

SEQ ID NO: 8441 - DNA, 1912 bp, Artificial sequence
  DNA replication origin
ggcagcggggagaaggcgctggacgacggcctgtcgcctggccaatcgccgggcccagcgcgcgcgccttctgttgccccgggaaacctaacagcgtcctgccggggtccgctgcgctggccgagccgggaggagatggacgtcagctctgagcacactaaggaccccggcggggaaggcggagacggggaaagcctggccgcgcggccgtccaagatcaaggccagctctggccctccgacctctcccgaacccggggagctggagtcggagccggaggaggaggaggaggagcaagcggcttcgcagggaggcaccgccgcggacgagcaggccgaggccccgaaagggctaacggcagccgaggctgcgggcgaggaggggcctggagagccggggaggccggccgagccccagcccgagcccgaagagccggccgaggttggggctgaggagcccgcccagccggagcccggagccgggcccgaggaactagaggcggaggcgggggcggaggaactggagcaggcggcagaggggaaggaagtcaggttccaggcctctctgccgctgaccaggatcgatgaggaagaggctgctgcagccccggaggccgagacagagcgggtggagggggaggaagaggacaaggaggagacgcagagagacggcgcggagagcaaggagagggatggggaaggacgcccggccaaaagccaggaagaggggaagcgcctctatggaagggacgagtttgaggacctcgagtggtccgaggaggtccagaagctgcaggagcagcagctgcgcagcgacctcctggaccagtaccgttccctgctggtggagcggaaccgctcccagcgctacaacctatacctgcagcacaagatcttcgaggcgctgcgcagaaagaagggcctggaggccgctgaggtggctgaccggggcgcagaggccgaggcccccgagaaagagcaagcgtacctgcgccatctgggcatgctggaggagctgaagaagcagcaggcagacgacctgcagtggtaccaccaggagctgggccagttgaagcggcagtgccaggagaagctcaccagggtggagaaggagtggcgacgcttccaggcactcaagaagcaggtggtgatgcaggccatgggcagctgtcggatgaggggcgggcgccaggctgctctgcgagaggtggagcagatccaggcgttggaggataaaaaggagaaggagatgagcgccgtgcggctggagaacattcagctgaagcagagcctggtgcattttgaaaccaggatgaggacccaggaggacctgacccagggtctgcttcttattgactttgaacagctgaagattgagaaccaaaccttcaatgagaaaattgaggaacgaaatgaggaacttttaaaacttcgcagcaaggtgaccaacagtgtgcaagtaataacccacgtgaaggaaaagctgcacttcatggacatggagaacgcgtgcaaaaagacacagctggcagaaatcgaggcccaggccgccctaggaagagacatcctgaccaagacgaagcaagcccgagaggggctgcggacggacaacatcagactgaatcagaagtgcggccttctaggcaaggactcacttcttcgggacttggaagaaaaggtggacaagaccgaactgcttcaccggcgcctggaatccctgaagcgccaccacgctagcctcactttgtcctgcagaggcgtgaggcagaagatcagggaggccaaagcctttctcccttcttgaccagatcgatgagaagagtctgcaaaacacttcatcctcaggacgtgctgtcctgctttattttaccttcgttgctattaaaaaggcctgtgtcatttgggacgggact

SEQ ID NO: 8442 - DNA, 1899 bp, Artificial sequence
  DNA replication origin
gttgctcgtgcgcggcggcggcggcgggtcccgcgggcggcggggcgctgacggccgggggcgcggcggctgcggcgggccgggcggcgggcggcgagcgggggaagatggcggagctggggaagaagtactgcgtgtactgcctggccgaggtgagcccgctgcgcttccgctgcaccgagtgccaggacatcgagctgtgccccgagtgcttctcggccggcgccgagatcggccaccaccgccgctaccacggctaccagctggtggacggcgggcgcttcacgctctgggggcccgaggccgagggcggctggaccagtcgcgaggagcagctgctgctggacgccatcgagcagttcggcttcggaaactgggtgagcggcgcgacgggggccgggtcccggctagggcactggaaggcccgcgcctctcctgtaatcgggcgcgcaggcagcgctggacctgctcgctcgctccgcaccccagaaggccccggaggtggggagggcgacgctgccggtttatagtcgggcacctgtcggaacctatgctctgagaggctgtgacgcgcccaaggtcacacagccgagacggggccgagtggggctttgaacgctggcttctgacagcagagccatttccctcaccttcagggacgccttcacaggcgtttgcggagtgcagacgttgggcaagactcggtgccttacctgagttcgtggagacaggcaggcccacagactcgacagaaagcggtgggagcaccagggaaggagagcggtgggcgccctgcggcttgtctcggggtctctggggcggccccgtttgctttctgtcactgtatgcatgtgccctgtgtggtccgcagtgcacagagtcttttgtgggtagcgtgcctggtttatgcttgggtccccacaacccacgaccttgtgcgaatggtcagtaaagaatgaacaaagaggcctggcctgggaggcctggggcttgggttttgctctctttacctttgaggtttctgtagagacagccctgtgtggggagcggtgagagctggactggatccacttacgctagcaacatcgtgtgctaggttctgtccttgagagaggaacatggttctctctgggcggtctctcagctctccttccactctggaagcttgcatccgtattagaaaggagaaaatctctagccgtattcccgctcataaccaccaaagacatgtggccatccccgggcaccctgaggaggaggggagtgagacacccccagcgcccttagctttccagagtcttcccctgctacaccaggtgcctgcttctcggaacagcatccatctcgctgccacctctccagcagtcctgcctgggctgctttgattgccttttgctttcctttcctgagtgagtctcagggccgcctcacatactcattctgaagccctggaatgttgattctcctcccaactccttagagaagatgctcctttacaaacccttacctaatggccaccagcactgggatctccatttttcagaaactccgtcccaccttgtccttccatgctgtttgtggatatgcactgagcatgtgttctgtgcggattctacagtggcggagaactctgaaggaaagagaaggctttatccctgcattcagggagcttaaagtgtggtactgacttggtcctaggcccagagctcttccctagcaccagccctccatgtccagccgcctccctggcctacctgcctctcttagttccttgttccactaagttcctgatccaatttatcagctgtctcctcacagtacatgcagaacaaaccacttcttacagccgtagtcccggctgatgtttacgtttacttcttgccttgaccactttgggag

SEQ ID NO: 8443 - DNA, 975 bp, Artificial sequence
  DNA replication origin
ggtgggttcttattcttacagttgaagaacagcagctgtaagaaactaagcgccttgtcagggattccatggcattcatgtgatagagccaggaatgaacgcaggcctatgtgattccaaagcctgggccctaacccattctgggtgagagcattaagcaatgtgggtcagaggctgggaggccatcggtgccaccgcaggagtggcagaagggcttgacctgattcactggagattagtgtggaggcagggcctggactcatgggctgtgactgtgagtgtggaaggagatggtgtgggggctggcgacagtgatgtgacgaaagatgagacctgttgagttctactttcagatggcaaatggtgacacctggcctgggggttgtacaactacatgtgggattcatgggagagggtggattgtggccaaatctggcagctttgtggtcacattttgtaccagggctgggggatggggcctgaaggggacgggatgtagctgagcagggttaacagtgacacctgggggcttagggacaacccgtgtgctggtgtgtatgtttgatagcgaggggcagagagaacaggttaaaggaccttggctacagtgggtaagagttggcaagcagtggcctagagtcagattagcggggtctggcgtctctagaaggccggtttgtgatgggttctgcgcaggattccaagagttagaggatgcaggccctgctggagcacaggaacacagacgcaaacacaggtgacagctgagggcaagtcgcagtggtggcagaggagccggagctgttgattggttgccaaagaaattgggctgacactgaggagctttaggagggccagtgctcctctgcaggtggtggtcaggagggctttggcggggaagtggggttcaagctggcccttgtggttttgaatcaaatgagcatgtgaagttctctgtgaaccatggaaggcctt

SEQ ID NO: 8444 - DNA, 1397 bp, Artificial sequence
  DNA replication origin
agggttttgccatgttggccaggctgatctcgaactcctggcctcaagtgatcgaaccgctttggcctccccaagtgctgggattacaggcgtgagccactgcacccagcctattttcttgatagtgtcctttagagcacaactgttttgaatttgctgaaatccaatttatttattcttccttttgttgctcatgctttggtgtcaaggctaagaagctgttgcctccatgaggtcctggagacacggccctctgcttcttctaagagcttgatcattctagtgcttgcctttagttctttgtttttgagggaacagaggccatttagcttggagaaggagggaggggtatggtagctactggcagactcagaggggctgtcctggcatagtgtccagagggcactgggaccctgaggacagctggagccagtgtgtgtgtgggtgggtgggtgggtggggggggggggcggtggtcagctctaagaatctggggatgaaacacgctgggcagggaggggtcctttggagctctcgcctctcagaagcaggacccaaaccaactccccagctcccccagcattccccctccagcttgaggcagggctggtgtggggtgggagtggggaaggagccctggtgagtcagatggagaacaaagggcccaccttggtgggaggagggagagaggaggccgaggagggtgaactatgcagacaggtggcctgcgaggggtgctgtgctgccctcgggctctgggcgaggcctctatcccaccgcaggaaaaccctccttgcagggagctcatcttccgcctttcaaaacttcagggcgctcctcaggcatcgcacagggtaacggcttggaccagcagcagcactggctgttcacaagcatcttgtggtttttcagagccctgtcctgccgcttggggcagcacttcctcccgccgggccctctcccttcctctctccagacgcctagtcctcacatgggcaccttccctttcctcaccctccagggtcgcccaaatcccatagcccttatcacgtgctgtggatgccaacacgcagccaagccactgtttctggggagcaaccaggggatcgggcagcccaggtaaaggctgcggtcccagagctgtgggaagggaggggacaggacaagaaggaaaggaaggaaaagcgtgcggaacctgcagtgcaattgttgggggaagccggtgagaagtcaggcttggtgagggcagatacctgtttctgcctccacaggacgctgctctcagaaggcaaagagctcttgggctgggcatagtggcttacgccggtaaccccaccactttgggaagccaaggcaggtggattacttgaggtcaagagctcgagaccagcctggcc

SEQ ID NO: 8445 - DNA, 1515 bp, Artificial sequence
  DNA replication origin
gaaacatcaaataaggaattattaggccaaggcgagtggatcacctgaggtcagtagttcaagaccaacctggccaacatggcgaaatcccgtctctactaaaaatacagaaattagctgggcgtggtggtgcacacctgtagtcccagctactcaggaggctaaagcaggagaactgcttgaatccaggaggcagaggctgcagtgagccgagattgtgccattgcaccccagtctgggcaacagagtgagattctgtctaaacaacaacaaaaaaagaattattaaacacggaacgaaaaaaagatggaaagaagatataaaccagagagggcgatattaaaggcaacatggaggcgctgtggagtaaagcgcaggtgatgtggaggtgaggaggaggtgaggtggaggtgaggaggaggtgaggaggaggtgaggaggaggtgatgtggaggtgaggaggaggtgaggaggaggtgaggaggaggtgatgtggaggtgaggaggaggtgaggaggaggtgaggaggaggtgatgtggaggtgaggaggaggtgaggaggagggatgctgagctgctggggcggggatgtggagatactgtagtggtgacgtacaggtgatgtgacggtgttatggaggtgaggggatggcattgtgatgctgtggaggtgacgtggaggtgacatgaaggcattggataggtgatgtggaggtgacgacgtgcaggtgccggggaggtgacgtgagcgcagtgtggaggtgatgtggaggggatgaggaagggccgtggggtcatactgtgatcccagtcctgcttccaccagcttctgccatgggactcaggcttcaggcttatattccccttaggagatggggctcaccaggcttccctccgggtctgtgggagaatccacctagctggcacgccgagctccagggtcatcacgggggccgaatcacttctgagaggagcaggtgagcgtcatgtcagctgggactcccgcatccatcctgctccttcgctctgcatggccggtgaccccagtggcttcctggcccctcgctgctgtcacaggctgcacctcgggctctgttacctgaagggacttctctggggatgtctggggcaggggccaagggcaccagtgttggagtttgatggacccagattttaacccccactgggctgtgtggccaggggcaactcacttctccccacctcttagcctccatttcgtcacctaaaaacaatgggggacatcacaggcccccaggacattgcatgggttcagggagtgacagccctgcacggggctcatagtgcacactcagtggtagcgggcacagttgctagtattgctcctgaaagggcactgtactggggtgaagacgtggacaccctgttccaggaatgtgcgcacattgagaagctggcgtttagtttgtgccaaggacatgtgttgctggtgtcagctgtcctcttatctggaccctgcagctcgtgggctagggg

SEQ ID NO: 8446 - DNA, 1409 bp, Artificial sequence
  DNA replication origin
aatgcccattttcttttgtttgggtgccttattcatcctctgagatctggatctggtgctacccgctccaggaagccttcctagacaatccttgtatgggttgggtgcctcctgggtctcctcagacctcagtgcttctttctgtcacagccctattaacttttaccaatgttgtgtctgtgtttctgttttattggactgactttcttgagggtggtgcccaacacagaggaagtaaatgcttgttgagaggatggacagacaaaagtacagagggatggatggatattggatggatagacagatagatggatagatgatggatgaatggatggatggaggatagatgggtaatggatggatgggttgttgggtgggtggatggaaggatggatggacacaggaatggatagatggatggtgggtggatggatagatggaggaaggggtggatattgggtggatagatgcatggatgatggatgagtgaatggatgcgtgaatgatggataggtgggttggtgggtgggtggatggaaggatggatggactgaggaatggagagatggatgggagatggatggatgatgggtgggtgagttgattggtaggtagatggaaggatggatggatgaaggaatgtttagatggacggtggatggatggatggagggatggagggatattggatggataaatgcatggatgatggatgagtggatggatggatgatgaatgatggatgaatgggttggtgagtgggtggatggatggatgatagaagatggatgaatgggttggtgagtggatggatggaaggatggatggatggaggaatggaaagatggatggagggatggagggatattggatggataaatgcatggatgatggatgagtggatggatgagtggatggatggatgatggatgaatgtgttggtgagtgggtggatggatggatggatgatggatggatgggttggtgagtgggtggatggaaggatggatggatggaggaatggaaagatgaatggtggatggatggatggatggagggaaggagggctactggatggataaatgcatggatgatggatgagtggatggatggatgatggatgaatgggttggtgagtgggtggatggaaggatggatggatggaggaatggactgaggaatggtggatggagggatggaaggatgcatggatgcatggttatatggatggatggatggaagtttgcttgagttcagcatattttgttggcaagtctctgtggcaatgtgctctctctagtctcaggtttacatttcatttagctgagccatcctacccttctttcacttctgcccttccctttctttcaatgtctaagtcctggtctattgagggttttctggttgcc

SEQ ID NO: 8447 - DNA, 2076 bp, Artificial sequence
  DNA replication origin
acggtgcaaggtgcagctgtgagcgtgagaggggacaactggcagggcaggggcagtaagctggtgacgtccaggctgccgtgggccccccgggcagtccgtctctgctgagtggctctattgcggcctgcaggaggtggagctgctgaagtgtgtgttgggggtgtttggaatgagaatttggcaggcacatgactgagtgggatttttatggagtgtctcctgctttggggccccggcctgcacctttgcaggcatgcaaggcccccgcccaggcccacttccctgcatctggctcgcacctccttccaggcccaggcccgggtctagaagtcagcccctccagagagaaagctaaaccccaccagctccccgcacgcagcagcccaggggccaccaggggttgcgttccggggctgggctgtcgctttcctagaaaggcagagcagctccgggatgagcttggtgtctggctatggaagcagaaagccccgcagagtcgaatcccccaacctgcacggccccatgctggagaggcacggcacacccactcctttgcgtgcatctggcatccccaaggcctggggcttccaagtgtgacatatctgtgtgtctgtcagtgtgatgtgggtgcgtatgtcgagtgtggtgtgagtgtgtatgtgtgagagagtatggtgtgtggtgtgtgtgtgtgtgagtgtgtgggtgtggatgtgtgtgtgggtgtgaatgtggtgtgttgtgtggtgtgtgttttgtgtgtcagtgtggtgtgtggtgtgtatgttgagtgtggtgtgtgtggtgtgagggtgtgaatgtggtgagtgtggtgtgtgtgtgggtgcgaatgtggtgtgttgtgtgttttgtgtgtcagtgtggtgtgtggtgtgtaaggatgttgagtggtgtgtgtggtgtgaaggtgtgaatgtggtgagtgtgctgagtgcagtgtgtgtgagtgtggcatgtggtgtgtaagtgtgttgagtggtgattgtgatgagtgtggtacgagtgtgagtgtggtgtttgaatgtggtgtgtttagtgtgagtgtgtagtgtgtgtggtgtgtgtgttgaatgtggtgtgtggaatgtggtgtgtgagaatgtgtgagtgtggtgagtgtgatgtgcgtgtgagtgtgaatgtggtgtgttgtgtggtgtgttttgtgtgtcagtgaggtgtgtggtatgtatgttgagtgtggtgtgtgtggtatgtgtgaatgtgtgtgttgagtgtggtgtgagtgtgggtgtgaatgtggtgttgtgtggtgtatgttttgtgtgtcagtgtggtgtgtatgttgagtgtgttgagtgtggtgtcagggtgtgtaagtcagtgtggttagtgtggtgtgtgtgagtgtggcatgtggtgtgtaagtgtgttgagtgtggtgagatgagtgtgatgtgagtgtgtgaatagtgagtgtgttgagtgtggtgtgtgtgtgggtgagaatgtggtgtcttgtgtgttttgtgtcagtggtgtgtggtgtgtaagaatgtagagtgtgttgagtggtgtgtgtgttgtgagtgtggatgtgagtgtgttgagtgtgtgtgtgaatgtggcatgtggtgtgtgtgttgagtgtggtgagtgtgatgagtgtggtgtgagtgtgtgaatgtgagtgtgttgaatgtggtgtgttcagtgtagtgtgtgtgaatgtggtatgtgatgtgtgtggtgagtttgttgaatgtgtggtgagtggtgtgggtgtgtgaatgtggtgtgttgtggtgtggtgtgtgttttgtgtgtcagtgtggcgtgtggtgtgtatgttgagtggtgtgtgtgggtgtgaatgtggtgcgttgtgtggtgtgtgttttgtgtgtgagtgtggtgtgtggtgcgtaagtatgttgagtgtggtgtgtgtgtgaatgtggcacatggtgtggtgtgtaagtgtgttgagtgtggtgtgatgagtgtggcgtgagtgtgtgaatatgtgtaagtgtgttgagtgtggcatgtgtcctttctgacccggggcctgtgcagggggtgaaggtt

SEQ ID NO: 8448 - DNA, 733 bp, Artificial sequence
  DNA replication origin
actccatcggctgctgctgctgaaagaggacagtgttgcaggccggcacaaggctggatgtagagaatccaggacgcccgttctccgggaactggcacatatctctagagtggctgctgccagggtggtgatgtgcccttggagtcagaagtactggggctgttaactgtgtgtgtgtgatcctggacgagtcactttatgccttcattcattcattcattcattcattctttctttctttctttctttcttcaatccctgaaggtctactttataccgagccctgtaatgggcaccatgagtgagggatgcataagatgcggcccctgctttcagggggctcccaggctagtgggggagacagacttgcaaatgggaagtgctcagagccatccagtgggtgccagtctcccacctggtggcaatgcccaggccagctgttctagagggcaggcgctcagtgacctctgtctgcactcaggacagggaatcaagactcaggaatcagggcagaattcctggaggaggtggcagctgaactgagtctttgtggagttagagagtccaatgtgggaggaggggtgcgtgccgggaaatgaggaggcggcttagaggaggggaagctgtgctcaggaacggctttgtcactggcctgggtggtgggggcagtaaatgaggtgaggcgtggaaaggccagcccagggcagggcttggtgcatgggtcagccccgcc

SEQ ID NO: 8449 - DNA, 1025 bp, Artificial sequence
  DNA replication origin
ggaatgcttgaggctaggagtcagagaccagcctgggtaatgtagtgagaccccatctctattaaaatatatatatatttaaaatattagctgggtgtggtccaaactacttgggaagctgaggttaaaggatcgcttgagcccaggaggtcaaggctgcggtgagccgagatcatgccgcagcactccagtgtgggagaaagaaagaaagaaggaaagaaggaaggaatgaaggaaggagagggaggtagggagggaaggaaggaaaagaaggacaggaaggaagggagaaagaaaggaaggaaggggagaaagacagaaaagagaaagaaagaggaagagagagagagagaaagtgagaaagaaagagaaagaaagcgagaaagacaaagagaggaaggaaggaaggagggaaggaaggatgggagggtggaaggggaaggaaggaagggagggagagagggagggaaaggaaagaagggagaaggaaaggaagggagggagaaaggaaggggagaaagagagaaaagagacagaaagaaagagagagaaagagaaagcgagaaaggaagaaagagagagagaagggaaggaaggaaggaaggagaaacttgacagtgtcagttatcaagcacttacggtgctgggcactttccccggggcttgagaggacaacggggactctgctctgggggctgctgtttcaggccatcatatctcattctcacgaccaggctggagcaggtgtcactgtccccattttacagaggaggaaacagacccagagacattccttgactacacaaggtcacctggtcagtgtgtatcagaggccagactccaaaccaggtattctaaccccaaggtggcactgtttacaccacctcaagctgcttgtcatctatgcgtttgccatggtgcgtttgtcatctgtgtgttccgggctctcaggcactttacatctatggggctcagactcgggctgcctagccaggcagggcagcaaaatgagctcaccaccacca

SEQ ID NO: 8450 - DNA, 1038 bp, Artificial sequence
  DNA replication origin
aggcctgctaggcggccggagcggggtgggggggtgcagtgcagaggcccctaaggtgtcctcagcagaactgccccaaggactgccaggcctctggctcagacatcgggacgtgcagtggcttcatctcccaacccaggggccacgagggagctaccctgaacaggacaagctcctgtgtggggaggcgtggggagggggcagggggtgaggtcctagggacctggcaggcgcagtgaggaatgtggaaactgaggctcggagcacagcaagtccccacccaaggtctcgtggccactttagttcagtagcgataaaaatgacttcacagagcagccaccctgagtgtcagacgggcctccaggaacaagcacggcaggcgcttcccgaggcaaggccagggtcagagcctctgccaggccagggccaccctgcccatggccttcccccagaggccccgcgccagataggagcccttgggccggggtcccagtcataccccacctcccagctgggtcccttggctccagagagagcctactggggcagaggggcaaggcctcgaacatttgggaaagatggagaattgggggttccctctggctcccagagaattggagcacccatctccctccccaggaaatcatatcccaaagcactgggcacaggctacctgcattcacgctgtacccagcgctgggacttggggaggaggaggtctggccagatgcctaagaaggccccacactccgaatgtgccgttccctctcaccccaccatgtaaatcctgaacctgtcagcttcaaacccaatgggaagagggaagggaggactctgcagctgtgggaacatctggtctcacacaggaagcagagaagaacagagtggggtcagtgaagggtggaggggaggggagatgaggaaaagtgggggaccaaaagagggctgcagaccgtggctggcaggagatcactgaacatggagttagaaatgagatggttcggttcctcccagcttagacaggaaccatcacagggc

SEQ ID NO: 8451 - DNA, 1227 bp, Artificial sequence
  DNA replication origin
cgcgcctgccggtcctcgccgccaccgggctccgcgcgccccgcgggagggctccgcggcacccgggtcagttgggcgtgaggacccaggcgcccgggctcaggggagcgccccgccgccccgcaggcgcccagcagcagcagcagcagcaggagcggccgcgagcgcggcgagcgcggcggcggcggagccccggggctcggggctcgggcggtggggccggggcccttcgaggcgcgcgagggcccccggtgcgccatggtcgccaggggcggcagcggagccggcggcggggcggcgcggacgaggggaccgcggccgggagagcaggagggcgctggggagcgcgagcgagagcgcagagaaaggagccggcgaggggagggagcggcgggaggaggggactcggcggccccggcgccacccgcgacgccgagcgcgcaccgccacctgccggccggcccgccgcccaggcgctcgtgggaagcccggcgtacccgagcgcggccccacctccaggccaggatccccttcccagctcggtggttcctccggtcctccttcccggctctcccacctcttcccgtcctccctccctctctccaggtccagccacggttctgcggctctgggctcccgctgggaacagccaggtccctgtccgggagctgacagcctgagggagacagaccaacccaggaggacacatatataggcaaaagaactctgagctagaaccagggctcccggcgcagattataaagggttctcctcaaggggcctctgaagaggtggcagtggagagggggtgaagcccgtgaaggtccctggggaggcctgctaggcggccggagcggggtgggggggtgcagtgcagaggcccctaaggtgtcctcagcagaactgccccaaggactgccaggcctctggctcagacatcgggacgtgcagtggcttcatctcccaacccaggggccacgagggagctaccctgaacaggacaagctcctgtgtggggaggcgtggggagggggcagggggtgaggtcctagggacctggcaggcgcagtgaggaatgtggaaactgaggctcggagcacagcaagtccccacccaaggtctcgtggccactttagttcagtagcgataaaaatgacttcacagagcagccaccctgagtgtcagacgggcctccaggaacaagcacggcaggcgcttcccgaggca

SEQ ID NO: 8452 - DNA, 1465 bp, Artificial sequence
  DNA replication origin
tgcagatggagagaactcttctagggctcttctagggaggtggcacctgccacctctgcaagtcaccccagccggcaccctgactgccccctgctggcccactgcacccagggagccagctctcccctccaagggctgctagtcaggctggagatgccaggaatgacccaagaccagacacttggcacctgtaccctgatagatgctggctggttggggagctgggctctaggccgactaaattcattcagtgctgcccctacccctgccccaacatattcatctgcccacctcatccctcctccagcacaaatcacagctggctgggagtagcccagcaaagctggacagaggagatgggcacaagtgaccacccagattatgccctttcctggctccagaggccagtgctccccacccatgccactgccagtgcatataggaaccctggccctttgggaagcgagaagaggtctcctaggggaccccaggagacagcaaggcacagaaatgaggggaggcttccatctcccctccccatacaaatgtaccctcctctggggattcatggctgccacctccctatcccaatccttctctggaacctgcaaaactagagccccaccaggggctgccccagggtgacttcagagtggcccttggcccttttgtgggggtggggggaagtggggagtgaggttgaggcagcccccaggggaataatctaaagggaccctctgcctcctgcatgcaccaccaaaggccagaggaggcaggatttgggaagggtgggagccccaggctgtgggtggaggaacaggaggtccccaacagaggtggcaaacttccagctggagcaaagccagagtagccgggaaggtggggggagggcagggagtttgctgtgccagcgccacacaggtctccagcacagtgtgggtatgaacccaagggggtacgcgggtcccagtgcatccaggcggggcgaccggcagcaagagctcaagacagccgcgggtcgcactagagtaccccggggagaggggtaacccagaaatcccagagtcccagaacaggattcgagctgaccggggaagtcccggagcctgcggaggcgccaccgcggagtccctggtagaccagggagggaaggatcccggagcccaaaatcccagaacgcgacgctcagctggtggagtctgggggcaggggaggtaacgccgagctggggtaccctcaaggacctgcaggcttccgaaggttctggggtcctcctccgtaacccaagacctggaggccagtgggggagtatcggaggtggcccaggatcccgaaatctgcgggaatgtcccctgcggtgagacaagcgtacgaatctgaggacctctccccaagtaaccagtgaccagaggccagtaggggcgcggccgaggtgacccaagtgcccaagtcgccaagaacccgc

SEQ ID NO: 8453 - DNA, 788 bp, Artificial sequence
  DNA replication origin
gagaggggtcagatgccaggtacttgtgaacaaacggtgtgtgctctaccataagctctaactcaggtggaaaggcaacccagaaactgagagctcaaaggaccacataaatacaaaaagcaaatcccgcagggccagaaagctctaatcccctaccccatctgccgaggtggttgatcctgaagcttgctcctgcccctttgtcatttagcttcctggggagggggtagaggagccccatgtgaggggataggctgacatccagcctgcccctgtcctgacctcacagtctgggtgcagggcagcttcctgggagagagttgaggagggagcttgggccagcagggatggggcactgggggtggggggctgtcagaggagcccatgtggctttgctccttgagggcggcagctgggttgggtgactcctctgtgactgggtgggcttgcgtcctcactgctggcaggtgtgtgtgtgtgtgtgtgtgtgtgttgtggggggaggattgtgggtgggggccaatgttggcttctctttagtgaggacagcaagtccaaggaaccagagaggagctttaagggatggatgtcctctggtcagcatgaggcgaggggcaggggtgaggtgtggcacaccgggcatagcctgacacttagcaaacactcggggagtagaagccaggacaccctcattgtgagtagtgggtgtgggtgtccgtggggtcagatgctggaccaggcattgggcttcaacaccttccactcctgcctctctcacacacccattc

SEQ ID NO: 8454 - DNA, 958 bp, Artificial sequence
  DNA replication origin
gacagaagcaggcagaggtcaagggatgtggtgaccaggggtgagtgcctgtcatacttgctgtcaggagctggctgctggtggggcaagcctgtccgggaccctgggcctggcagctggatgaagaaccatgagggagccggggactctgtgtggagagaggcggcagcacatggggacatgcagagggcgggctgagtctagggaagtctcggcgtgcaaaccacaggctcgcacggtgacccagggcttctgcccttgccccagtcactcgacactcagagcatgggttgagagctcccagcaggaaggggagggtgttgtgcccagaaccctccacgtggcctcatatttgcctccaaagcagccggcaggccttgtttcctgggtgcttacccatggggtctgctgggtgcactttgcggaagtccccatccttctgattctcctgtgagccgggaggatggggagccgtgctctctctcgacctgggccctagtttcgtcatcgtgtttcgggtgtcagccctggggtgcagaggaagggcctggagccagtgggatgggctccttctcttgaagtgcttgtggtccaaagcggggtgggggcagagagccccagggatgcaattcaggaggagcgaagtggggccggtgtggaggcacagtgcagggagagcaaggtggggcaggggaagctcagttcacctggggagggggtcacatgggccacaggtggaggaggatgaggatgactggcaaggctggggaggtgtggctgaggggagcagcagagatctctgaggtgtagagggcaggtgagcctggtggaggggctgcccgtggccattgcctgtgctgtgaagcaggggctccctgagcagggctcctgcccatggtgtttcctggctggggtccgagggaggctgttgctgtggtctggccttcacagactcact

SEQ ID NO: 8455 - DNA, 911 bp, Artificial sequence
  DNA replication origin
accccatggcccagtcaagttggcacatgaaattaaccatcacacctggtaataccatccacccatccacccatcactcatccgtttgtctgcatctgtccatccatccatccatccattcatccatccatccatccatccactcatttgttcattcacttagcaaatgtttatggaactctacactgtgtggtgcactggggacccccagatgaacggggcagcctactgaagcagaaagtggaccatcctgcaccaggggccaggcagcatccggtggggacacagaggagagggtcgttctttttgtggggtaagatttgggaagacttcatgatggaggtggcctttgcactttaggaatgaatgtgactgccatggtgtgggtggtcagcagaggaggcattccagactgagggcacgaggacaaggatataagtgtggcatctggggggattgggagagacccaggctctcggggtggggatgagactggggtggggcttgggctggatcatggagggtcactcacagggtgcacttgggtgctgctggagatgcagatgtcctggcccatcctggagctgtgttctgacaagggccccgtgattgctgaggatgctgacatctgggcagcggagctgagatgacggagttgcggatggcttctgcggagggtggtgggagagtcactgtcttgcatagcttggggcacagcgtggagcaggattgggggaatggaggctgcgggccctgggggaagcatgggctgtgggagtagcctaggggagcagtggggaggcctgggctttggcaggatggatgaggggaaagctgcctggtggccaggaggaagggggacaccccagtgaccctgtggccttttcctggggaggctgctgaggtctgag

SEQ ID NO: 8456 - DNA, 1326 bp, Artificial sequence
  DNA replication origin
ccactctgtggacagggatgccatgggggtgcccagggcacccggttcaattctgcccaacagactgtcatgtgtcagcctctgggggccgagcatggtctcaaagtcaagatttggtaaggcactgggggacccccacccttggggagtgtttggtcccatagagacactgctgcactgtcagagacaaggtgtcagtgatgggcgcagtgtaggatggccatcaccagagctccctgctcctctgcactaggaacctcccagaggctttctggggcatgggtcagctgagcccaggagtcaggcttcggcacccgcatgttcaactactgccttcctgatggaggaggctgggctgggcacaggcgagtccccaaggtacccgagggaggccaggtactgtcactgcaggcagcaggaacggcacggcagagggagccttccagagcagggggaggcgtcggccagccctgagaactaggaagggtggtgtgggacccagacaccaactgtggactatgcctgcagaagccacggtggggacaggagcacatccagggtgtcatcatgatgacgtctcctggccaccgctgagcacctgctccagggcagacgtagccctcatcacgtcctccacagcctccacagcagcccgcaggttgccatcctgtttccatccaggggcccggacactgggccacagtgcagtacagaccctcgctgggctcagggtgagcagacacttgctgggttcagggtgagcagacactggcagctgtggtggtgggtggacggggtgggtgctgggacgaggactcaggaatgaggctggcggtcaccgtggagtgcagcgcttctcaggtgggacgttctaaggtccccaggtaatactggcctggtcccccgtctgatgctgcagggtggacttctgagtgtcagagccaggccatcctgcatctgagtcctgtctctggctctgcccacctgggcctcaggcgagcctgtactcctgcacgcctcagttttcctgtctgtaaaatgggtgccgtggtgcaaacatcagagggtggtggggaggagtctgaggtttgcacttgtaatacactgtcctgtccgctatcccatccccttctctggtctcagtttccgcatctgtaaaaggaggctgttgggctcaggagcaagatggaaagggggtgggggaggaccgtatccccgagcctctccagggagcccatgcatctgtgcaggcataggggttaatggaccacccactcccaccgagcccttgatcctggcagccccatctccccaggtgctggagtt

SEQ ID NO: 8457 - DNA, 954 bp, Artificial sequence
  DNA replication origin
gccccagccacccattcctagcatcctttggatgtaggtgtcatcggtagagactcgggggtcattaatttatggctcctgggcattcactggtgatttgagaagctcaataggaacttctcagtatttctagaacaggacaagttttgctattttaacatctgggagacctgtggggcaggagagagagaagggatattattagaatgtgtgaatcttggccgggctccctcgggccctggagtgggcaggtggccagaggacagaagtgatatttcacacagatggtggcctctccaggcctctgcaaaccagcaggacggatcggcggtgaggtgaggctcgtgtgcctggcgccaggagtgcccaccaagaaccttaaatgggtgagggggctggttttgctcagcaccgaccttggggaaggctgtgtgagggcagggagacccaggcctgggggtggtgggggtggggaactccccggggctccaagagaaaccagtgtaagtatggaccctgagaggcggcagggcagggagagcctctccgcatcgcgatggtcacagtggctcttccaggcagggagcccggccaagattcgcacattttaataatgccccttctccctctcctgccccacaggtctcccagatgttcaaatagcttgtgtcctgcacactgactgagagtgtgtccttgacaagtcccttcacctccctgagctccaggcttgtcacccgtaaaaggtggtgacaggaagagaagtgcacatgtgggaagctcccgaaaggtgccatgtgctctaccccatgtgtgcccactctcctctggcctcccccagccccttgtccttctctgcctgctctgtgccctggaggtgagtccacagcttgcttacctggcctccctggccctggcctcccattgggttcagtcaacgagaggcgccgacag

SEQ ID NO: 8458 - DNA, 750 bp, Artificial sequence
  DNA replication origin
cccagatgctgcctctggcaactcactacatcctccagttcactggacaaacacttatgggtgcaaacacggaggggtgaggctgggggctatgctgctgaaacacagtgaggcagaagatcctgtgtgccttgagcaggatggctgaggagtaggacacatgtggtgtccccctgcctgcagtcactcccttcctcgacacactcttgggcttgctgtgagctggggagaggctagtggcagggtcccggtgctctgttccaccctgtccccatcccacgctccctgaaaatgagtatccccagacagctgcatgtgggcttgggagcaggtgcagcggtgggcactgggggcacagacacctaagcccgggctcccctccagagcccacagtcggctggctggctcagggcactgtgctggggcagtgggctccggggtaggcttgttgatggtccgagggtggagggggagggcggcatctggaaggaagtccagagttctggcttctggtgggggtgggtgtgtagcaggatcaggtctgaaggagccagaacagaggaaggggatcagagaggatgagggtggcggtggccctgctgtgtctgagggtttgcggtgtggctgctgcattttgttctgaggatggctgttggagcagagggagttcagaacagaggggctgggttggggggtgtaaactgttgtctaagcgacactctaaggaatatggctctcaggccactgaag

SEQ ID NO: 8459 - DNA, 819 bp, Artificial sequence
  DNA replication origin
tggggaaaactgttggtctcacacagctgcagggcactcggggctttcactgggcaccctaagggcctaaatggggctgggggcagctccgtggaactcaatggttttaactctatggatctggactgtactttgctgcgaggtaatgagttcactataccttggggacatgcacggcgctctggaaggccccttggcagggcttttccaggcctggcccttctcagatgagggaatcaagtgactatgaaatttccctgcagcctgagctctgggaccttccctccccccacgcccaccctccggtcttcttgctcttcaggcacagagacacccgttaccatcctctaagcatctgttgagcaccagacataggcagtgataacccagcgggatccatgcactggcgggcggggcggagttggggggttggtacgcggtacagggggagccaagagagtgggaacctcaatgtccctgagtggagggcgtgggagtgagcagggagggcttctcatgggaagggtctttgatgttttgatgttccagtggatttcagggaatggggcagcagggaagggtgtcaggatggagagatcagcatttacagaggctcagaggcaggtggtgaggggctgtgttctgggagcttctggataggggtttgaccacatcacaagataaatagtggggatgggaggctccaggggagttaggatcactgagggcctaagacagagggttctgtcctgctggcaggagggtgtgggggtgctcagcaggggtgtcaggatctggtttacagagtccttgagtcca

SEQ ID NO: 8460 - DNA, 1609 bp, Artificial sequence
  DNA replication origin
ctcgagagcccactagacatctgctaagagctcagcccactggctttctctaacaggactaagcccaagaaagacctcctgcaacacacacccaaccccagctcacaatttgagagacagcaagatgcaggggtaagctccaaaatggcatccaggagattggggtgagtcccagcactgcccaaagccaccgtgtagcactggcccacacacctctgagctcatgtcctcattgtaaaactgaatgactggactaggtcattgcctcattcactcattcattcaaacttgaatgtgttggaaacctacaatacgccaggcacctcagttcttagcactgagagataaagaagacacagcccaagctctggaagctttcacaatcccatgagggaggcagagctgcagagaacacttcacaatttagagggatgaaaattctgaaagatggatacacagaggcttctgtgagcccagaagaagcaactaaccccacctgacttgtccatcactgcatcccagcacatatacagagcaagtattgggtgggtggacgggtagataaatggattaatggattaaggggtggatgggtaagtggtggatggatgatagatggacaggcgagggagtaggcaaatagatgggtgattgaatggatagatgagtggctgagtaggtagatggacagtagacagttgggtggacaagtgggtgaatggatgggggatgaatggattgatgggtggggtagatgggtgaatgggtagatgatggatgaatggatgggtgatggatagatggatggatgataaatgggtgggtggatgagtgcatggattggggagagagagaggaatagatgggaagatggatgggtagaaggatggatggatggatggatggatggacggatggaagagagggagaggaagggagaggaagggataggaggagggacaagggcctctgatttttcagaggagcatgaactgtcccctcttcggtgtccctataaaagctcactcagtcagcaagggcctgacccagagaactgttgtccagaagccatttaacaagagacagatggacagagataagccaaggacagaaagaaaggagagaaggatgtgatgagaacagacagaagaagacagtgtggagaagaccctgtcaggcagacagagcagagctggaaggagagcagagaacaggcaagtgccagccacggggatggggagaggagggagaaaggctgtggcaggggtcgtgatgaacacaaagggagctataacacccgctgtgacaaggttccgttgtgagcaggtctctgttctgccgctttatgaatatgtgccagtaaacagcagatgtgaagtccctgcgctcacaattacactgcggtgacagtgactcaggcagcagagggccaggggcttccaccagccaatgggcaaggggctgaggggctaagtgggggggcgtgtagcgtgtgttggtcacccttgcagcctggtccgtggagcggagcaagcatggtatccgtgagcacagtgggacaatatgggcagcctggtttgtaaacaccagctttcgacagccccacccc

SEQ ID NO: 8461 - DNA, 1584 bp, Artificial sequence
  DNA replication origin
tatttttttattgtaaaccccatttgtttcaaaaagctacatgcaaggtattcacattttctccccaagtaaagacgagcctggccacaatggaattagggagcgggggaggaggctgcgttgcaggtaggaccctgacctggagtctgggaccggggaggagggaacaaagaggggagctctctccccaaataattgttctggggggacagagtctgcctgcggcttgcttcaaggacagccatctttcagagagtgtaagggagggtttgatgctgaccaagggagagcacgaataggaacaacatgcttacctccaatttctgaggctttggccctttcacccccatttcaccattggcccttgtggccctgccatgcagaagggaaggggttaccttgtgtacacagtgccacacgctaccgttcctctctctgaatgaggaggggcagggtaacagagttgcctccttctcctgaagcccagtggggcttgcccagcctgctctggaacttgggggcctagacagcaccatcttacctgtctcccatcccctctgcctggtcaccaactgctgccacttgctccctgcccaccctcatgctgcctctcctcccctctgcccttcccaagtctcctgggggaccctcctgtccctctctggggcccagcttcattgcccggccacatggggcctcgagggtgggcatcacgggtcactcatttcacgatcattttccaagccctgctgggagctgcggggtgagggctgctgggtactaggggctcaatggggatgaagacggatgaggagtggctctttgcggtggagagacagaccatgaatgagtgagcactcaaatggcaggcagaagggagtttcgtggggtgagaccgtgggggaaggtggagatttggggagaggtggtgctgtcggtccctgggaagcaggtgtgagctcagcactgggatgaagtgggtacccaggggatagcaccccaagagggggactcggcaagggcgaaggccccagtgtgggcacgagctgccaactgagtagcagggagggtcagagggcaggtgaagagtgaggctagaaggagttgttggctgcttctgggaaggtggaggtggcatttcccaaatactgcctttgcaaaagctggaaagagccgcaccccaggtgaggggcagcctgaggccagggtcggggctgcttccaggtgagcagcagttgtgggaaaggcactgcatacagaggcctgcttctgcctggcagagccgggcagtgagtggggacagcctgatgagctgggtgagggtggctggaggctgagtgggatgccctgactcatacctgagctgagtgtgggtgccgagggctgggcagggtgcaggggaggcgcaggccggcaggagagggaagcgcccttgccataacccctttccactcagagatttgagaagccaaggaagggtagagcctgggagctacccagcccagatcatcatccaccccttcctccagcccagatcaccatctaccccctcccctagcccagatcaccctccacctcctgccc

SEQ ID NO: 8462 - DNA, 1008 bp, Artificial sequence
  DNA replication origin
ggagggagggagggagggagggagggagggagggagggagggagggaggaagagagggaggaagggagggagggagggagggaggaagagagggaaaagaggaagggagggagagagggaaaagaggaagggagggagggagggagggaggaagggagggaggaagggagggaggaagggagggagggagggaggaagggagggagggagggagggagggagggaggaagagagggaggaagggagggagggagggaggaagagagggaaaagaggaagggagggagagagggaaaagacaggaagggagggagagagggaaaagagggagggagggagggagggagggaggcagggagggagggagggagggagggagggagggaggaagagagggaggaagggagggagggagggaggaagagagggaaaagagagaaagggagggagggagggagggaaaagaggaagggagggagggcgggatggaggggagagaaaggaaaagagggagggaggggagaggaagtacggaagggagggaggaagaagggaggggagaggaaggcagagagaggaaggaagggaaggaggaaggcagggacggaggaagtcaggaaggcaggcaagaaataaggaaggaaggaaggaaggaaggaagggatagaggaagagagggaaaggagaggaaggaagcaagggagggtagagaaagggagggaggaaggaaggaaggaagagaggaagggagggagggagatggaaaggaaaggaagggagacatggaagaaggaagggagagagggagggaaggagacgagggaggggagaagagaaggaatgaaggagggagggaatgaagaggaaggaagggaggaagacaggcaggcaaaacccttccttggactacaggaacctagagtccagcatctctctctgtgcctggccggcgcagggccctaagcacgccttggccacactgggtgacgtgggagatgccccttgccc

SEQ ID NO: 8463 - DNA, 3847 bp, Artificial sequence
  DNA replication origin
tacaggcatatgccaccatgcctgggtaatttttgtattttttagtagagacagagtttcaccacattggccaggctggtctctaactcctgacctcaggtgatccacctgccttggcctcccaaagtgctgggattacaggcatgagccactgtgctcggcctggaaggttcttctgttccccctcttttctgctggccaaagtctatgatgcttttccgttttcacctcaaacacacatcacccccaactgcatgcagttttccgggagccctgccccagccttctgtaagctatgtgctctcctgctgactcctggaccagaggatctggacccacgagggcacgggcaatgtccgggcctctctctagccacatgcccagcagctggcttaccactctgtgcctcagtttctgcctctgtagaatatgtcagtaaaaggactcagctcctaggattgccggaaagatgaggtgagcagcgtccagcagagcgtaagagcttggacgtgttagtgtcaggcgccatgttggggtcaggctccgtgttggggtcaggtgctgtgttggggtcaggtgctgtgttggggtcaggtgccgtgttggggtcaggcgctgtgttggggtcaggtgctgtgttgaggtcaggagctgtgtgttggggtcaggtgctgtgtgttggggtcaggtgctgtgtgttggggtcaggctccgtgttggggtcaggcgccgtgttggggtcaggctccatgttggggtcaggtgctgtgtgttggggtcaggagctgtgtgttggggtcacgtgctgtgttggggtcaggcactgtgttgggttcaggagctgtgtgttggggtcaggtgctgtgtgttggggtcaggtgctgtgttggggtcaggctctgtgttggggtcaggctccgtgttggggtcaggcgctgtgttggggttaggagctgtgtgttggggtcaggtgctgtgttggggtcaggcactgtgttggggtcaggagctgtgtgttggggtcaggtgctgtgtgttggggtcaggcactgtgttggggtcaggcactgtgctggggtcaggagctgtgtgttggggtcaggcactgtgttggggtcaggagctgtgtgttggggtcaggagctgtgtgttggggtcaggtgctgtgttggggtcaggctccgtgttggggtcaggctccgtcttggggtcaggctccatgttagtgtcatgcgccacgttagggtcaggcactgtgttggggtcaggtgctgtgtgttggggtcagctgctgtgttggggtcaggcactgtgttggggtcaggagctgtgtgttggggtcaggtgctgtgttggggtcaggcactgtgttggggtcaggagctgtgtgttgggttcaggtgctgtgttggggtcaggcactgtgttggggtcaggcactgtgttggggtcaggagctgtgtgttggggtcaggagctgtgtgttggggtcaggtgctgtgtgttggggtcaggagctgtgtgttagggtcaggtgctgtgttggggccaggcactgtgttggggtcaggagctgtgtgttggggtcaggtgctgtgtgttggggtcaggaggtgtgtgttgggttcaggtgctgtgttggggtcaggcactgtgttggggtcaggagctgtgtgttggggtcaggtgctgtgtgttggggtcaggtgctgtgtgttggggtcaggagctctgtgttagggtcaggtgctgtgttggggccaggcactgtgttggggtcaggagctgtgtgttggggtcaggtgctgtgtgttggggtcaggtgctgtgttggggtcaggcactgtgttggggtcaggagctgtgtgttggggtcaggtgctgtgtgttggggtcaggcgctgtgttggggtcaggtgctgtgtgttggggtcaggtgctgtgtgttggggtcaggtgctgtgtgttggggtcaggctctgtgttggggtcaggctccgtgttggggtcaggcgctgtgttggggttaggagctgtgtgttggggtcaggtgctgtgttggggtcaggcactgtgttggggtcaggagctgtgtgttggggtcaggtgctgtgtgttggggtcaggtgctgtgttggggtcaggctccgtgttggagtcaggctccgtgttagtgtaatgcgccacgttagggtcaggcagtgtgttggggtcaggtgctgtgtgttggggtcagatgctgtgttggggtcagctgctgtgttggggtcaggcactgtgttggggtcaggagctgtgtgttggggtcaggtgctgtgttggggtcaggcactgtgtgttggggtcaggtgctgtgtgttggggtcaggcactgtgttggggtcaggctctgtgttggggtcaggctccgtgttggggtcaggcgctatgttggggtcaggagctgtgtgttggggtcaggtgctgtgttggggtcaggcactgtgttggggtcagtgctgtgtgttggggtctggtgctgtgttggggtcaggcactgtgttggggtctggtgctgtgtgttggggtcaggtgctgtgttggggtcaggtgctgtgtgttggggtcaggtgctgtgttggggtcaggcactgtgttggggtcaggtgctgtgtgttggggtcaggagctgtgtgttggggtcaggtgctgtattggggtcaggctccgtgttagtgtcatgcgccacgttagggtcaggcagtgtgttggggtcaggtgctgtgtgttggggtcagatgctgtgttggggtcagctgctgtgttggggtcaggcactgtgttggggtcaggagctgtgtgttggggtcaggtgctgtgttgcggtcaggcactgtgtgttggggtcaggtgctgtgtgttggggtcaggcactgtgttggggtcaggctctgtgttggggtcaggctccgtgttggggtcaggcgctgtgttggggtcaggcactgtgtgttggggtcaggtgctgtgtgttggggtcaggcactgtgttggggtcaggctctgtgttggggtcaggctccgtgttggggtcaggcgctatgttggggtcaggagctgtgtgttggggtcaggtgctgtgttggggtcaggcactgtgttggggtcagtgctgtgtgttggggtcaggagctgtgtgttggggtcaggtgctgtattggggtcaggctccgtgttggggtcaggctccgtgttggggtcagcctccgtgttagtgtcatgcgccacgttagggtcaggcactgtgttggggtcaggagctgtgtgttggggtcaggtgctgtgtgttggggtcaggctctgtgttggggtcaggcgccgtgttggggtcaggcttcgtgttggggtcaggctccgtgttggggtcaggtgctgtgtttgggtcaggagctttgttggggtcaggcaccatcttggggtcaggctccgtcttggggtcaggctccgtgttagtgtcatgagccactttagggtcagacgcagtgttagggtcaggctctgtgttggggtcatgctctgtactgggttcagattctgtgttagcgtcacatgctgtgctggtatcaggcgccgggttagcatcagatgctgtgttagtccactcaggctgccaaaacaaaatacctgggactaggggcttaaacaagagtaattccttttctcacagttctggaggctgaaagcttgagaccaaggtgtaggcagggttggtttctcctgaggcctccctccccggcttgcagatggccgctatctccctgtgtcctcacgtggtcgtccctctatgtgtctgtttcctgatctcctc

SEQ ID NO: 8464 - DNA, 895 bp, Artificial sequence
  DNA replication origin
aatcctagagttcacagccttttcatttggttccgttcgcttagtgatagcattaaggtccttccacgcttttccatgccacctgtttctcttcactttttaatgtggccactagaacatttagaaagaccccaatggctccgattctattcctaagggacacgccggtctggacaacgtgccaaggcgatgggcgtcttctgaaggtgtggggctctgcagtggatgggcacgtgacccctggaaaatgcggtcccagcagatgagcaagtgaccatgtggaatctgcctgaatggcgcctgggtcgtggcacctgcatagcagggctcatcattactgctgtttgggaagagtgctgcagttgcaggtggggacaggtgactgaggaggagacaggtgtgaggaggggacaggtgactgaggaggggacaggtgactgcaggggacaggtgtgaggaggggacaggtgactgagaaggggacaggtgactgaggaggggacaggtgtgaggaggggacaggtgactgcaggaggagacaggtgactgaggaggggacaggtgactgaggaggggacaggtgactgcaggagggcccaggtgactgaggggacaggtgactgcagggaacaggtatgaggaggggacaggtgactgcaggaggggacaggtgattgcaggagggcacaggtgactgcaggaggggacaggtgactgcaagaagggacaagtgactgaggtggggacaggtgactgagttggggacaggtgactgaggaggtggaggagtgagaggaagaataggatgtaggcccaggaagtggagttggcatgacttggggctgcccgaggtgtcaggctgaaggaggggacaccaggtgacatggaagatgga

SEQ ID NO: 8465 - DNA, 1281 bp, Artificial sequence
  DNA replication origin
cgcaagggcagattctgggacttcccaagctactgcacacagagtgtgggtcccacaaagcacaggcggtggcaaagcagccacagggtgctgccatcccccgctggacatagtacatgactcacagggtttcctagccacagaagaaggctggggtcctatgtccacgggacccgggctaatctcagctgcctctgagcaccatcatgcacagctcaggtccagaaggagaggaaggaaaaccctaggcgggccaagaggtcagcagttggcaggaaggagaggcaggggcagggagaggcagaggcaggggcagggaggggcagggaggggcagggaggggcagggaggggcagggagaggcaggggcggggaggggcagggccctcatagcagggagggagtggggccccacagcacaaagggggcggggcctccataacaggaggggcggggcctccacgacaggcagggggtggggcctccacagcagaaagggggcggggcctccataacagggagggagtggggcctttgcaacaggaaggggcggtgccatcacagcagggagggggtgagaccttcacagcaggaagggggtggggcctccacaacagggagtgggcgtggcccccacagcagggaggggatggggcttccacagcaggaatggggcggagcagccacaacaggaaggggtggggcctccacagcaggaaggaggcagagcatccacaacaggaaggggtggggccctcacagcagggatggggtggggccgccacagcaggaaggggcggggcctccacagcaggaaggggcggggcctccataacgggggtcggggccttgcagctgggaaggagtttgtagggctgaaggcaggggttcagagtggagggaagagagtgagacagagagagtgagagacaaagagaaggaagaaaacaaggagggagggagagggagccattagagcccagtgtggtggggaagccagccagctaccctacacatgggtgggagagagacccacagacaaagagcagaacaaagtactggacttctgtgttctggcaagcacacagagtccacaggaagcggacatgggcacagcctcaagaggagcctgggacttggctcggcctgaatggcacagtcctgtgaagctggggcctggagagcaggtggtaccaccaccccgtgttcctggtgaggactatgaggtccagagaacttgggaacctgtcttagtgggtccacagctccaggatctgtgcc

SEQ ID NO: 8466 - DNA, 1045 bp, Artificial sequence
  DNA replication origin
tgagtggatggatgggcagatgggtagatgcatgagtggatgggtggatggatgggtggatgcatgcatgggtggatggatggatggatgggtggatggatgggtgggtggctggatggatgggtgggtggctggatggatggatgggtggatggatggatggatgagtggatggatggacggatgggtggatggatggatggatggatggatggatggatgggtggatgggtggatgggtggatgggtggatgggtggatggatggatgggtgggtgggtgggtggctggatggatgggtggatggatggacggatgagtggatggatggacagatgggtagatggatggatggatggatggatggatggatggatgagtggatggatggacggatgggtgggtggatgggtggatgggtggatgggtggatgggtggatgggtggatgggtggatggatggatgggtggatgggtggatgggtggatggatggatgggtgggtggatggatggacggatggacggatgggtggatggatgggtggatggacggatggatggatggaatggatggatggatgagtgggtgaatggatgggtgggtgcatggatggacggatggataagtggatggatggacggatggatggatggatggatggatggatggatgagtgggtgaatggatgggtgggtggatggatggatggatggatgagtggatggatggacggatggatggatagatggatgggtggatggatggatgggtgggtggatgtatgaatcaacggataggtgggtgggaggatggataagtggatagatgaatgaatgaattagtggactgatgaatgaatgagtcaacagatgaacggagggatgcatggatgggtgaccctccctgcctctcactctctgtcaccccgtttgtctcccaactgcagcaagtggactttcttaaaaggcaaaccaaccaaccagcacatgtgatctcatcacccaccatgtggaagcctccagggctctgtgccatcctgtgt

SEQ ID NO: 8467 - DNA, 1589 bp, Artificial sequence
  DNA replication origin
aatgccagagcagtgtcaccaaccccaatttacagatgaagtaattgaggctcagatatgagaaaccatttgccactctccccaatctgcccgtgcccccagccatccctgccaccgtccctccacccaactgggtaatgaagctaagatcactataagagaaaggaagaggaaaagaccttgggcactttcttggttgactgaacaaaggtaaattcaaccgccctttcctcagtgtccccataagaagcatttgcattgtgacaacaactgccctccttgtgtgttttgcacacttgtcttcccactgagaggagagcatatcatggtatgcctggtacaagggaggaaagtaaagggatggatggatgagtggacagatggatggataaatggatagatggacggatggacaggtgggtggttggatgaatggatatgtgagtgagtgggtggatggatgggtgggtgggtgggtggatggatggatggatggatggtgggtgggtggatggtggatggatggatggtgggtgactggatggatgggtggtaggtggatggatgggtagatggatggatgatgggcaggtaagtggatggatgtgtgggtgggtaggtggtgggtgaatgggtggtaggtagatgggtggacacatggatggtgggtgggtggatgaatggtggatgggtaggtggaagggtaggtgggtgactggatggatggatggatagatggatgggcagatgggtacatggaaaaaaatctagatcctagttacatgactacatgtttcaagcatacatatactcttatgaaaagtgaactttgtgcagatttcccatgagcccaagactgggtctcagcctcctgggtctttccatgtgtccagctgagtccgtgccagtgataggaccagtcctccttctctttttgctccccatattccctctgggtgggctcctctgggcccaggttacagccacagaggctgcgcgagtgtctccagcccagcgccccctggagctctttgctaatataccaaacgtcagctccccactcagatgcctcgaggcacctttaaaatcaacatcctcagaggaaactcattatgggtcctcacaagcccactcttcctccagtgtctcaggcttcaggaaggaggacgggaactccactctccccattgccaaaacccagccccactgtccagacccccatcacccctcacctggatggtggcaatggcctccagtgggtcccctcctatccagccatagaggatcattccaaatacaaccctaacgttggcatcctgtgtttaaaatcctttactggctccccatttctcccaggagtcaatgagcatcgcgatgtgagttgagtgttgaatatcggcactgtttccaggactcttacccactgcagaagcaccctgtgctggactagtgggcacttgttatgtcagctccacacctttctcatctgtccctgtgaacagctttcctgggggctctgcctctgccacctgctgtcacactgaccttcttcaagtctctccagcctcaggacctttgcacctgctccc

SEQ ID NO: 8468 - DNA, 929 bp, Artificial sequence
  DNA replication origin
ttgaaaagactgttgaaataagggaggaggctattgcaataggggaggggactatccaataggggagggggttatggtagtaggggaggggctattacaatggaagagggggctattgcaatagggaaggaggctattgcaatagggaaggaggctacgcaatagggggagggactacgcaatagaggaggggcgattgcaatcggagatggggctcttgcaatggggaagggactgttgtaatagggaaggggactattgaaatgagagagggggctgtgcaataggagaggctgtgcaatagaggaggggctgttgcaataggagagggctattgcagtggggaggaggttactgcaatagggaagaggactatcgcaataggagggggctattgcaataggggagggggacatgcaatgagaggttacacaatggcggggggctattgcaatagggaaggagctgttgcaataggggaaggggctgttgcaataagggaggggcttttgcaactggggcaggtggttattgttaaagggaagggggctattgtaatgggagggggctctgccatagagggaggggctacacaatgggaaggaggatattgcaaggggggagaggctattgcaatggaagagggggctattgcagtaagaggaacattcgacattgagatctataagcagctcaaaggtcaggcagaaaggagttttctttcattgggaagcaaaagctccgtggaactggtgagggaggaggggtgagagctgcgttctgctctgtggtcagcggattcccaggaagggccattgaggaggggaactggtgtccaggatggtcagtggggatgacagttcagctaatcttttttttttttttttttttttttaatatggagtcttgccctgttgcccaggctggag

SEQ ID NO: 8469 - DNA, 791 bp, Artificial sequence
  DNA replication origin
cgcctcttcccggcagtcatcccgtcaaggaagtgaggagcgcctcttcccggccgccgccatcccatctaggaagtgaggagcgtctctgcccggccgcccatcgtctgagatgtggggagcgcctctgccccgccgccccgtctgggatgtgaggagcgcctctgcctggccgcgaccctgtctgggaactgaggagtgtctctgcccggccgccccgtctgagaagtgaggagcccctccgcccagcagccgccccgtctgggaagtgaggagcgtctccgcccagcagccgccccctccaggaggtgggggacagcccccgcccggccagccaccccgtccgggagggaggtggggggcgcctctgcctggccaccccgtctgggaggtgagggcccctctgcccggcagccaccccgtctgggaggtgtacccagcagcccattgagaacgggccatgatgacgatggcggttttgtcgagtggaagtgggggaagtgtggggaaaggaaagagaaaccagattgttgctgtgtctgtgtagaaagaagtagacatgggagactccattttgttctgtactaagaaaaattcttctgccttgggatgctgttaatctatggccttacccccaaccccgtgctctctgaaacatgtgctgtgtccactcagggttagatggattaagggcggtgcaagatgtgctttgttaaacagatgcttgaaggcagcatgctcgttaagagtcatcaccgctccctaatctcacatactcagggacacaaaca

SEQ ID NO: 8470 - DNA, 1258 bp, Artificial sequence
  DNA replication origin
gaaccctcgtagctgaccctcgagaggggtgatagcttcctggagctctgagaggctcaccaacttgcccagagacacgtagcacaggcgcaggacctgggtgcacatcacagattgtgtgtctgacacctgtacttttcagagaaaagcatctactctcacatttgccggttagaaatttcaggtgcttccgaggacctatgggtgccagcagtctcccccgcactgtgcacacaggcatggatggcacaggtgagcttcctgcccccgcccgagacttccaggacggtggtgtgtgtgtttgtgtgtgtgtgtgtgtgtgtttgcgcacatggctcagacaataagtaaaagcaataatatactctcaaatagtgaaaaaaaccacggcaaatataaagcaaggtaataagatgcaagtcctagggtggggtgggggttgtgacctgggaaaggagggtaaggaaaaatgttcctgaggcagaaaagcctcctaggcacaggggagggcacatgctagggagggtggcagcatgcacaaaggtcctgaggcaccaaacttggcgtttggagaaaccacaggagtcccgaagctggaggcatgaaggggcgagcagaacgtgctgggggcggagaggcaggcagagtgcgggcccgggagcctcgtgaggagtctgattgcaatgtgggatggggaaccattgggggccttgaacagaggagatgcaacctgatttccctggtgaatgcccctccgggtgcagagtggagggcagacagaggggctggggtcctggaaaaagccctggaagatgggcgtgcttgggccctggggctgaaatgtggacaaaggtctcgtggtttggagaactcactgtgcagcacagacctcactagtgcatctgaggtggggtgaggggatagagggggaatggatgacccctgagtttttagcgtgaagggggatgggaccacttcctgagaggagcctgcggaggaggcttctgtgaagcaggtggaagagttccgatggcaacgcgatgaatcagggatgcctgtccaccctccgagggggtgtcatggggcagcaggagatctgagtttggactttgattggggcatcagggctggggagtggtgggggtgcagacataatatctgaagccatgacattgggtagggtcatggaggaagagggaaaaacggagggatgggcgagcatcccactcctgactgcgaatcccagaaagaaagcccc

SEQ ID NO: 8471 - DNA, 1585 bp, Artificial sequence
  DNA replication origin
ctgggagctgtgtccatggggttcagcagggaactgaggctttgtcccccggtgagtgggggagcggggggccagcctggtgaggagcattgggctgcatctgcagggaggggcccacctgggttctgaggctgtggagggagagggcctgggggctggggagggcccagtaggaaaggactttgttccttttctgcagccgtgggaacaaatggccacaggctctagcttaagcaacagaaacttattctgtcacaattctggaggcccacagtccaaaaccagcgaagatcaaagtgtcagtggagctgcacttccccctgggctctagggaggagtccaaccctgcctctctcagctgctggcagctgccagtatctcctggctgtggccacatctctgcaccttcaggcttcaaatctcctctgccccatctccatgctgcctactgcataagtgtgtgtgtgtatgcacacttgtaagtgtgtgagtgcatgtgtgtgggtgtgtcagtgtgaatgggtgtgaatgtgtgtgggggtgggtgtgaatgtgtgggtttgtgggatgtgggggggtgttagtgtgaatgtgtgtgactgtgggtgcatgtgaatgtgtgtgggaatgcgagtgtgggtgtgagtgtatatgtgcgtgtgaatgtgtgggtgtgtgggagtgtgtatatgaatgtgagtgtgtgcaaatgtgtgtgagtgtgagggtgtgggtgtctgtgtgtgaatgtgtgttcacctgtgagtgggtgtgggtgtgagactgtgaatgtatgagtgtatgtgggtgtgaacgtgtgtgtgtgtgggtatgtatgggtgaggttgtgtttgagtgtgagggtgtgttttagtgtgtaaatgtgtgggtgtgagggtgtgtgtgattgcgtgtatgagtgcatgggtgtgcacgtgaaagtgtgtttgtgggtgtgtgtgtgtttgtgagaatatgtctgtgtttgtgagaatgagtgtgggtgtgaatctgagtgtagatgtgagcacgtgtgcgagtgtgaaagtgcatgtctgtgggagtgtgtacgtgagtgtgcatgtgtgagagtgtgagtgtgtgtgtttatgagtgtgaaacagcatgtcagtgtgtgcttgtaggtgtgtgtaagaagctatgttagcgagtgtgagtgtacatgagtgtgtggtgtgtatgggcatgtgtgggtgagtgtgagagcctatgtgagtgtgagtgtgtacatgtatgggtgtgtatgagcgtgtgtgtgtgagaacctatgtgagtgtgtatgtatgtgagcatgtgtgggtgtgtgtgagcatgtgagtctacatgagtgtgtgggtgtgtatgagcatgtgtgggtgtgtgagagtgtgagagcctatgtgagcatgtgtgaatgtacatgagtgtgtgggtgtgtgagtgtgtgtgggtgagtgtgtgtgatcgtgtgtgtgagtctacatgagtgtgtgggtgtgtatgagcgtgtgtgtgtgtgtgagagagagcctatgtgagcgtatgtgagagtgtgtgagtgtatgtggacgtgcgtgggtgtgtg

SEQ ID NO: 8472 - DNA, 1776 bp, Artificial sequence
  DNA replication origin
cattctttaagcccctgttcgaacattcctcctccaggaagtcttccctgattgcccacccaaaggtgtcttctctgccctactaagtttctaaaaggcaatcctgggctcagatcaatttctcaccatgctgggaagcagaagaagtgcttgatggggaataaaattcaataaaatataaaagtgagtttatgcttttagaagtaagtgcccagggttctgcctcagcaagcaggtctgaagaccaggcacagaggaaacaggctggtcagtttcatgtcagcagcccccaggaagctggcgtgggaagggactgctgggctctcacttcctaccaatcccaagagcctactgcagtcggctgagccttggaagaaatgcatattatgctgtcacccaggaaggctgtccaggatccaagtaaggcagactcacagtgacccaaattataacgaggataagggaagcattgtaaagtcatggaacagggcagtctgagggtaggtggataggtgtttgctggaggcagggcgggcgtatgggaaggaagaggtagggaaggaaagggaggcaagcctttggctttgcacaaatctgcaaatccttagagcagggcaattgtgtccactccattgactctgggcttgtcatgtgacttgctttggccgatgctgtgtgagtagatgtgatgttttccaggtcaaagctgttatgctaaagctgcttgtgtggtttgcaacccctggagcctctgccccctcatcatgagaatagtgtgctctcagcataagagtcgtatggggacgcaaactccaccagtaaccaggagcctcatatagccaatcgcagcaaagcccagcagagcctctgggcacccacagagccccaggaagaagaaataatgcttgtttctgtaagccattgaggcttggagctgtgtgttactcagtatgattgttgcagatacctgcctaatacaccagatttgttggagtcaaagctgacgttgttccaccacaccaccctgcttcttgagaattagctttgaaaaactgcatagcctcctcaaaaactaaagccctcttgtcattgttattaatttcctcacattcctcattccttttacaactgcaactaagcctttttctccccttatagtcacagaaaagaaccaaagcaaataactgagatttcagctccattaatttttcagggcaccataaattagagagcaattgcaatgcagtcaatttctgcgggaaaataagtctccgtgattgtgctttagtctaattacatggaaggctaagtagtgctattaatacccagaagcacaagccatccccaaggaaggggccaggagcaaagaggtagcccaggaggctgagaaatgcagggacgccagtcagggaggacccaaccttggcaaggaggccaggtcctgtcgagagccatggcaaaggacagccaggaatctccatttggaggtccctgacctggactgtccctgttggtagaaatttatcattcattcatctaaccaaccatccccatccatccaccacccacccatccatccattcatctccatccacccatccatccatctacccattcatccatccaccatccacccatccatctaccatccatccattcatccatccatcatctatccatccatctgtccacacatccatccaaccacccatccatccatccccatccatccacccacccacccatccatccattcatccccatccacccatccat

SEQ ID NO: 8473 - DNA, 1005 bp, Artificial sequence
  DNA replication origin
agacaccgtggaggcgggacacctttgccaggacagttccatgatgcagggccctgtctgcttttcttcagctgaggggaagagagaagggacgtttgctgcaattgcccttgtgacagtggtggggtctgtagttttcaaggcgagttcaggaattcatccactttggtaagggaataaaggctgtgtgaggaagatccagttctgatatggacgaggagggcaggggggtcgccagccacccaggatttgctacgtttcacacctgcagtctcctggccgtggttccttgggcaacatcctggccagtcttgcagtgggctcagccctcggctggttcttctgatctgctcatcctcagggaacctgccatgggaagcctgcatgagagctccgggtgtgttcatctcgactctgaagcgtgaaccgtggtaaagctttgctgctgcaggaccggctaattggcagcttgagcatctgagcttcactgcggtagcttgcatagtgtctcatcgctgaagtttccgagatgggagactaggggaggcaggagcagccgaggtggagtggggaagtggggtggcctgagatggaatggggtgccggcccctgagggctctgcttacggtggggcaggtggggtggcgggcacctctgggattgtggttgcaggacctggtggatggtgggaaggagggaggccatttactgagaccgcagaggaggaggaggaggaggaggaggaagacacggaggctggaggagcagggctggttgagaaaggagccagcttctgctgggccctgctaagttgggggtggtgcagggaggaagtgaccgtggagagggtgtcaaggagtcaggggtcatcagggcagaaatggggactgagtcacttcctggcaggagaggatcctggaagggggatgtgtggcatgagcctcagagtaggcctgatgtcacccccaggcagcagcgaccttgggactcagcccccgccttcct

SEQ ID NO: 8474 - DNA, 767 bp, Artificial sequence
  DNA replication origin
tgagaaaggagccagcttctgctgggccctgctaagttgggggtggtgcagggaggaagtgaccgtggagagggtgtcaaggagtcaggggtcatcagggcagaaatggggactgagtcacttcctggcaggagaggatcctggaagggggatgtgtggcatgagcctcagagtaggcctgatgtcacccccaggcagcagcgaccttgggactcagcccccgccttcctctgcctgggagtatttatagagggccttctaggtttcaggagctggggcaactgctgggaacaaaacagaccaacccctgccctcgtggggcctcctttctagatgaggatgggggcgcagagcagatgacgagggatgggttagaagctgctgggtctactgagggcgggcggggagtgagggggctgccaagcggcttggcctctgcatggttggagagctcagaatgtgagcttggacctgccatggtggaggaagagaggctagaaaccagggacaggcaccagggcggccccggggagcaatgggagtggactgagtgccgtggtagaggaagagaggctagaaaccagggacaggtgccagggcaggcctagggagcaatgggagtggactgagtgacacaggatgtcctggatctgaggagctagaggccagagaaccagagttctgagcgtagcatgaggggacacgcctggggatccctcccccgagcccagctggcactggcaccaggacatgagggtgtggcggac

SEQ ID NO: 8475 - DNA, 1264 bp, Artificial sequence
  DNA replication origin
ctggggaccacagttctgctgctgctgtcaagggagggatgaatgctgagcctgctgcctcccactcacaagcttgtcaatgccactgcctgcccagggtctactggccacccacgggacactctcccagcctgcatcaatgggccactggggggtgtccccacaggcaagaggaaggagcttggaggtgaacaactgagaggggtcccaagaggagggcaccaggctcaaagcagacaggcctgggccggtcctggttttcctgcttatgtctgcgtctgcctgggcaggtcatttgccttctctgagcctcagttttctggcctgtacatgggtcaagtagcccccctcgctggccatggcatctcaggaacaaaggagaggcctgtgagcggcctggccggggcggggctgctgcagggatccagatggaaatggagccacattggtgcgatgcacggggcgttctctggggtcagtggaggctcacgcgggaggccgagggggacccaggagggcagcgaggaaggctcccatctgagctcagacggcaactgaggaggggaggccagagcttcgtaggtggtgagagaagtggcagcagggagggtggagggctgggttccagggagacagagagcgagagcaagcaagtgaaagcaagcgagtgtgagagagagacagagagagagagaggccaacttcacacacagagagggagaggaaggaggagatgaaggggctggggtggagagaggaaggcagagggagagagggagagagggagagagggagagagggagagagggagagagagagagaggccaacttcagacacagagagggagaggaaggaggagatgacagggctggggtggagagagggagagagagagagagagagagagagacagaaaggcagacttcagacacacagagggagaggaaggaggagatgacagggcgggggtggagagagggagagggagagagagagaaaggcagatttcagacacacagagggagaggaaggaggagacgaaggggctggggtagagagagagagggagagagggagagagatggggcactcagagagaagcactgccctcaggggtgaccccagcccaggacgtctgatgagggcttgtgagagagctggcagagaacactcaggctgaacccaagtcagtaaaatgttattccctcaaagaattccattcttctcatgacaagaacttatacttgatgatcattgtatttc

SEQ ID NO: 8476 - DNA, 831 bp, Artificial sequence
  DNA replication origin
gtgaatggatggatggaggatggacagatcaatggatggatgatggatggatgatggtggatgggtggtagatggatggatgagtggatggatgagtgggttcatggatgatgtatgatggatagatgctgaattgatggatggatagatgaatggatagatagatgaatggatggatgatacatgatggatggatgatggtggatgggtggtggatacgtggatgggtgggtgggtggatggatgagtggatagacgagtagatggatggatgagtggatgaaaggatgagtgggtggatggatgatggatgatggatagatgctgaattgatagatggatagatgaatgtatgaatgatgcatgatggatggatgatggtgaatgggtggtggataggtggacgggtgggtgggtgggtgtgtggatggatggatgagtgggtggatggatgatgaatgatggatagatgctgaattgatggatggatgatggtgggtgtgtgggtgggtggatggatggatggatgagtggatgaatggatgagtgggtggatggatgatggatgatggatagatgctgaatggatggatggatagatgaatggatggatgatgcatgatggatggatggcggtggatgggtggtggataggcagatggataggtggatgggtgagtggatggatggatgagtggatgggtggatgatagacggatgatgggtgatggatagatggtgaatggatggatggatgacgaatgaatgatgaatggatagaaaaactgatagatgggtaggtggatcaatggatggatgatttatatcatg

SEQ ID NO: 8477 - DNA, 1562 bp, Artificial sequence
  DNA replication origin
ggtgggtggatggttggatggatggatggattggtgggtgggtgggtggatggttggatgggtgggtggatgggtgagtggatgggtgggtgggtgagtggatgggtgggtgggtgagtggatgggtgggtgggtggatggatggatggatggatgcatggatggatggatggatggattggtgggtgggtgggtggatggatggatggatggatggatggatgggtgggtggatggatggatggatggatggatggatggatggatggatggatggatgggtggattggtgggtgggtggatggatggatggatggatggatggattggtgggtggatggatggatggatggatggatggatggatggatggatggatggatggattggtgggtgggtgggtggatggatggatggatggattggtgggtgggtggatggatgggtggatgggtggatgggtgggtgggtggatggatggatggatggatggatggatggatggatggatggatggattggtgggtgggtgggtggatggatggatggatggatggatggatggacagatggatgaataggtaggtgggtgagtgggtagatgggtggatttacgagtagctaggtaaatgaacttaataagacaggcacacaaacaccctgccactctgagaactaacttttaattcatctatttgaggacaatccatcttctttggaattttccagtgacttctaaacttgaccctggataaagtacttctgaaagtgccacctaaataaagcttcaaagggcaaatgatatacaagtcacccagggtggggcctctggggccccagaacagcttcaatgccgtcatcagggtccccatcatcctggagacttggacccctgtctctgccacagccattgggtacagtggaagtcccaaatctgtctcatcagaaatcctttgttcaagctatttcaggatgctggttagggtgggccaggtgcagcaccagaggctgtgatgattttcctggtgcttgtgctgttatgcacggccgttgttctttctacaggagactcacgtgggttcagcttcctcatctgtaacatgaggttggcttggatgctggccatgagttcttcccattctgacactgcccacagcattaagtctgagcccctccgagtaggcatcaaggctggagatggacccaatcagcccagtgctggggctccagtaaacccaaaccacattctgcacccccagttggtttggtgcccacctcaccttcctcccaaatgtccacccagcagatagtgagaccctggtgtgtgcccacctgccttctctcctgcacctgcctctggctcctctgcacccggtgcccaggagctgtctccaaacacaaactcggccatgtcctgccctgctttcaagccccacaggggctgcccatgattggcccacctggcccacgtcctctccagcccatccctagccacactccatgcttcttatttgtggaccacactggtgggttctctgaggtacctgagctccacctgtccc

SEQ ID NO: 8478 - DNA, 1612 bp, Artificial sequence
  DNA replication origin
agggagggcggcaatgaatgaatgagtgagtgagtgagtgagtgaatgaaccactctggcccctcagcttcaaggcccactcctgagtggccacatggtgtttctctgcagggtgatgtcctgactaccaagtaccaggtagaccttggggacggcttcaaggccatgtacgtgaaccttacactgaccggggagcccatccggcaccgctacgagagccccggcatctaccgcgtgtccgtcagggcagagaacacggcaggccacgatgaggcggtgctctttgtccaggtcaactgtaagtttattgcccctttgaggccaaaggtcactccctttgagagagagaacctggctttgggggaaacacagggaagcccccgggattgctctaggcccctggtactcaggacggtgaacccgagggcagggaggcagggaggctgggctcaaacccgcacccctgatgacccatacaatagtagggcagagctggtagctggtggtgatattgatgatagtggtggtgatggtggtggtggtggtggtggtggtgatggtcgtggtggtggtggtgatggtggtgatggtgatagcagtactggtggtggtggtgatggtactaatgatgattatagtggaggtggtagtgatgatggtgacgttggtgttggtgatggtgatgatggtggtggtggtggtggtgataatggtgacaatggtggtggtggtggtggtgatagggtgatggtgatgatggtaacagtagtggtagtaatggtgatgatggtggtgatagggtgttggtgatggtgatagtagtggtgggaatggatggtggtggtgataatggtgacaatggtggtggtgatggtggtggtgatggtgatggtggtgatggtggtggtggtgacaatggtggtggtgatggtggtgatagggtggtggtgatggtgatagtagtggtgggaatggatggtggtggtgatggtgatggtggtggtgttggtgatggtggtgatagtgctggtgaggatggtgatggtggtgatggtggaggtgatggtggtagttatggtgataatggtggtagtggtgatggtggtggtgttggtgatggtggtgatagtattggtgggaatggatggtggtagtagtggtgatggtggtggtgttggtgatgatggtggtgatggtgctggtgaggatggtgatggtggtgatggtggtggtgatggcagtgatgatggtggaggtgatggtggtagtggtgatggtggtggtagtggtgatggtggtggtgttggtgatggtggtgatagtattggtgggaatggatggtggtagtagtggtgatggtggtggtgttggtgatggtggtgatagtgttggtgggaatggatggtggtagtagtggtgatggtggtggtggtggtggtggtgatgatagtggtagtggtggtggtgatgatagcaatgaagttgctggtgacagtgatcactaagcagcctctgaaatgccccatgccctgatatcatctaaccctggcctttttgggtccccacagcccccctgcaggccctctacctggaggtggttcctgtcattggc

SEQ ID NO: 8479 - DNA, 1164 bp, Artificial sequence
  DNA replication origin
gggccatctgcccgagggccctgcagggacatggcttctccagggcccggatgcctcctccacccattccgcaggggagctcccagtggctcacctgtgcctgtgtcccgcagggccaccaggacccggactccgcctcgcaggaggaagctgatcttctgtgcgttcagcacctgctggatggcggcgagcctctgcaagcacagaggggacagtgagtgaggcctccatggaggctcctctgccaaaagggaagggggatggggtcctcctccaggaggggagtgaggggtctccacgtgttgggggggtcttctaccaggaggagagtgaaggggtcctccatggggggtgggggagagggtctgctacaggtgaaaggggaggaagggccctcctctggtggagagagtgagggggtgtcctccactaggggggaggggagcaaggtctgctgggatccaccagaggggtggggagagggagggggatctggtgggatctaccggaagtaggggagagttggggggtggctctgggatccaccagagggggatgggagagctgggtggaccagtgtgagtcctgcttggaccctctggagccatggggctgggcaggccacctggcctcgctgagcctcggtgtcctcctttgtaccacgggaataatcacccacaagggaactttcaccaagaaccatggaagggacacaaaggcgaccgagacatggctctggccttcatgagctcttgttttagtcgggaatgtaaaagacacaggctacggagtgtgccaagttggggaaatgcaggggtgctccaggaggctccatcccccagtggtggtcagggaaggcctcctggaggcggaagaccaagaagagaatgagacagggcaggacaggagaatcagaccccctacctgagggagggatatcccaggaggtggtgctgggttgtagggtgagggatgcagggtcgggggcacctatagctggagagggcaggggccaaaaggcagccagccttgtgggccacgggcatcctcctccagggtctgcgtgacgtgacaaatgcgtgaggtgcccggcgcagaggagggcttcctcctcacccctctcactccctcccggcccctctcactacttcccaggtccaagca

SEQ ID NO: 8480 - DNA, 1147 bp, Artificial sequence
  DNA replication origin
agtccagccgccggctttgctggtggttctgtgccctccgtgggtgaaaagacagatgctggggtggcatcagctcaccaggtagctgtgcatctctcgggagttgatgctcaggaccacgcctgagtggttgcctaggaaacagaagagacgcaggtcccgtgagcacaagcccgggactggagacagggccacaggggacacggtcgtggcctcaggcagtgcctcgagccaacgtgcagtgggcctccctggcttccttcagcccgtgcaggtgcagggggtctccgcggttcctaggtgggtgcctgaggagtgggctctcccggtgccatcacaagcagtgggccccagagggcctgagaggtgaggcccaggccggccccaacccgccacagccactgacctgcgtggggatcgcccccggcatcggcagcaagggggtgcgagaggggctgaggctccgccccctcctggcagtgggcgctgcagggcgtagagtggcgaggccccgggaggcgagagtgggagagaggggggcatagggatgtcagtgccaaggggtgagccgggtgtcccgggtgggggctggttaggagtcaaggagacaggtcgaggacccaggacccagagctgccccgcctcaagggcaccgggagacacggctgggagcacccgcggcacagcccagacacacctgagtccttgcctgagtcctcgcccatccttcacctggctgggccttggcttcttcatctctaacgtgagggtcaaccgcacccctcaaaggactggcgtgggtcagacggggaagtgcggctgctgcattggcaaggctggcgtggaccaagggcttggctgcatgaatcttactaccccactaggattactctttaggggcttggaagcaaaaagccatcgggggctggggagccgagccctgtcttcctgagaccctgtgacctctgtccactcgagaaggcctgggggtgagcatgggggtgatgccgcctgcaggagagggagccccaaaaccacctcctgccccagcaggagcaagaccagtggaggggtctttagagttgtaggacgctcacccgcggcccggggccttcggggggcacacagctgtatagccactgagtca

SEQ ID NO: 8481 - DNA, 1011 bp, Artificial sequence
  DNA replication origin
acctcgttaaagtctttataggagctgtcagttagcaataaagcttattttcaagttttctagccaaacactcctgtaacacttaagagagatgagatgtgacaaggaaacagtgttcaaaatatggttgcttgccagtgtgatgaatattctaagattaaatgttttgcttttatataaactggcagccagttaatgaatcttttcaaggttcttaggagaattctttgtgcattgtacatgactgaggaagagacggcagtaatatattttgaaaagaggaaagtgtaagataataatggagattctcccaggaaaagtgggatacttaggaactttaataatggtaaacaatcgaaacatattttcctgaaaacctatttacaatgagatacataaattatacaacacaggaaaatactccagagttttcctgaaactctcttcaagtcacactcagctgggagcccctcaggaagcagttgggaggatgaagagaacggaaagcaggggctggtgcggagcatggggagatgcacggatggggtggtgaggatgaagaggatggaaagcaggggctggtgcagagcgtggggagatgcatggatggggtggtgaggataaagaggatggaaagcgggctggtgcagagtgtggggagatgcacggatgggatggtgaggatgaagaggatggaaagcagcggctggtgcggagcgtggggagatgcacggatgggatggtgatgatgaaaaggatggaaagcaggggcttgtgcggagcatggggagatgcacggatggggtggtgaggatgaagaggatggaaagcaggggctggtgcggagcgtggggagatgcacggatggggtggtgaggatgaagaggatggaaagccggggctggtgcggagcatggagagattcacagatgggaggcagttctcttggccaccctttcctcggagtcccgggaggttattgtgaaatagctccacttgactctctcctgg

SEQ ID NO: 8482 - DNA, 1149 bp, Artificial sequence
  DNA replication origin
tgttttcctaccgtttgttcgtaaacagcaggtcctcagtttgcataactgaatttactctgatgtcctgtttttcaaaattcatcatcaacagcttccttgaaggtgtgttttcattatttttcatcacctctttgaccctctgtaagatgagattgagctcagcctacccaaagaaggcagttggaaatggtttggagttgagggtagagggccaaactgaagataaacatcatgggattggaggaaatcaccttgggagtggatagaattaggagaagaaaagagtctctagaccaaacatcttcagaggttgggaagagaaggggagccagcagagaccagccacgtaggtgacaaaaccaaaggaactgtttccagaggaatgggccatagatacaccgtgtcacaccgtgtcacatgctgccaggcatcatgtgctgccgggcggttgggggctggggtggggaatggggactgagcattgggtgtgggggaagtgaggactgagccctgggtgtggggggagtgaggactgagccctgggtgtgggggggaatgaggactgagcattgggtgtggggaagtgaggactgagccctgggtgtggggggaatgaggactgagccctgggtgtgtggggagtgaggactgagccctgggtgtggggggagtgaggactgagccctgggtgtgtggggagtgaggactgagccctgggtgtggggggagtgaggactgagccctgggtgtgtggggagtgaggactgagccctgggtgtggggggagtgaggactgagccttgatagctggacttggcaacagggatgtcatcaagtgacttgagaagagctgttttacagaccatggggttggggagggagtaggcagaggtgggaggaaggaagtcgagagtgatcagacccctcgttggaggtgcttgctttattttaggaggttcgtcatgtcggtgttcagtattatttagtttgtcttgtaacttctgagtcctcattctggggagcagattgacattccttagctggaaaaccaaaggtgtatgtaaaaaacctcttttaatggtgggttatactgtgttttaggcattacaaagaaaatttgctccatagaaattggaccatttggat

SEQ ID NO: 8483 - DNA, 1120 bp, Artificial sequence
  DNA replication origin
cacctataggttgttgcgtggacccacgcgcgtgggtcccggccgccctgcgagtggggctctgcgccgccccgtggctcgtctgggtcgaccccgcctgggacgcgagtgtaatgggggtccgtgcgcggggggcgcggttggtgggggcgcactgccccgccccgtgatttatcctctcacctgcccggcgggtggaagcgagaggcgcgggcccggagctgtcgcgcagcggccgcaccgtcctctcccctggccggcgggccccggggggcgcggggctgtcaccgcgcgtcccaccgccgcgcttcctgctctggccccgggctgggctctgattggagggagcagggccctactgcccggagcttcttgatttcttccgttagtaatgggaagaaaaaaaaaatctggaaagccagattgaactttgtagctctcagcgcctggagagtggaagaaactctcccaagaatttggcgggctggaaaatgcgtttcaagcaggagcatccacacccacggaatgaggccaaggcagttacagttagaggtcagatttatgaggggagagcgagggtgaggtccgtgggtggggagactccgacctcagcttgatgggaagacctgatgctgcccctcagacgctgtatttctcagccaccaaagaaagtggaatcactccttagtgaatgctttcatcaaacttttgaaaaacctgttatgtcccaggaagcaaaatcgaactggacagttttccccttttaggagagttaaagatcccggagacaaacagcagaaggctcaaggagtccaaatacccaacctgaagttctttctgaacaagagatggtgtttaagtaacaggcatacaagacaaaactgagctaattaccgcagctgtggctcctagccctctagcgtgtcatgcgggcccttttgctttctctgccctccgctgccccagacccccactctacgccgcacctccagtcatcagctcatgccgacccattgctatggactctgttgaggtggctcccttctctctgaagctttgcttgttctcctgaagtcctggtctttaagagcttatgatctgccaggacagattggctttg

SEQ ID NO: 8484 - DNA, 1010 bp, Artificial sequence
  DNA replication origin
acgaccgggacccccgcgcgggcccacgcggcgtcgcagcaggcgcggagcccccggtaccacccgaggccgagacaaagcccaggcgcacggaccccggaccctgcggagccccgctcggagcttccacgcccggggcagagacccccgccgggtccggagaccctgccgccagtcgcgccgtctcacctcaggccgccacctcgcagcgctcgctcctcgccgcggcgcctgggccgactggagcgcagctgaacagccgacagagccgcagccgccttaacaatggagccccggggcggggccgccgccgccgcctcagcccgtgtaccccgctcgagatccggctcggctcgcggagctgcagccggcgtggggctgcggccgggacagacaccacgcaggcgcacacggccccgcccgccgcccgccgtcccgcccccagcggagccgggcgcccagggcccgccccccggccaatgggaagcgagctgcgcggagtgggcggggcctgagggaacaaagggaggttgggcggggcggtgctgggactgggcttgcggggtcccgcgggaggacccgcctcaaagagccggcccgatcatcgcctcctagaatacccagctcaacgtctacctggagtcggctctacaggacgcgctcatctcaaacccagagctcaggcttttagggcagagagcgagagaaaggcttgctttacagaaagggaaactgaggtccaaggaataggattgcctgccgctcgaagaaacgtaatcccattcactcgttcatcttgtagtcattcagcaaacatttggaagcacgtatggcgggcgttaggagtgaagtagggccgggcacggtggctcacacctgtaatcccagcactttgggaggccgaggcaggtggatcacttgaggtcaggagttcgaaaccagcctggccaacaagatgaaaccccgtctctactaaaaatacaaaaactttgccgattgtggtggcgcgt

SEQ ID NO: 8485 - DNA, 1056 bp, Artificial sequence
  DNA replication origin
tgcatccacccatcccagcagcatccctgagtgagtgccttcagggcgcaggtcctgttttgcacatggaagtgaatcagagtgggacactgccttgccttagagaggtcacacttctttttttttttttaacttgtgatagagtctcgctctgttgcccaggctggagtgcagcggcgtgactttggctcactgcaacctccgcctcctaggttcaagcaattttcctgcctcagcctcctgggtagctgggattataggcacgtgttaccatgcctggctaattgttgtattttagtttcaccatattggccaggctggtcccagactcctggcctcaagtgatctgccccccttggcctcccaaagtgctgggattacaggcgtgagtcactgcactgggcaagaggtcacacttcatgccaagtgggaggcagccactcagacagcaccccagctggcgctgggagtgaggggtgctcagcgtcctaggaaggcagagggctgcgtgagaggtttggggaggaaggactggaggaggatttgagattttcacctgagcagctaggtggatggaggggctgtttactgagaatcacaagaatgtggatgagcaggttggggcactgataaagcactctgttttggcccgcagaaaatttgagatgcctccctggtgtccagctaggcctttgggagaggtcagggctgggcatctgacttggatggatgtctctggcaggcagcagagcatgtggatggtttgtgaagcccagaagggcatgagatttcctgtagcagtgcccactgtgaatggaagggcatttggcctgagcccagacatgtacaagttgggcagagaagggggtgggtccctgggacccacagaggagcagctatggaggtacagaaaaaccaagtgtgtgggggtcacatgatgcaggaagctcaaataagatgaggaaagaggttttaaagatgatcagggttggggacagtagttcatgcctgtaatcccaacactttgagaggctgagatgagacgatagcttgagg

SEQ ID NO: 8486 - DNA, 924 bp, Artificial sequence
  DNA replication origin
tgatggggaggggacctacgttattgtcttatattttaacactttcataggcaataactaaaaacttagaagcttaaaacaacacacacatttaacccagttttggcaagcgaggagttgagcacattttagcaggtcctctgcttggggtctcacgctaaggagctgggctacatcctcatctgaggctcaaccagggcagaatccatttccaggtccactgaggttattggcagaattcatttccttggacccgcttggcaagggcccagctttttgcttccttgcttacggggcccctccaaaggtcctttctcagcatggcatctccctcctgcagggcctgcaggtggaacctctctctctagtgtgcaaaggtgatgcactgtgacagtgacatccattgcttttgccagaggctctgtgggttagaagccagtcacaggttctgctcatacccaaggtcaggaagattatgcaagggcataggtcatcggtcactgggggggttagtcactttagggtgtggctgccaccactgaacttggtgagactttaagggttggtaggagctggccaggtacaggggtgagggtgtgttaggcagcggtgagggcatggagggggatgcagaggcctgcaccctggaatgtcctttcactccctgaggttgtgttctcctgatccctgagtacatcccagaacacagtggggccctagctggggagaggtagggaagcatgtgatgttcatcgggggaccttgttaggcaaatcagattaggggccaggctttcagtggtgggtgcgagtgtgcaagtgagtgagtgtgcaggtgtgtgtgggaagggagatggggatagggtcagccccagccatcatcaagacctcacctgtgcatccacccatcccagcagcatccctg

SEQ ID NO: 8487 - DNA, 970 bp, Artificial sequence
  DNA replication origin
cgtggatccagaggacagattcacccggcctcacagtgatgtggaacggggacagggagcgggaggggtgcagcctccctctgcacccctgaatattgtttccaatcaaataacaaatattcactgggccctgccttctggtgtgagcaaggggatggatggtggggctgtttagagagccggaacccaggaagagtagcctggggtgggcggaaggagatgtgttctgtctgctgggtgttgtgtttgatgtacccgcccatgtctgcccaggtggaggtccccaagagagactgagccacaggctggaggcccaatagacaggggtgggtgggcacagctgcctgggagggatggccagtgtcatcacctgtgtgagattgctcagggagacagagctcagcaagcagagctgagggcctggagcagcttagaggaatgcagggcctttctgagcttcgtggaggatgggcagaggcctgaggaggaagctcaagagggcatatggcacaacagagggcaagggagtcgcaggtgtgaaaaggagggacccagagagcaatggtgaggtgagatcaagccagctaggaccaaagtgtgtcctttggatttcgtcctaaagagtttcagtgaccttggcaaggagagttttgtcaagtggagtggcagaacccaggcagaagagatggaggatccggggctacagaagagcccaccagggcatacatgcctgcatcggggtgagtggagaggctggggcagctgacgggggcagaggggaggcggagggcctgttcatatgggtgatgcgtggctgatgtagaatcttgtaatgagagagacctgagcacacaagtaccaaggggaaagaggaagaggaaggatggagagagggaaggcaggaggaagaagaggaagaaaaaccagcaagtgcttagagcctgagggcatagtcccgccaggcactatt

SEQ ID NO: 8488 - DNA, 984 bp, Artificial sequence
  DNA replication origin
aggccctcagccgcctgctgctatctcgagtttgcaaagaggaaaagaatcctggtgcttgccagaaatgaaccacttgcgtggtgctgagatcagggtttcttggtgctgagaaatccatcagccagtccacagaaacttagaattgtcatttcagaccgcgtctcttaagacatttgacactcaatgtgtcatttaagatagcagccctgcacttacaggtacaaaatcaccatcttctgaattatggtggaacaatcaagacggatgagatcaaaggaaagaaaaaggaaaatcatttctagctttatccaagacctggtgataccagaccttgttccagacatggaaagtcagagacacaaggcccctggcaggggtaggctggggtggtgaactgacacgtaagtaaatatgtaaaggaggggaggctgacaccggaagggcgaggagagttcagtgctggtgcctggggcaggcctccctgtggccacattcctgcttcctgctgggggaggctaagggaggggcgcaaaggtgctggtgggcagagggaaggtgtcaagggggtggtgtgccccctgccatctgcaatcgtgtacttaaagggaggaggactggtgagtgagtggtctcttgggtttagctggcatcaggtctttgctggaggagggaggagtggagagggagcggatggtgggcaggcgtgccccgcatgctggggaaggagagaagggcaggcttgaggatgacaccatgtgctccaggctgtgggagcctctggggagggcgattcgaggaagacttggagctggcgggcaagcaggaaggctggcagggtgttgggaggtgggtgtgggaagcagaggtgcccttggggatgactgtgggggggcggtggagggagcatctgggtggcttctgaagttgctgggaatggttaccttctctgggagtgtggcactgggactgggacgctccatc

SEQ ID NO: 8489 - DNA, 864 bp, Artificial sequence
  DNA replication origin
ggaaggtgtcaagggggtggtgtgccccctgccatctgcaatcgtgtacttaaagggaggaggactggtgagtgagtggtctcttgggtttagctggcatcaggtctttgctggaggagggaggagtggagagggagcggatggtgggcaggcgtgccccgcatgctggggaaggagagaagggcaggcttgaggatgacaccatgtgctccaggctgtgggagcctctggggagggcgattcgaggaagacttggagctggcgggcaagcaggaaggctggcagggtgttgggaggtgggtgtgggaagcagaggtgcccttggggatgactgtgggggggcggtggagggagcatctgggtggcttctgaagttgctgggaatggttaccttctctgggagtgtggcactgggactgggacgctccatcaccagaggccctggggagcagcctggttgggcagaccacagcaacagggaggggccgggggtgtcccgagcatgtgggctgggccaggccactcgtatgtggcctacagggcccaggacttggggccaggggtctagggggctgacagggaccacctccccgcaggctccagtcctgttttctgtctgcagcgtgagagaacttggttgcctgggtatccggaaggctgggtgagggtcacatgaggggctctccgcagcagggggtctgttcataactctgggctccagctgtggaattctgagtgtcacacctcacctggctgagtctccactgcctcctaggtgagaggggctcaaaggtccttactctgtggccagctgcaaaactggcattcaatctcactcagggccagaggcaggcaggctttctc

SEQ ID NO: 8490 - DNA, 884 bp, Artificial sequence
  DNA replication origin
cacagtacaccacgcagcagaggagtggagaagaggcgtgcaaggctgtggaggggcagggccctggggccacctgacagccacgtcattgccccgctaagccgctgtcccctctgtgccccataggctgtggaagaggtcccggggtatggagggaaggctctcctggaggggcaatggccaccgtcattatgacagtgatgtcactgtaggtcctgcagggacctcctgctgggagggctggagcttccgggcctgggcccggcttaagcaagactcacccctgtatgcagggcctccttgtgcaggccaaggcagtgtgagccggtggaatgcaccacggagcccaggccttgggagaaaagtggccccttgctggccctgggggcccaggctgagcagggctaggacctgaggcccacccggtcagccagccctgtgctggtacagaggggtggctgtgactggtgggctgtgtggaggaaggaggtgtcagagtccctcccaggggtacctctgagcttggtggggtcagggaagctgggagtaccctgaggggacttagggctggaggttggtaggggggtaggccagggcaacctgtccctgatggagtggaggtggcataggtccctgaggcttcaccgcaaacctgagatggccctggaggtccaggtgggaggcaggaagtaagggtggaggaaaggtcaagccacctaacctggctcccaggtctggctctgccacttcctggctatgtgaccttgggcaagtcacacaacctctctgagcctgagcctcctgaggcagtccccctgccatgctgcaaaaatgcctccctgcaggatgttccctggggaaaccagtgcacctcagcagtgagg

SEQ ID NO: 8491 - DNA, 1976 bp, Artificial sequence
  DNA replication origin
gctctggcttcagggtcagacagacaaggttccaatcaccagctatgtgaccttagactccggacctcggtctcctcatctgtaaatgaggttcatagcatctattattatctgttaacatgctttacaaatgtttacccaagggctgggcgcagtgactcacacctgtaatcccagcactttgtgaggctgaggcaggtggatcatttgaggtcaggagttcaagaccagcctgaccaacatggtgaaaccctgtctcaactaaaaatgcaaaaaattagccgggcatggtggtggtcacctgtaatcccagctacgcgggaggctgaggcaggagaattgcttgaacccaggaggcaaaggttgcagtgagccgagattgcgccattgcactccagcctgggcaacagagtgagaatccatctcaaaaaaaaaaaaaaaaaaaaaggaaaaatgtttatccagaccacaatacagtgcttatctgatgagtaggtattcagtaagtgtttatcacatgcatgttctcagggaagtgtctctgtgttgactttgctcctcccatcaaagttcttgttatgtatagaaaccctctcatccacctctgcctcgacttcactggcctgtgagcttctgaaagacaagggtcatgtctgagttttttctgcatcccccattcttaagacagtacagtgcacagtaggcactcagcacagggagatggggataaaggttgaggggctaagggtgaacagagggtagatggactgatcgatggattaagggctacatggatgaatggatgcatcagtgggcaaagaaatgaagtggacaaagagaggaatggatgaatggatgggtggatgagtgggtagatggatgcgtgagtgtgggtgagtgggtggatggatggatggatggatagatgagtaggtgagtgagtagataagtggaagctggatgaataaatatcaaaataagtgaaggcacaagtggatggatagatggatggatgggtggtgggtggatggatgggtagatggatggttgggtggctggctcgatggatgggtgaagaatgggtggatggatgggcagtggatagatgggtgagtgggtagatggatggattaatagatgggtggatgggtgggtgggtagatggatggatggatggatgagtgaaggatggatggatcaatgggtaaatgaacgaatgggtgggttgatgggtgggcgggtagatgaatgtatgaatggacagatggatgtataggtgggtggatgggtagatggacagatgggtagatagatgaatagatgggtggatgggtgggtggatggatggatggatgggtgaaggatgggtggatggatggttagatggatgggtggtgggtggatggatcagtggatgggtgcctggctggctggatgaatggacagatggatgtataggcgggtgaatgggtagatggatggatgagtagttagatgaatagatgggtggatgagtgggtgggtggatggatggatggatgggtgaaggatgggtggatggatgggcagatggatgatgggtggtggctggatggatgggtggatggctggctggctggatgaatggacagatagttaaaggagtgggtgcatggataagtaggtaaaagggtgaatgaataagtatatggaaaggaataaagcagtaagggatgcacacaggctggcatggatgttcagatatgaatgaattataagatggggtttgggaaggaggaaaggcaggccagttctgtatccagaaaaaaaaatttgagacctcttactttcattcagatgcctccaaccaaagatttcccaaggaatacagggagtagaaagccagcctttcccaagagggttcctcactggcaaatgcattccagaactcagaaggagctgcctgtgtgatacaaaagacatattaaactctcttt

SEQ ID NO: 8492 - DNA, 1155 bp, Artificial sequence
  DNA replication origin
ccatttgagaggcgcagccccagagaggctgaaagaaacctcagtgacaacagctaagggcccgtgtccacttgggcctggaagctgtgtcctggtcataccatgagaccctggagcaggacagggagagataccagcccaccccaacacacatcacctctgcatgtggcccttcatggccacagagccctcccacagggacacacgcactcaaaccaggaaggggtgtgcccgatgccccaaggctgccaggaggtggaggaggatcgtgaggccagtcctctaggcttgaatcgcacgtcccagagagagcgccaggatgtgctgagaaaatagccagcacatcctgtggtctttgcggggaagaagggactggatttgggtcttagccctgtggccgagacgcgagtcctcacggactctcttccagcatctggtccaggtgcagaccagatgttggacaataaagccaacacacagcctgggcatgtggtaggtgggtacaggtgggtgcagtgggtgggtgcaggtgagtgcaggtagatgggtgtaggtaggtacaggtaggtgggtgtaggtggatgcacatgggtgcaggtaggtggttgcagatgggtgcaggggggtgtgtggtaagtgggtgcaggcaaggtgcaggtaggtgggtggtagacaggtgcaggtgagtgcaggtgggagggtgtgtggtaggtaggtgctggtgggtggtaggtgggtgcaggtgggtgggtggtaggtaggtgggtgcaggtgggtgggtggtaggtaggtgggtgcaggtgggtggtgggtggtaggtaggggcaggtgggtgggtgtgtggtaggtgggtgcaggtgggtgggtggtaggtaggtgggtgcaggtgggtggtgggtggtaggtaggtgggtgcaggtgggtgggtgcaggtgggtggtaggtgggtacaggtgggtagtgggtggtaggtaggtgggtgcaggtgggtgggtagtaggtaggtgggtgcaggtgggtaggtgggtggtgggtgcaggtgggtggtgggtggtaggtaggtgggtgcaggtgggtggtgggtggtaggtaggtgggtgcaggtgggtggtgggtggtaggtgggttcaggtcggtgggtggtaggtaggtggg

SEQ ID NO: 8493 - DNA, 1027 bp, Artificial sequence
  DNA replication origin
tgggtggtaggtgggtgcaggtgggtgggtggtaggtaggtgggtgcaggtgggtgggtggtaggtaggtgggtgcaggtgggtggtgggtggtaggtaggggcaggtgggtgggtgtgtggtaggtgggtgcaggtgggtgggtggtaggtaggtgggtgcaggtgggtggtgggtggtaggtaggtgggtgcaggtgggtgggtgcaggtgggtggtaggtgggtacaggtgggtagtgggtggtaggtaggtgggtgcaggtgggtgggtagtaggtaggtgggtgcaggtgggtaggtgggtggtgggtgcaggtgggtggtgggtggtaggtaggtgggtgcaggtgggtggtgggtggtaggtaggtgggtgcaggtgggtggtgggtggtaggtgggttcaggtcggtgggtggtaggtaggtgggtgcgggtgggtggtgggtggtaggtaggtgggtgcggatgggtggtgggtggtaggtaggtgggtacgggtgggtggtgggtggtaggtaggtcagtgcgggtgggtggtgggtggtaggtaggtgggtgcaggtgggtgatgggtggtaggtaggtgggtgcaggtgagtgggtggcaggtaggtgggtgcagatgggtggttggtaggtgggtgtgggtcgtgatgccttccctcagctccccccactggtccctctcattgtcagtggggcttgtcacccacatcctcaaattctgtgatccacaggggcagaagcaagtcaggagggcacctgctggccctgagctcttctcaccctccctgcacagcccttgagcttggcaggtgcacccagcagccatgactttctcgccccacaccatccgcatcgaacgcgctgccctggagtctcagctcttgcttccctggaggcccttgttgaagtctcaaaatgagaaggcccaagggaaacgtgtttgaaaggactgagcttccccaccccggggagccccccatgcctggcggcacgcatgtcaagagcacacacactcg

SEQ ID NO: 8494 - DNA, 1002 bp, Artificial sequence
  DNA replication origin
tggctctgtgagtctgggcaagttacccaacctctctgggctctggcttctacattgtgaaaaggagcttctgtgagcacccctttgtggcatcattgtgttttgcgagcagatgatggagggctcagcccagtgcatgtctcggggtagacagctcatcatgtccagaggaggctgaggcagaatcgagaagcagcaacagggatctccaccagagtcacctgtggctggaaaatgcccccggcagctcctggggagcccagagccagggagaaggggacaggcaggggcaagagcacgtgcacagtgcacagtggggtaccgcggaggaaggctgggcagaatcagagcagagggcagcacacaccagctggacctccctgagcaaacacaggggttctcccagcgtcccgcattcattcagcaagggcaggagcgccactgtgggccagggtaggccagaggtagacaggacagaagggcccccgaccctgctgaggggtgtcccagctggcctgtcaaatgccaggtgctttgctgcaggcagcatgtgaatgtgtgtgagtgcgtgtgggcatggggggtggtgaatgtgaacttgcttggtaggggtggggtgattgtgtgcaagtatgtgtgggcagatgtgcatgcacgtttgtgggtgaatctgggtgtgcaggtgtgtgccagtgtgtgggggtgtgccggttgtgtgtgagtgagccatgggcctggggagtgattgcatgtgtgagcacgtgtcagtgtgtgggtgtgggcatgtgtgtgctagtatgtgggagtgggccaggatgtgaggggggtctatacctccacagtctcagacaggcatgttctctgtgtggaggtatacatgcacatgtgtgtagtgcatgtgtgtgccttatgtgtgtgtgtgcctgcatgtgtgtgcatgtgtgcgcatgcatgtgcgtgtgtgtgtgcatgtgtgcgtatgtgtgtgcacatgtatgtgta

SEQ ID NO: 8495 - DNA, 1393 bp, Artificial sequence
  DNA replication origin
ttgtcctcctgctgctgcacgtggccccacatccggcgctgatgttgcccatcctcgctggtgtgcgctgagtgtaggaggtgctgactgtcacccacgccagccgctgcacgatgcccagcctgagtcaggcagctggggcttccccgataaaggcacccggcctgggtggcctgcacagcagaaacccaccttcccacagctctggagcccaaaaggccaagatcacggggttagctggggtggtttctccctcgttggctcgtagatgctgccttctccctgtgcctccacatggactccctgtgtgtgtctgtgtcctgatccctgctcgtagaaaccccaggcataacagattagggcccatcctagtgaccttttaaaaaccctgtctccaaatacagccacattctgaggtcctgggggttaggattcaacctacgaatgtggacacagatcagcccatccactgtggtgcctcctgggctgcaggcaccgctgcatggatgggcccctgaaatgggcaggacagaattgttgggggtggcaagaaaagggtctactcagaaaatgagaggagggagctgcagtgggggctgtggtcggggtgggaaaccatcgaagcagcagaggacgtgggggccgtggggagagtgagggctgagctcttggctgctgagggctggggaggcctctgtggatatgggcttcttttggacagggtgaataggaggcgtggggaaggccaggcaggtggcccaggagtgagggctgaaccaggagaggggtgtgcagctccagtgagagctgaaccaggagaggcccctgccctgcaggtggggagggacagcaggtgcagccagaggtgtggggaccacagaaggagtgtgtccgcagggctggagggggctgaggtggggggagaggcaggacagtcacaaaaaccatcagcccaggggacacagcgggtgtggtccggaagggaggagtggccccagacagcagcgagcatgtaaggaggacacaggtcccaggcgtgacagcagcaaaaaggccaggacaagcccacaggtgcagttgggagagtggctgccagggggctccgaagggccatttctaagttgtgtgtcaggtgggagcaggtgctctttgagctgagaaaggcttgggggcccatggagggtcagagggcatggaggacagagccgggggccaagctagagagggtcttcagggtgaccaagatggtcccgtgttcccaggaacctgggccagtggactaagctgcagcgagtccccataatcccggtggaaaatgacgcctctgagcataaccggagcttgcagaatggcttggcctgtgcatcactctggtctcatgtggcccaccatg

SEQ ID NO: 8496 - DNA, 744 bp, Artificial sequence
  DNA replication origin
agctgggcatggtggcaggtgtctgtagtcccagctaatcaggaggctgaggcaggagaatggcgtgaacccgggaggcagagcttgcagtgagccgagatagcgccagtgcactccagcctgggcaacagagagagactatgtctcaaaaaaaaaaaaaaaagaaaaaagaaaggagggagggagagagggagggagggagggaaggaaggaaggaaggaaggaaggaaggaaggaaggaaggaaggaaggaaggaaggaaggaaggaagggaggggtggttccacataaaaacctgtacatgatgttcacagaagcattctatataacagcgaaaggatagaaacagccccggtgtccatcgtggatgaagaaatagtggcgtatctatgccagggagtattattcagccacagacaggaatgaaagcactgatcctgctacaacatggatgaactctgaaaacgtgtgcagtgaaagatgccagacgcaaagccacggggtagaggattccttcactatggaaaatccggagcaggcaaatccatggagacagaaagcaggtgagtggctgccagaggctgggggaggagggaatggggagtaactgcctagtgggggtgaggtttcctctcggggtgacgaaaaagttttggaactagagagaactggaagttgcatgatattgtgaatgcaccaaatgccaccgaacattttaaatggttaattgtacgttacgtgaat

SEQ ID NO: 8497 - DNA, 1657 bp, Artificial sequence
  DNA replication origin
tttggcattaaatatcagggatgcttacattgcagacatgggacgcttgcctcccaatccatcaaggggagggggggctgcctgatgaaacccactttgctcgcccagtgcggagcgtgcctgaggcagagcagccccagtttgggtggggtctgcccccgaccccaggccagggcctctctggtgtgggggctgctgcccatgggtgtcagaaacgcggggcaggtgaggctcctgcaccagcagcagcaacagccgcagctgactgcacccaagatacaccccactttaggccaccagatgttccaacgtggctatgctattaagccaaaaatgcaaacctgcatctgtgcaccaggagaagacaaagggttgggggaaacctgcgcaccccgggctccagtctggctctgccaccgactctcagtggctgatggccgggcacgtgggtggatccagctggacgcccaggtgagtggtgggaggcagtgtgtatgtggcggagggagagtgcctgcatgtggtgttggcctggctgagcatcagagccaccagcgcataagaggagcagggtcagggacagcacctgagtggggaacgcaggccctgcaaggcccctggggaagtagggaggggtcggtaagaggaggcttaaaggccttagggtttcctgcacacaaagcccccggatctgcagaagagcagggagagtacaggtggaggagcacagagagggtctctgagaggcagtggggccggtgcgaagggagaggagaggctgagtctctgcagtggggacttccataccaggctgctgtttttaacgggagagatgaacactctctaaaacgccactggaggggaagccctggcaggtaaggtggggaagatgggaggagacaggatcaagcacggcagagggggcgatggccagagcggctggacccaggcacaggcgtggtaggggtgggggtggtgtgcgggaagcagcagggcaagggagagagtcaggatagaaatggggtctcatagagagtgagccacccaggccgtcctcgctgaggtctggctgccaactctttgtcaagcagaagacaaggccgctgtgtgggcagggagcgcagtccaggacagtgtggaaggtctgggctgttcttcgcggagaacggaaacgtggctttggactgccaggcagtgcatcaggccaggctccatcctatcctgcaggctcctccagagccctcaccacctcctacagggtggggtgtgccagcaagggctgagcaaggggaggggtgagggagggagaggccacggccccaggagaaggggagagaggagagggccaggcaggacgtcgtccctgggatgcatcactggctgtaaatatcagatatgatcgccacccaggaaaatacttataggacagacagaacatctgcagccttatgtgatccacccgcacagaaggcacaaagaccctaaatagataagcaggcaacatttacaacagataactgaaatacaagaattaggaatggctacaaatgacaaaaggttgggcatggtggctcacgcctgtaaccccggcattttgggaggctgaggtaggcagatcacctgaggtcgggagttcgagaccagcctgccaacatgg

SEQ ID NO: 8498 - DNA, 1097 bp, Artificial sequence
  DNA replication origin
tgcaccaaggccttcctcagtgcccctccctacagcctcatccccagccccaccctatcctcccagccaaaccccagaggccagctcctgcaacctcctcgagaggggctcccacaccaggcacagcccctctccattctcgagacccccctggtcacctgtcgcttcccccatggaccatgggccaatccagggatggggacagtccacctgcctgaccagcaccacagcactgaggcaaggaggggctgcagggttggggggggtctgtgaatccagagggtgggctgcagggtgggggggtctgtgaacccagagagggtgggctgcagggtggggggtctgtgaacccagagagggtgggctacagggtgggggggtctgtgaacccagagagggtgggctacagggtgggggggtctgtgaacccagagagggtgggctacagggtgggggggtctgtgaacccagagaaggtgggctgcaggatggtgggatctgtgaatccggagggtgggctgcaggatgggggttgggggtctgtgaatccgaagggtgggctgcaggatgggggttgggggtctgtgaatctggagggtggggtttggtcctagttgccccatgggatttatcttattgaacaaaacgcagaaaagggcataatgtgtaattttcacacagggaacatgcccacatgactacctcccagaccaaggcacacaaagctatcagcacctcagaagctccccctgcataattgctatctgccctgcctcccgggcgaccccgctgtgcctcctatggggacgaggtcctggtgtgggctctcttccatcttccgtgcctctgagtcccaatctagacagcaaacggctgggccaaaacatctcaaggcacttcccacatgctctgaatttgtcaagaggcacagaagagagcatcacaaggcaggcttcctggaggaggtggcactgggcaggccctggacagctgatgagggtgtccattggctgagctggcaggaatagggaggtgaagctgcagccagacagattcttgcacaaacacacacaaatctcccagtcaactcccagggg

SEQ ID NO: 8499 - DNA, 700 bp, Artificial sequence
  DNA replication origin
caaggcacacaaagctatcagcacctcagaagctccccctgcataattgctatctgccctgcctcccgggcgaccccgctgtgcctcctatggggacgaggtcctggtgtgggctctcttccatcttccgtgcctctgagtcccaatctagacagcaaacggctgggccaaaacatctcaaggcacttcccacatgctctgaatttgtcaagaggcacagaagagagcatcacaaggcaggcttcctggaggaggtggcactgggcaggccctggacagctgatgagggtgtccattggctgagctggcaggaatagggaggtgaagctgcagccagacagattcttgcacaaacacacacaaatctcccagtcaactcccaggggggcagttaggccctagctcagagcgggcaggggcccggcccgccgcgcttacctccagcacgcgccccgtgatgtatttctcacagctgtcacagcggatgccgaacttggcgtgatagtcagcttcgcagtagggcagcccatccctgcaatgagacaggcagtcaacacagggcgggtgtcgcccgaggacccttgagatctaacaaccctcaccaacaagagagtctgccctcaaagtgggggaatgcccacctcctcctgctcaggtaacaatgcttccaacaggcagtgtcattgggctctcacagaca

SEQ ID NO: 8500 - DNA, 883 bp, Artificial sequence
  DNA replication origin
tcctattgcggggacgcagcagtgcctgggtggagaggccctgcatttcctcagcctgtgagtggtacctttgcaagatcctggggagacattggccctggtctcctgcactgggacagggctcccccagagaggagccagaaggtgggcctggctggtaacgagctctcttgtttcaggctgcccttcccccccggggaccgagtgaccttcaacgggaaggaatgcatgtgccagaagtgttccctgcccgtatcggtgggcagcagcgcgcacctgtcccagggcctccgaagtaagtgggcgctgagtgggggcatgttgagtgggggcatgctgagtggggggtgctaaatgggtgggtatgctgagttggggggcgctgagtggggcgtactgagtgggaggtgctggggggcgctgagtgggggcggtgctgagtatagggcatgctaagtgggggcttgctggttgtggggggggtgctgagttgggggcttggtctctgcagtgcccagggacagagcctgagaaacggggacccagagcagcagcagctgcagtgaacgctgtgaataaatgtgaggaggcagccagggatggaagtttctggggctctcgtgccgccaagtctttgcactggctgtttcctccaccccatgtgccactcctgctttcccatctaatgcccactgctgctttcccatctaatgcccactgctgctttcccatctaatgtccactgctgctttcccatctaatgcccactgctgctttcccatctaatgtccactgctgcttttgcccagctctagcatacctcctccaggaagccttccaggtctccttcaggtcctctccctctggcattcactcccctcag

SEQ ID NO: 8501 - DNA, 877 bp, Artificial sequence
  DNA replication origin
agacgcgagggacccagctgccctcctagctcgagctccaggcagacatccacagaagctgctaatccacaggcggcaaggcacctccctccacgccagagaccctcagcgtgaggcccaagtactgctcacccagctgggagcatctcgagagccagatgagaaaggtgggcgcagcagggtccctaaaatggcagccaggcctcacacccaaacagtgggcggggtggggcggtggtgtcagaagaaagcagggttgtaccccgaggatggcagtggccctgtttttacagatgggtacactgaggcacagagggacgatgacttgtccaaggtcacagaggtccaggcgaggggctggagacgctgctgggctgggctgtgtaagcagggggagaggcactgccttcagtggaacagatgggccctggggggattgcaggacttggggtgggggtgggggagtcggagcagagggtcagggttccaggggggcacatgggctcaatgtggtgaaagtccttctcaggcccaggctatctgagggtgagtcacagaggccatgcaatgacgctaggcaggaacccccataggaggcgggtttgggtcttgtcctgcctcctggctctgtgctggcaggtcccgcagctggaaaatgggaataacacaccacggcccaggcgagaagatgggctgtgtgagaccctcaccaagaagcgccatcatgatgcccccaaacgggccaggctttatccacaccaacactcagccacgcgttatgaggcagcaaccaatcccccacagccaccggctaaagcacgcaggcaggggataggcagacagcgcccgcctagccagggatacgcgtgttgcggct

SEQ ID NO: 8502 - DNA, 1675 bp, Artificial sequence
  DNA replication origin
tggctgcgccaggatgtctggaaggcgccccttctttgcttctcacgggggtccgggttgttccaggctgcagaaagcggtcagggtccgcgcgggggcctggggtccgggcgaagggccggggccccagcagacctaggcacgcagaggtgagatgataggcggggctttgcagctgggggcgccgcccttgcgccgctctggcagcgcctgggttgggggcgtcaggccgaccctcggcgcccaggactctccgcagcagatctggggacccggagcccgcatgtgtcagacccggccccgacccgatctctgcgcgtctccagcccctcgcccctgcgcgtcgcacccctgcctttcccgccgcacccaccctccgggatctgacagcctctgtgcggggctggaaaaatcccacagcgctggagcccagccgcgccttgtgctgttggggaaactgagacctagaactggagcccttggcggtgagccctggaggcggcctgaggatgcccggatctgagagcctcctggggcccgcaccgggctgagggcttgtcgttgcattcccggcagggaagggctgtcaccccatttttcagggtgtgacccgaggcgcaccaggcttgagtcacttgcttggctcaggaagggggggcggggattcgaaccccgggctcactgactcttgtgctctttcctctaagcctgtcgcgccagggactgcagtatggcccttggccatggtgcagaaaccaatggggacagccgcttcccctgagggagatcggactggggagagaatgtgaatttagtaagagcttcctgtgggctgtaggcctagaagggggcgggggctaagggccagggactcccctccctggggagattgtctccctccccctccaatccaaggaaggagggacggcgttgccgggagcctttgggagtagctgagagcaatggcaggcggttggggaggtcagaggcagaaccctttggaagaggatttctgaaatggccaacctagttatctgggagtggctggggagcagggcaccctgagacttggcagaacctccagacacatttatctaatggcaggtggggataatggctgggtgcacacagagtaattttatgcttcttgtggccataattgatacctgtggtcccccctgtcatcagggagagcctcagaagcagtgctggcatctctcctctgcatctgacgagaaggggtgtgggggcactggggcagttgggggcagagactggggtttgaaccatggtgactgcctggtggtcttaggcataggtggcaccttccagagcttggcttcctgacctgtaagagcagtagcattggttgcctggaggggacaaggtacaacatgaagagccccacacctgggaggccctcggtagtttgggatggtcattgctgggtggccagctcagctcagaccctctgaatcaatccagccctttggaactggcaatgtgtgctctccgggccacctgtcgcccctgcccagccctgtccccagccgatgatgcgcacagcaggcattccacccacacagtgggggagagcagacagcatggtcccttgttcctggcatgtgggctctaacgtccggccactgtgtatgtctggcaggacaggagcttc

SEQ ID NO: 8503 - DNA, 1356 bp, Artificial sequence
  DNA replication origin
ggcggctgaggcctttcgcaatcgttcttagatctctgcagagctgtcgccacggcctgaggggcgacgtggggactgccgctcacggaatccgggagtcgctaggagagcggcgcagggaaaagcgagcttggtgcagctcttcttgagtagtcgagctacaaggcgcctgaagaccttctgggccaactcttctttaccagtttacagagagggaaactgaggcgggggcggtgctcgggcaggattagcccgcatccgtcggcgaggcttgcactggtggggattcgtgcgcaggtttcctgcctccgggcttgggctgtccgcgcctcgccacccaccccaggctcccgtcgctcctcgccggctggcgcccagctggggggtgcaccgggagaggtggcgcggctcacttcggcgcagtccccggccccagcctccacggtgaccggctaccctgtgacatcaggcgcccagcacagggcctggacgcgggtgcaggagagggagtcagggaacggggaggagcaggggtccccactgtgtgcctggtgcgacaaaaggcgagctgcagagaggtcgggaggagccggcaaacacaaggatgcccaccaggcgcggagggcctgggctggaggagcatttaggatgcagaatcgcgggaacctggcatggagagagaggccaaggacttttggcttgggccagggctgtttggagatgctttcaacaagtggaagaagattgggcacagaaaatgtagactgaatggaacactgaggcaggagcaggtactcctccccctccctcagcagcagccatctcccccaagaggggccaggatgggaggccaggagtacagtggctcagtgggggagctgaagtcctggggaaccagccaagccccacacaccctagaaatccaggaggcccagctaggtgattctgcccgcagccgcagggttcccatgccagtccactgggatcttgtgccatgtaattgagggggcgccagatctaaggatcagtgaactaatgtgtgccatgacccagtgtgagttgagatcaataaatgtctttgctttgctattattattctctgtggctaacatagggcctggcacagagcaggcagtctgcaaatatctgttgaataaacggagagaaggatagaggggaggggagagtgctggcacctggcactcctggatcatagcctgagaggtaggccaggcacccacctgccgtaggtacaccctgctgccacttgccctctaaggagctctcggtcaggctcccccgcagcctctgtttcctccctctgtttccaaaggctcctgagaacctcccaggggt

SEQ ID NO: 8504 - DNA, 1556 bp, Artificial sequence
  DNA replication origin
gcctgtaaaagaggaagtcccaggactcatggaaaccgggggtttgcacaatttagccaggggccagggaggacttctaggaggagacgatgcctgggctgatccttaaagagtgaagagaatttggccaggcagaggaggagagggaggcccctggcaggcaggggtgtgatggagtggaattagctttcatttagcaaatccctctggctgcaggagaaggaatgggggtggggggagtaggagcaaagagagcaggagaaggtgcctgcacttgtgtctaactacgctgtggaaggacttggaggcaggacctggggttggactaatgtgatggagcaggaagagaagtctcccagaggggttctcaggagtcagggagagcaatagggtggcagcaggtgccgtttctggagctgggaggagcttaggacaggctgagctcagccaggggccttcaagtcatggtgccagggagcccagggaattatagatttggaaagtatatcagtctggcttctccagagaaatagtactgatagaaacagatggatggtgggtggatggtggatgggtggcagatggatggatgggtggatgggtggtggaaggatggataggtgaatggatggtgaatgggtgggtggatggatggatggtaggtggatggatgggtagatggatgggtagatgagtggtggataaacgggtggacgagtggtggatgtataggtggatggacagatggatggagggatgagtggatcagtggtggatagatgggtgaatgggtgggagatggatggccgtatgtgtgagtggatgaacagataggtagacggatggatgggtggatgggtggtagatggatgggtggatggacagactgacggatgaatgggtggatgggtggtgaatggatgggtggatgagtggtggatgggtaggtagatagatggatgcatggatgggtgaatgggtgatagatagatggctgaatggatacatgggtggatgagtggtggatggatggctgtacgggtgagtggatgaatggatgggtaaatggacggatgggtggatgggtggtggatggtgggtgaatggatggatggatggttgggtgatggatggctggatgggtgagtgcatgaacagataggtaaatggatggataggtggatgggtggtggatggatgggtggatggatggttgggtgactggatgaatggatagatggatgggtggatgggtgggtagatagatgggtagatatatgaatgtatgggtgaagggtggtagatggatggatggtgggtggatggatggatgggagtggatggatgaacggatgaatgaatgagtgtgtaggtaggtaagcagacaggtacaaagggcaactgatagataaacagggttctattttaaggaatgttctcatggtattgtgggggctgacaagttcaaaatctgcagggcaggcaggcaactcaggcaggagtcggtgctatagtcttgaggcagatcttctccactggaaactgtttttgctctt

SEQ ID NO: 8505 - DNA, 1140 bp, Artificial sequence
  DNA replication origin
acctcacctagggcaagtccgtgcctgctgcaagccggtggttccctcccacccagctgcccacacagctttgcctcagcagaagtgcacttgactgggctctgcccccttctgcgtgtctggcagaggtgaacccggctcggaatacatggggctgttggctcccacctggcttgggcagcccggccccctgtcactggcacttggtttgttagtcattcagcaaacgcttgcagagtgtggtgctgtgctgggcacgtggcccacagagagcaaggcccgccagtctcctcgctggaggagcccgcagtgcaggggacctgcctaggaagcaagtggtggtgacagatgatggccccagtcccaggaggggcggagcatgctgagtctttccagggcgcagggcaagggctggccgggccggcggccggggtaggcctctttgaggaggcaacacaccgccgtcacagcctggaggagaaggggtgccaggaaggagtggtgtgcagaagccagggcaggcattgggggtgtgggacagcacagggtggccagggccccgccaggggtgggagaggggagagcagggtgaggctggcaaggatggcttggatgtaaccaggtggggaaagagaggggtcatgcgccaagtgccctgtggtgccatctgctaagattcagggccggcggggggcagtaggtgtccagttctggctgggtggtgtctgggctggctactggccatcagagaggcagacggtggcactggcacaggccctcattctgagctgcagcctggggacctcagtgaaagcagatggctctgaagaccccgccggcgtgagctccccgcacagagtgtggcccttagagaaggcatgacctttagggaggaggaggctgggaaacgggaggtgtccaaagggtgtggtcagcgggtggaccagtggcccagagagacatggaagagggagccgggaagggactgctgggcttggccacgtggaaaacactggtgacctgtgcctgggtagttttggggagcgcggcgtgggtgcgttgatgcgaggccaggaagtagggcctggaaagtagcacttgaggttttgctgggaggcggcagcactggccgcaggtgcc

SEQ ID NO: 8506 - DNA, 1293 bp, Artificial sequence
  DNA replication origin
ctaacctcccagggacgtcggttcttccccacctgcctgtcgagcgcagcccctctgtgctcctcgctgggccaaggctgcggagaggacccggcacgggcatttgttacatgcacagaatctcagtgcaactgaggtgtgcacctgtgcttggcttgttagaaaagtccttgagtctaatttaatctttacgatgactcagggcctggccacagatctcacgtccccacccgcctgacacccagggctacttggaggaagtgaccactccatgaggttgtgttgatggatgtgttggacccgaggcacgaatgtgaccctcggtggagaagactcgctgagcaggggagggagcctcagaggctacaggtggcactggtggggacgtggggagaggaagacctggaggggtggggtggggtgatgttgggtgcttctgtgggcatccacaggtcctgggcactggggtggcagatgcctcgggggtggccactcacccaggaaagcagcccacatggaggagaggtgggtgcccagagttgcacccattccacagggaagctgccagtagaatccagctcccaaagtgctctgggcttcagcagtgggacctttgtcaagggtggaagcattacccagtcccctgagacaggggaggcagagggagctggacagaggcctccagctggtgggggctgggcaggaagaaagttgagccctgatgggagaaggaaggtgggagatggggctggcaggtgtctgcaaggaagggtggggtgctgagggctggagtccaggaggggcttcaggatggggtccctggaccttgtatcgtccatccccaaggcccaaggagggggctgagaggacagcaggctgcagggactgcaggctgttggggttgaggggctgtgattgggggccaatgtttctaaccactgtcccaggcctgcttcacagcttatgtaccgagctgacaccaaaaggtaggaccaccctgaacctgtgaacctgaccttatttgggaaaggaatctttgcagatataatttccttaagggtctccagatgagatcatcttgggttatttaggtggaccccaaatccagtgacagggcgcttaagggagactgaagaggagacacagacacagaggaggaggctgggtggagacaagggcaaagactggagcgatgccacctctagccggagcatacctggagccccagaggctggagcaggcaggaagaggcctcccctggagcttctggagggagcatggcccttccgacag

SEQ ID NO: 8507 - DNA, 726 bp, Artificial sequence
  DNA replication origin
taagcccagcgtgccccgcagctcctgcctcccatctccccgcccagcaagatattctgagcaaacactgggacagactttccggtgcgtggactcgtccccttgctcctggcttgaagcccctcagtggccagcaaacatcccctctgcaggcagggcatggagaaccgggacggccatgcctctgacctctgtctgggagcaaaagtgcaagtctggcctcctgctgtcctgtcaccccttttgtggtggatgctggggggcagggcacccagggcttgccagggcctccgtccgggcctcagagccctgatgggcccacgaggctggggccttccagctgccaggacaacccccagagcctcctgtccttatccccatctcccacttccaccctgctctctgggcggggaacgtggcaggggactgggaggcaaatcaggcagctgttgggggtgcgtggggtctgcagtcagggacagaggacgcagctgtgaaggggaggcaggaggccctggacatcgagcacctgggaagggcagagaggcacccctgggagcttcaagccaggagcagggggacgagtccatgcgccacaaagtctgtcccagtgtctgctcagaatgtcttgcaggggcggggagatgggaggtaggagttgcggagatgctgggcttatttcttccccacctcagttttttaccaaacagggcaagctgggcctgc

SEQ ID NO: 8508 - DNA, 676 bp, Artificial sequence
  DNA replication origin
tcgtccccctgctcctggcttgaagctcccaggggtgcctctctgcccttcccaggtgctcgatgtccagggcctcctgcctccccttcacagctgcgtcctctgtccctgactgcagaccccacgcacccccaacagctgcctgatttgcctcccagtcccctgccacgttccccgcccagagagcagggtggaagtgggagatggggataaggacaggaggctctgggggttgtcctggcagctggaaggccccagcctcgtgggcccatcagggctctgaggcccggacggaggccctggcaagccctgggtgccctgccccccagcatccaccacaaaaggggtgacaggacagcaggaggccagacttgcacttttgctcccagacagaggtcagaggcatggccgtcccggttctccatgccctgcctgcagaggggatgtttgctggccactgaggggcttcaagccaggagcaaggggacgagtccacgcaccggaaagtctgtcccagtgtttgctcagaatatcttgctgggcggggagatgggaggcaggagctgcggggcacgctgggcttatttcttccccacctcacatttcaccaagcaggggcagcagagcctgtattagacagcagcagggaaaatcttctcaccacacatcaggcacg

SEQ ID NO: 8509 - DNA, 1116 bp, Artificial sequence
  DNA replication origin
gcactatcccttcccagtgcctggagacgctgagaaaaaagtgttcccaatcctccaggtcaagactcggccccagatctctaggcagtggcattccaggggctttggcctctgcagagcatggctgccccaagggagaaggtggggagaggggaagagaatgaggagtagaaggggagaaggagagcagggagaggggagacaccgggagggggagagggagggagaagggagaaaacggtgcgggggcgggtggagagggagggagaggggagaaaccaggagggggagaggaaggaagaggggagaaaccaggagggggagaggaaggaagaggggagaaaccaggagggggagaggggagacaccgggagggggagaaggagggaggagggagaaaacgggagggggagaaggagggagggggagaaaacaggacggtggggagagggagggagaggggagaaaccagaagggggagagggagggagtggggagaaaaggggaggaaggagggagggagaagggagaaaacaggtggggggagagggaggtagaggggagaaaccaggagggggaagaaaatgggagggggagagggagggaggggggagaaacccagagggagagagggagggaggggagagaaaccgggaggaagagagagagggagaggggagaaaatgggagggagagacagatggaaatgagacagagacagagatggattctcacacctttgaataagcttaaagcacctgcctgagagttttctgctaggggacccttgagcaaacaccctcaccccctatgggggaagggccaaccgggccaacctggagacttctggaatctggaatccactcccccaacaggaggcaccagcccatcattccacaatggttcctgagctgtgacggccttttttttttttttttttttttttttttcagaagttgcccaggctggagtgcaatggcgcaatctcggctcactacctctgcctcctgggttcaagtgattcttctgcctcagcctcccaaatagctgggattacaggcatgcgccagctaatttttgtatttttagtagagatggggtttcaccatatgggcc

SEQ ID NO: 8510 - DNA, 808 bp, Artificial sequence
  DNA replication origin
ctcccctctccctgctctccttctccccttctactcctcattctcttcccctctccccaccttctcccttggggcagccatgctctgcagaggccaaagcccctggaatgccactgcctagagatctggggccgagtcttgacctggaggattgggaacacttttttctcagcgtctccaggcactgggaagggatagtgcatagggcagatggggtcacagccccaggagcctggattctagtgggaaattgccaacctcagacattgaggagggggctggatctcaggagctccacagcccccgtggcaggtggcccctgaatgggacacagcagacagagcacgtgcccacccctgcggaagattccgctggatggtgccacagggatggcccagagtagggccgatgggtcggaccatgctgccatggggtcccaatggctctgcgcagaccaggggacagacaggagggagggccaggtgtggacagctgcccaggtcagacccgccaaggctcagaaccacgatgggggcaggagtggggtggggggtggagcccatggggttgctggtggctgatgtggtgtgtgagtaggaggtgtcattgatccgagcaggggtgggggccctctgccctctgagagacagggaagaagtggagaggagccggcttagggaggcagaactgagatttccaaggtgcttgtggcgtgtttgctggaggtgggtgcccccatggtcccagactccccaccttacagtcaccatgggcgtggaggaggagcttgctaagtgcggctgtccag

SEQ ID NO: 8511 - DNA, 807 bp, Artificial sequence
  DNA replication origin
ggccgatgggtcggaccatgctgccatggggtcccaatggctctgcgcagaccaggggacagacaggagggagggccaggtgtggacagctgcccaggtcagacccgccaaggctcagaaccacgatgggggcaggagtggggtggggggtggagcccatggggttgctggtggctgatgtggtgtgtgagtaggaggtgtcattgatccgagcaggggtgggggccctctgccctctgagagacagggaagaagtggagaggagccggcttagggaggcagaactgagatttccaaggtgcttgtggcgtgtttgctggaggtgggtgcccccatggtcccagactccccaccttacagtcaccatgggcgtggaggaggagcttgctaagtgcggctgtccaggtcctgtgcccgcaagttccaatgcagcaaccctctggggcggagcgctgaggggaggggttggaggtcacggtgacagggaggagagaccatctgtgcgcagtggtttctgtgccggcctggcctgcaggggacatgagtccacttgtccccaccactccacaggacaggcactcaccccgaaagaaacaggctgggagctaggcagtggtccaaggcctttataggggtggggcaaggttgagatctaaacccggggcttgggctccccaggagctcactgcccaggccttcggggtcaggtgtgtgggttggaggctggcaggtggagtacagtgccccacagacttcccagcccaggtcagaccaactgcccaacctccgtctgcccctccagacctg

SEQ ID NO: 8512 - DNA, 1421 bp, Artificial sequence
  DNA replication origin
gcaaaagcagcagccgctctaggaagggcagggcctcctcgggctgcttgaggtgcacgtggtgcctggccagcaggaagcaggcccgggcctcggcctgcaggctctggccacccaccgcccgccgcagcgccagctgcaggagctccccctccgcctcggtgctgcagatgtggtcaggcgtccccaggagcagggccatggctttgggcaccacctgtgcacacttctcccggttcttctgcttccggtaaatgctggccaggttggcgtacacagccaccactaggaacaggtccccgaagctgccctccagggcccccagcgcttcctcaaagtacacccgggcctgggacagcttgagcctcctgctgcacagccgccccaggaggaagcagagcctggccagggccatgaggaggccagctttcttggccgccccccgggcctgtgccaggcgcccagtcagctcctcctcgtcgctgaagctgcggaacacgctgctcagccacggcagcgccacatcgtacaggccacggaagctggccttgtacccaggggcgttcaggaacagcagcagtgagctcagggcctctgggtcctcccagtcgtcctcggcttccaagcagaaggagggctcctcggggtcctgcaagctcacgtcgctggatgccgcacagagaccccaggacgctggctcctgggggcagcctgggcaggtcttgcattgttccagaacattcttcaccttctgcaaggtctcctgtggctccaggctcaggcaaggtggaggtatttctgcaagtcacaaaaacacctagacagattagagtccagcagtgagtcctgggtccactgggggcagggtcccctcatccccagcctctgtgtccccggcgcagcactttccagacgataccaccctaccggcttgccatgagcccttgagaattatgtgcaatgcaaacccagggcctggagcacataggaactccggcactgtggggacagggaaaacacaggcccatggcccaactctcctatgaaatcaccctcctgtcctcctttgttgcccacctgacagcatggttttaggagactatgtgtcagctcagtgatccctcagagatgcctttccctttagaaagaatcaaagccttctaactgcacccaagtgtacgcagcactacgactacaaatgtaatttttgtcagcatactgggcccctcgatggggtacaggaatccatgaaatcctcaacagccagtcagagctactgatcagctcaaaagctgctatgcaaaattggtaaagctacccacagcagaggacagggatgttgtagccatgtacccagctccatgcagggaaatggaccatccctgcaggaaggatgggaaagcttccaggctcctgtgacc

SEQ ID NO: 8513 - DNA, 1871 bp, Artificial sequence
  DNA replication origin
tggtggccctggcctggctgcacgtgcttcatgggcagagcccggtggccctggacatcctgcagtctgtccgggatgcagtggtggccagcgaggaccaggagggcgtgattgccaacatggtggccgtggctctgaagaggacgggccggacgaggcaggcagctgagagctactaccgcgccctgcgggtggctcgggacctgggccagcaaaggaaccaggcagtggggctggccaacttcggggccctgtgcctgcatgcgggtgccagcaggctggcccagcactacctcctggaggccgtgcggctgttctcgaggctgccccttggggagtgtggccgggacttcacccacgtgctcctgcagctgggccatctctgcacccgccagggcccggcccagcagggcaagggctactacgagtgggcccttctggtcgccgtggagatgggccacgtggagagtgagtgccccagttccttctgtgtgccttccggggccactcgggtcagggcacacctggggtttgtgattcagacacaagcggtggtttttccaccatcgaaagtgctgagtcatggcaaacagcagatgttggcaagcgccctggagacaggcagttcccacgcagggccaggccctctctgccctactgggggagccagctcctcccggtttgcccagggaccatcctgccttgagcactgaaagtcctgcatgctgggaatccctgaagtctgggcaacgggcggtgggtcaccctagacataaccctggaagcgaggcaggctccgctgagctgggacttggggcccctccatgagccaggccctgaacgccggtgcttgtgcccatgttatctgcttgacatctcggcagccctgtgcacctgtcatcccacttcacagaggacgcaggggcgggtggttacccaaagccgcagaaaagtttatgcaaaagcagctcgttgtgcagagtgtgccacgtcccacccacaaatggggcttgtggggtccttgggtggcaggggctgagcatgggaaagtgagcttcaggccagagaagccacaaaagggtgagtggtgtgatggcggggcagctcttggccccgggttagggaagcctctttagtctggggccagagggttgagaagatttagtcaagtaatacgtggtgggtgaggggctggtggtgtagcctgtgtgaaggcccaggggtgagcgagtaggggtgagtgagtgggggtgtgatgggggtgagtgagcagggggtgagtgagtgggggtgtgatgggggtgagcagggggtgagtgagcgggggtgtgagcgggtgagcggggatgagtggggtgtaagtgggggtgagtgagcagggcctatgcagggaggtgcagagttgggcgtgggttggttgggtgctggatggtgagaagctctgctggagagctaagcagggcctggggcctcaggctgtggcttggccttttccctaagggcactggggagccatctgcccaaggaggagtgggggggttcagacccaggcttcttccccagggccattctctgactgcaaggagaccctccagaaacccggcaccccagcccccacagcagcctccggtgggtcctggcacaatagcctgtggcacctcctacgaggccctccccggggtgctgggggattcagacttggaaacgcaggccagggaacgaggatcatgcttccctgtctccccaccccgcgttgaacagtcgaggagaccgggggccaggggacgaggatcatgcttccctgtctccccaccccgcgttgaacagtcgaggagaccgggggccaggggacgaggatcatgcttccctgt

SEQ ID NO: 8514 - DNA, 1159 bp, Artificial sequence
  DNA replication origin
gacatctgtgaatcctgccaccagggctagccctagcccactccccctgcactcaaaccagcctccatggcccccagattgctgggagcccatcccctggctcctttctgagttgccacatccctgccacagctcaggaccccacatcaacagtgtttgtgggtgggctggtcccctcttggccatgagctcttgatccttctcctcagctcaaggaagtatacagcaggtgctcaaaaacaaaagcttcaccaggctcttgggcttcccagtttgttccagatcacactgtgtttgggaaagcctctggaaactgctgctatgacagatgcattttgtaaggagatttgccacatgtcgcttggagcaagttcttctgtatgttaactgagaggccacattatttgagcatgtgctgtataccagcaggtgctgggcactgtgaggggctgtgcctctgccctcagggagaagatgctggccattgggggaggatatgagggaaccagtgggagagaggggaaaggcatacaacaggtgctcagcagtggcttaggaatgagtggatggatggataaatggatgagcagatgtataggtacatggatggatggatggatggatgggtggatggatggataaatggatgagcagatgtataggtgggtggatggatggatggacggacggatggacagatgaatggatggatgggtggatggatggatggatgggttgaatgatgtgtgtatgtatgggtgggtggataatgtatggatggatgggtggagggtggatgatgtatgtatgtacatatggatggatagatgggtggatagacgaatgtatggataaacaaatggacagacagacgaatggagggatggattaatgggtagatgggtgggtggatggatgaatgatggatggataaatggatgggtggacaaacaggtgaatggatggatgggtgaatggatggatgatggaaggatggtggatggtggatggatgaatggatggatgatggatggatggatgatggaaggatggatggatggatgaatggataaatggatggatgatggaaggatcaacaggtgaatggatggatgatggaatgatggatgaataaatggatggatgataaaaggatgga

SEQ ID NO: 8515 - DNA, 922 bp, Artificial sequence
  DNA replication origin
ttctccccaggcacctcctccacatgggggtcacccaagggacctctctaagacccaagcttggcccattcccctttaccatctcaagatggctcccagggccaaggacaaagtctaagatgcagcagcccatgccctcacggccccgccccacacacagggcaggggtgcgagaagggcccgagtcacatcactgctcatccaacgccccccagccccaccgaacactggactctgtgccgggtgcatggctgagcctaacgtccctgctcctctgggggacctgggagtgaacactgatcacacagggtggccagggctgtggcagaggcaagcccaggagcctgtgggggcccaggaggccccagactcagcctggggtgggaggcaagggcttcctgaagcgggtggcatcccaactaaacaggaaggagccagccaaagcatatgtgtctctgtgtgcatgtgcctgtgtccgtgtatgcctgtgtgtgtgcacgtgcctgtgtgcgtgtgcctctgtgcatttgcgtgtgcatgtgcctgtgtgtgtgcatgtctgtgtgtgtgcctgtgtgcatgtgcctgggtgcatttgcgtgtgcctgtgtgtgcctatgtgtgcatatgcctgtgtgcatctgcgtgtgcgtgtccgtgtgtgtgcatgtgcctgtgtatttgtgcatgtgcctgtgtgtacatggggcctgtgcctgtgtgtgcgtgtgcctgtgtgcatttgcgtgtgcgtgtccatgtgtgcatgtgtctctgtgcctgtgcctgtgtgtgctcatgtgtgcatgtccatgtgtgtgcatgtgtctctgtgtgtgtgtgtgtgtccctgtgcgtgcagcgtgcatgtgcatttgcatgtgcctgtagtgcgtgcagcagctagtgggtggcaggctga

SEQ ID NO: 8516 - DNA, 838 bp, Artificial sequence
  DNA replication origin
gggctctgcctgccccttccccacagctgcaccttcccggcagtgcctgtcctgtgggctgcatgaggcctgacgagcagcctgggtcagcaggggctggtgggagtcagtgcagggacggagccgagggtctgggaggcgggatcacctgctcagggtcacagcgggatggcagaagggcggggctgaccctggggccctggactcctgccggagtgcccgtaaccctgggccctgttgccctggactggatgcaggtttggctggaattctcttcccaggcccagctgtgggtgctgctggtggcattgaccatgccacccgccagcacttgcatgtcctaaacgtcccactgctgggaataggcgtggcagggacaggccaggacagagggaaggcctcgaatcgctctttctggccaagtgtggggcagcagcgggtggtgaaagcgggggtgggtgggctagagtggggtcaggcccagggtgcaggccctggcaaaggtttggatgtgacaccaagtgtggcaggggtgctgggggctgcatgggtggagaggcaaggacggggtggggagcagctggggtcgagagaggaggtggccccgccagggttgtgtccgcagagggcacttttgtggcatctggatgtgcagagacattgtccccttaatcttcaatatctccgtatggatatgtacgatgacaaacccttcaagaggtgacactcagcggctgtggaggagcccctgggcaggcccggagggtggacaagagtgtgttcctgcttcctgcagggctgcggtatgctccctccagctgtggcaaggacccctata

SEQ ID NO: 8517 - DNA, 1439 bp, Artificial sequence
  DNA replication origin
ggacaccgcgacacgtcgcagcgcgcgggacacggcgccgcagggggctcccgggccagcgccagcgcggccaacgcggccaggagcagcgctcgcgcctgcatggcggcagggccggcggcgggtggcagcgcgggagaccgggcgggggccggcggggacaacgaggccgctgcggggccgggcgccgggcgcctacggatgggactggggcggacgcgcggtcacatgcgccggtggctcaggctggcgggcgtcagggcggcaggggcatccccagggcgcagggagcgcagggaccagctccctccagcctgacggtccgcgggcggcgggtcccgcgcctttaaaggcgaccgcccagcccgccctcgctggaaggggcggcccggcccctccgccagccccgcccaggccccgacagggccccgcctggccttccgggcctggacccacccggcaggccttgggactctggtcggcctggtcgagaaaacccgaggctacagacacgcaggggtcctttctggtggggacccccgggcccagcctatcccagaaacgttgggggatgcgttctccccgctctggaggggtctgtccgtgtccagtctcctctgtgcctcagtttcctcctccaggaaaggggaattgacagcatttctcaacctcatagggtcgttggaagaaccacagaggccatggctgagcagtgttcccgagtcctcgctgtccacggaaccggaagctgtttccattctcatcattgctcctgcattttctgcagggccccttcagacccaggtcccatcacgagagtcagaatctggtgacagtgcgtcagctgatggggtgaaggctgcggagttgtgagagaaggcagaaccccccttggaggtgaatgtcaagcctgaagaggaaggatgggaagcgggagctggccgtgacctgggcagaggctcccaagcaaaagcaggtcggggcagcaggagataacgccgcgcgcacagcctggagctgcggtcttcacactgtgtgtgttcctagtaccctgggctgcctggcgaagcctgggtgtccttttcagaacgatgtcgtcaagtagatttaaacgcataaaacaaagaccatggggtcacaaaggggaacaattctatcaaaacacagttatcaaaatacatgaaacaattcatgacagcgtggcctatgggcttctttatcagcatgttaatggcaggttctggtcggtctgtcgtctgataccagtggacacttcgcagcagccctgtgcagagggctgccactggagacaccttcggtgagggcggtaacatggggatgtaaacactgcttctgctggccgtggagccacaggccctgctggctggggtcaactgcacccccaaaggaatgaatgctggacttcagttggagttgtt

SEQ ID NO: 8518 - DNA, 1547 bp, Artificial sequence
  DNA replication origin
tcccatccgtaggcgcccggcgcccggccccgcagcggcctcgttgtccccgccggcccccgcccggtctcccgcgctgccacccgccgccggccctgccgccatgcaggcgcgagcgctgctcctggccgcgttggccgcgctggcgctggcccgggagccccctgcggcgccgtgtcccgcgcgctgcgacgtgtcgcggtgtcccagcccccgctgccccggcggctacgtgcccgacctctgcaactgctgcctggtgtgcgccgccagcgagggcgagccctgtggcggccctctggactcgccttgcggcgagagcctggagtgcgtgcgcggcctatgccgctgccgctggtcgcacgccgtgtgtggcaccgacgggcacacctatgccaacgtgtgcgcgctgcaggcggccagccgccgcgcgctgcagctctccgggacgcccgtgcgccagctgcagaagggcgcctgcccgttgggtaagcgctcgggggccagggaggaagtgaagcttctttctcttggggaaactaaggccgggagttagggccgagctcgaggtcgcccttccctgggcaccaccgggtggcccttcagaaatcatcccaccagccctctggtctttcagatgaagaaactgaggcccggaaaggtaaaccgctgtccccaaggtcacagaattagagtcaaaagggaaacccggtggtctcctggccacccgaggggcctcatctaggactgtttccagctctggtctcttcagaactgatgtctcgtgcccattcccttgatccttggacccctgctctgtccgggtattgagtgaagggcactctttcctgccctaactctccagccggggtgccctcttgggtgatgccttctttcctggagactgtggttaagtgcatgtctccacaggactgtgtgggaagggtcagggtgcaggtccctgaactgcttagggcgccccagggagaggctgcttgggggagagaatgtcggggtcagaccctagaacagcctcccttgaggcagtcggctctaggttgcatctcaccgtgcaggttgactctgtacgtggaggaaaatgctggaaaacctgctgtacctttttccctgtttggggtgcctcttaggaaagcagactctgctgtggccggacaggggttcactgaagacaggcgacgggccccaggttcatggataggagtcagggtcctgcgtgccatcagcttgcaggtggcagggagagatgcagtagctgccagaacaggctccgtggagcctcaggagcaccatggggagcaccaactgccggggctcctgggaagcctgcagagggcttcctcattttttctgcggtccgctgaacacaattccaagtgttttcatggtgtaaaaaggttggggaactgagcgctctattcctgtagtggagactcacaggctcaatctatcagaggttctgagaaaacctgcagtgtcctcaattgatgaaacccagggcttccccagagaatttcaacagagagctc

SEQ ID NO: 8519 - DNA, 1153 bp, Artificial sequence
  DNA replication origin
tcatctacagaggccacgcactggcccaggcccctgcccggcgaggcttcgagcctggaggagatggggatcacgcagagaaattgacccacagtcacatctgtgtgcagggcccaccggagaccctgggtgtgctcaccaagcaatgaaggatgacctgggcacagtggccagggcaggtggctcaggggcggtgggacatccgggtgaaggcaggatgaggaacccaccacgctaaggcaagggaaggaaacgccgggcagtgggcacattgcgtgcaaaggcctcgaggtgggaaagagaccggtgaggccatgaggccagagcacaggggatgaggggacagtgggagacggcaccgagggtgatgcgggccaggtggcaggcacagggccctgtgagtcaaggtaagtgctggggtgccttgcaaggaagcctgcaggtcatgggcaggacagattgaccaaggtgatcctggctgctgtgtgagaagtgatggaagggaggatggagggggaagtcagagcgccccaggagatgttttgtggatgagctgaggggactcccggtgcacaggagaatgaggggtggaggggagtgagaggcagagaggaatgaggggtggagaggagtaagggcccccatccacacagctgggctgcaatgggcaggcccaggaaaggtacccccacaccaagtcccaaactgatgagccactgtgacagtgcagcaggcattgaggggagtgaggggaagaggggaatgaggggcggagggacggaggggatcgaggctccccactgaacatcgtggtgctcctttcagtggggctgggaagagtagagcccgaggcggctcagcaggcatctccacgtgactctaactcaggagagacccgggggctggagatagggcccgaagtcccagcacctggggaggacttcatggcagatgagcttactggggcgggggtgcgggggggagggtggcgagaagggaccaaggagaccttcctgcctagagggtgggagaaggcggaggagctgacatggggaggggagaggagagcacaaggaacctcagcccacaggaggctgccctcatcaggcaggacttcctcccagaaatgcccggcagcgcctggcacaccact

SEQ ID NO: 8520 - DNA, 733 bp, Artificial sequence
  DNA replication origin
ggatggatggatggatggatggatggatggatggatggatggatggatggatggatggatggatggatggatggatggatggatggatggatggatggatggatggatggacggacggacggacggatagaaggaaagaaacacctgacaactaaagagcagcccaaatgagaggagcccagggagtccaggaagctgatggtgggagctgagctcggagattccccagccaaaaggagacagccttggaggggcaggggatgaagccgatcacgaatcgatgataggcagggggaagatcctgaaagaggctgaggataagctgtcctgggggtctcacagctttggggtgggcagacaggacctgtccagtagtgagcaaagttcacccagcacctccggtgggccttggtcccagggctggggtgttaaggggctgtagccctgggagagtgccccctgcctctggccccctccaggtgagctctttacctttgatctgcttgtcttggaactctgtgaggaaccgtgtgatgcggtctgaggggatggcaaaggagatgccagccgtgaccttgagcgtgttgatgccaatgacctcgccatcctgggcagggaggtaagagcaggcatcagttgggggaacccaggcaaacccctgcccacaaagcactgtgtccacagctctgtttctagaggctgaccccagctgtcaatccccctacagccccca

SEQ ID NO: 8521 - DNA, 698 bp, Artificial sequence
  DNA replication origin
acgcggggcccagccagtgcctccaggagggcagaccctgcctcccactgctcacccgtgggtcacacatcttccttccagagtccctgcctgctccctctggggtgagtgggttcagaatggatgagcacagttggaaatttcagaatgggtcagagttgaaggagaaggggagtgcccggggctgtcacccacacctgcttcattcctactgaccattccctctatcatgggccgaagaatggcccccaaaggcatccatgtcatgatcctcggagccctggaatgtcttatatggcaaaagggacttagcacatgtgatcaaggcagactctaaagtggggacatgatcctgattgtagggtgggcctgatgtgacacaagggtacttataagagggacacagaaaggttcagcagaagttagaaagtgggatgatggagtgacaggtgggggctctgtggggagtggctgagaatgcagaggacttccagaagctggaaaggcaaggaaagacaggaaatagtcccttcagagcccacagaaggagccaccccactgactccttgactttagcccagacaaactgattgtagactctggcttctaggactgtgagagaaggagcgtgtgctgtcttagtcggtgaggttcatggtcatttgttaacagcagccgcaggaaccacatccactctt

SEQ ID NO: 8522 - DNA, 1037 bp, Artificial sequence
  DNA replication origin
ccagggatcacctcgcaacaaaccactcacacctgaatacttgattcaggcccggcttggggccctggccctagacagcgtgctcacacgctagacaaatgctcacacgtgtgtgcctggctctcagctcccgccaggtcttctttacccaagattccacaacatttattctgcacacctgtcggcccacaacaagactagcattactgttgagcctaaggaggaagagggtcccgggtggtgatacaacctgcagggtaagccaatggtgggcaggaggagagatggtgaaggggctgagaagaatgcagggggcctggtcacggccgggggtgggaggcctcatcccaggcgggcctggttgcagggcggggcattgcaggaggcctggctgcagggaggagactgtctcagggggccctggttgcagcagggggccctggttgcagcagggggccctggttgcaacagggggccctggttgcagcagggatcggggggtgtcacaggaggcctggttgcagggagggggccgtcacaggtgtcctggttgcagaggtgctggctacagcagggcgtagtcgcaggagttctggtcacaggggggcctggtcctggaatgacagaaggaagccaggcatgaggagaaggagctgggcaggtgcctgggccggatgaggcctggctggggatgcatgaatcctgggcactgactgtggaggggactctaaaactagccggcccatgaagctgagccgaggaagaaatttacccaaagtgtctcaagcccctcactgtctccgggtctccggtgggcctgaggcagggtgaggaaggccgcatctggaggtgggggagggtgggggcacacacagcaaggagcattccttggtctctgagtcagcatcggagcagggctgaactggagggaaggcggagccacagcacagatgcaaagggaaatgtttggaaagactcggtaaccttgcaatcacgtttcgggtcacgaactctctaaaagcaggctttgcttcatt

SEQ ID NO: 8523 - DNA, 1133 bp, Artificial sequence
  DNA replication origin
acctcccgctgcctggctctcaggaggccggggaacccgaggcagtgtgccaggagaggtggcacctaagagggcctttggaaatcttctggctctcccacggttctgtatatggggaaactgaggcccagaaagagccaggaacgtgattcccatcatacagcaaggacctgagccccagccctgcatccagtgcctcttgccaacgagagggttctgacgacaagtgtgctcggccacacgccagagcaaagtccagggccggccggcgaggtagcacgcgtgtcacagcgggacgtgtcaggactgtcctctaaacagtgatcccaaacacgccagccagcccgagcggcgccgaccacgggcgcgcgggagcagggctgtgcgcaagcagggctgtgcggcgtgctctgggtttgccgccctgccgtgggtgtgcagggtggacgcagaggccgatggctgttaaaggggcacaggaagaagccagcccccttcagggacggacggggaagctcagcgaggcaggggctcctcagaagggaaaagacgcacaaaaagggccgtgtgtccttcagccaggggtagacgccgcgctgagcgaagccctcaacaggcggaacttcttgcacccaacaagacatccgcagggtgtccacctgcccaggacacctgtgaatgttgggtggatcctgccaaacagtcctccaaagcactcattccagttcccactcccagcagctgcaccctccccaagctccctcgccccaggatctcaccggcacttggtatgttccatccgcttcacttcatcctttccggtgggcgcgcaggaggatctcgaggggttttaatttgcatgccctgatggctgacagagccgagcatcttcccaagttaattggctgtgggacgctttcctttgtgaaatgcctgcccaactccctctgtttgaaatcagggtgatttggttccaccgcccatgcctcttccctgcccaggctgacgccacctctgcaaaaagggactcggcccatttgtgttctgtccacctaaagattgcaagatggatccttgaacctctgaagctcctggggcagggcgtggaagagcgattccaactcaaggcaaat

SEQ ID NO: 8524 - DNA, 813 bp, Artificial sequence
  DNA replication origin
gggaagggctgggtggttgggagggggactgggtagatgtgggggagggtcaggaggcatgaagggtgaacactgggttaaaatgggggaagcgtctgggagaagttggggaggggtctcgggagggtgaggtaggtggggaggggctggaaggctggcgctgatggacggcggccaccacagccctcttgtgcctctgaagctcattatcttagagtttcaaggtcacgtcaggcaagtgtggagcccaggtgggggctggagtttgtggaaaccagcctggtcttggagcacatcagggaaaggaaatcactgcccggcggccggcccgggggcgcttctccagcctggcttcaggaagaccgtgagcaaacacagaccagacggggctgaggccagcagctgggcagggagccacgctggcctcatgctgtccccacaaagggctcctgtcccctgggctggggatggtgtcacagcttcctgagcagtgtcgtctcggctcccggaactcctggtaggtgggccaggcctggggtgggatgcctgggctgggggtaggggagcagcatccccagagctgttatcctcttcatcattgtggctgcagagaggggaactgaggcagggcctaaaaccgaggtcactacagagatgccaccagaaccgcaagcctctgcctttctgccccgtgcactttctgtgatggttagggttagggttagggttagggttcatgttagggttagggtaggcttacctcactgcagagccagagaacacacccccgtaggggagctgagggaggtctga

SEQ ID NO: 8525 - DNA, 974 bp, Artificial sequence
  DNA replication origin
ctcagttgcggggccagggggcagggatggggtcaaacccctctgtgactcacagccaggggacctcaggcatgggacatgagcattgacacgccgagtccctctagcagaagacagacacagccccataagcagtggggtgctggaaggcacccagtggacctgtgagcatcgctcctcgagggcatcatcaggtgggagggagacacaaggtcagtgatgaggccagcaagggcagcactacagtgcctgggggcactgcctcagctggaggccagagaaggcctctccaaggcagcaatagtcagcttatactgaaagaatggaaggcactccaggcagcccgagcagcaggcacaaggccctggggtgggcatgggcctggcgcgacagacggggaggccagtaaggctagatctggtgggcaggaggggagcgtggggtgaagggccttggaaggattcagtggctgtgtggggctggggcgtggcaggcagtcgaggaggctggtggaggctccctcaggggggcggcctgaccccatctgctatgaaggaatcattatggaacatggggggcaggaggagagctgaggagccacagggaggcggttgggggaaagcggggcaggggagagtaaccccggtgacaaccatggatggtcagaggggacagaggggcctggggattccaggacagggatgggggaagaggcctgcagggccaggagcatggtcagatgggggtaagacctgggaccggggaggccggggggagtgggaggagggcagaggtcacagtgtgtggacctccaacctctgcctgtgcaggcgggcagtgccaccaccccatctcgggaggaaaaggcaggcaggggatgggcaagtcccctgcaaccacagagccagcatggggaagcaccagagtgagacagtcctgacttgtcccgggccctccccaagaagctcctccat

SEQ ID NO: 8526 - DNA, 1696 bp, Artificial sequence
  DNA replication origin
tgtccccaaaatcagacacgccgaaagctgctgaattctagtccaggcaactcccgcaagaagtccactccaggtagaaatctataatcacagaaacaaggcacactggcctcaggtaactatgatgctgtgataaatacatatttggccttgtccctgcttcccagcacacgactcctaaaaccctggactctctgcagtggtgacagtcttttgtgtgctcatgagatggttgcagacccctaaatagcttcaggatgaagaccaaggtacaattaggggattgatcagaggcacaggccacaacctggacttgccattggcatccaaagggttggggagcttcttgtgggactgagccctcactggggggggggggtggggggggggtgggggcggtctgaggctcaccccaggtgaacagcatcagtatggagttaaattagaggacgcccagctgctttctgctgcagagctgcctgctggtggggagaaacccacacacatctaatgtcagaagcgttgtgatggctgcatgacagtaggaaaaacactttggttttgtcctgtaaccttacaatgaaaaaaatctctctggtctgcaacagctcaaacgtcaggtcaactgaaaaataagaacatgagcaacaaaagaaaaaaacgtaaaactggacttcatcgaaattgaaaaactttgtgcatcaaatcaaccagatggtctcagaggcctgcagctcctgtggccaggagccttggccaggccctctcagctgtgtcactgggggacattgggctggatgtttctttctaaggcaagggtggggctgtctgtgcactgtgggcagggctgtctgcaccgtgggaggggctgcgggatacactgtgggtggggctgcctatgcaccctggaaggggctgtgggatataccataggcggggctgtctgcactgtgggcaggactgtctgcactgtgggtggagctgtctgtgcactgcgggtgggcctgtaggatacactgtggggagggctgtgggatacactttgggcgggcctgtctgtgcactgtgggcagggctatctgtactgtgggtggggctgtctgtgcactgtgggcagggctgtctgtgcactgtgggcaggactgtctgcactgtgggcagagctgtctgtgtgctgcgggtagggctgtaggatacaccgtgggcggggctgtgggatacactttgggcaggcctgtctgtgcaccgtgggcagggctatctgtactgtgggtggagctgtctgtgcactgtgggcaggactgtctgcactgtgggcagagctgtctgtgcgctgctggtggggctgtaggatacactgtgggcggggctgtaggaatacactgtgggcggagctgtctgtgcactgtgggcgcggctgtctgtgcactgtgggcagggttgtgggatgcactgtggacggggctatctgcattgtgggcagggctgtggaatgcactgtgggcggggctgtttgcactgtgggcggggctatgggatgcactggggtcctgggcagtgtccctggtccactcaccagatgccagaagcatgccccacccttgttatgacaaaaatgactccagacattaccagtgcttcctgggggtaaacactgcccccactgagggccaccccagcgtcctacctgcacgat

SEQ ID NO: 8527 - DNA, 1748 bp, Artificial sequence
  DNA replication origin
ttgcccagaataagaaaaaaaaaacattaaagcaagaggcctgtccacatacacttgtgtagaaatacccactgagattcatcacactgaaaagtggggcccaggagatcaggcattggaggacaaagcctgtgcccaccatgaactttatggggaattgatcgtggtttggatttgtgtgtaatttgagtgcagtgaagaagccctcattctgtaaaatttattgccttgtttacctggctgcctatgcgtagtggattcataaaccgttctcatggcccgtggtttctacggtgggccccatggagacaacatgctccctgccctctgccctttgtggctgtccctctgcgaagagcctgccttgtccatttccgccaccgcagtctgactcctcgggtccttgccatcctcttgacctctctggtacctgcattgtggctgctgcctgggagttctggtgtggtgcagtgagacgggccacagatggatgccctggggctgtcagtgctgtggaggggcacggggtgcagtgagacgggccacagatggatgccctggggctgtcagtgctgtggaggggtggaggggtggagggagatgggccacagatggatgccttggggctgtcagtgctgtggaggggcgcagaggtgcagtgagacgggacacagatggatgccctggggctgtcagtgcatggaggggtgcatggagggttgcggggtggagggagatgggccacagatggatgccctggggctgtcagtgctgtggaggggcgcaggggttcagtgagacgggccacagatggatgccctggggctgtcagtgctgtggaggggcacaggggtggagggagatgggccacagatggatgccctggggctgtcggtgctgtggaggggcgcaggggtgcagtgagacgggacacggatgccctggggctgtcagtgctgtggaggggtgcggggtggagggagatgggccacagatggatgccctggggctgtcagtactatggaggggtgcaggggtggagggagatgggccacagatggatgccgtggggctgtcagtgctgtggaggggcgcaggggtgcagtgagatgggccacagatggatgccctggggctgtcagtgctgaggaggggtgcggggtggagggagataggccacagatggatgccctggggctgtcagtgctgtggaggggtgcaggggtgcagtgagacaggccacagatggatgccctggggctgtcagtgctgtggaggggtgcgggttggagggagatgggccacagatggatgccctggggctctcagtgctgtggaggggcacaggggtggagggagatgggccacagatggatgccctagggctatcagtgctgtggaggggcgcagggcagcgagggaggatggggagggtcctcacccaccctgttctgttccctggccctgcctccctgccaccacatgactctccttggcctccgcttgtccctgaggcctaggtctccctgccagtctttcctcacccgccttccaccctcccccattggcagtggtcagggaggactgttgtgtggcaggaagtgaagctctgcacctgcggatgtgctcaaccagtcatccatccatcattctttcatccatccattcattcttccatctgtccattcattcttccatccatccattcatccttccatccatccattcattctctcatccatccattc

SEQ ID NO: 8528 - DNA, 907 bp, Artificial sequence
  DNA replication origin
gactttacacattgaactaggcagctgttcacgaaagggaagtgattcacatcgcagagaagactggaggcagctgttgccagaatagtgatcttgaagccccacttccttgccagaaactgctccaagcgtctcatgtgaatgacagaagcctagacggtagaccctgggcactaggcaggcgtcactgtatttggatgacagtagcctcagacagtagaccctgggcactaggcagacatcaccatatttggaatgcagcagcctagacagtagaccctgggcactagccaggtgtcgccgtatttggaatgcagcagcccagacagtagaccttgtctagacactgggccctagcaaggcattgttactggccggtctttgctcccagggtggtggcaggccggtcccaatggcagcaaggctcttgctctctgacctggggttcttggcctcatggattccaaggaatggaaccttgggccatgcggtgagtgttatagctctattagaagctgtgggtcacggaagagaactgtggaacccagcgactagtgttcacctcaattaggatgaacccaggcacttagctgtgcgggaacaatggcgagtctctagcccgggagcagcaaccggtgcctcgctggatcagaagcgcagtggacaccctgctggatctggaggggggtggaagtcagcggggcgtctgcgacagcagccatcagcagtggtggatggcaagcaaaagctcagctcaaaccggaacaaacatggaccagaaaagtgtgcagttgcaagatttaatatcgtgaaaacagagctcccatgcaacgggaggggacccaaagagggttgcccgattcggcttgaatgcctgggtttatatcctgatcattgtccctccccc

SEQ ID NO: 8529 - DNA, 915 bp, Artificial sequence
  DNA replication origin
gaactgcatctcagaactacggcgctccgagagggcagcgactcgccagagtcggtcagccaggccttgcctaaaagcagagaaggcaagagtgcccgggagcgcctggcgaagcttcgtggcttccagcccgcccgggtggcagcggcgtccgcgtttccagggcaacgagggtggcgcggttcgatgacgtcagggcgcccgcggctccgccccgcccatgggacggacggaggccgagaggcgtggcgggggagcagtggggccaggccagagacagctgcgctgtgcgggcagctagtcccagtactccgagtcggtcgcgggccgacaggcatcccctgagcgcctgctgggtgagttggacggtgcagagcagcgaggaccggggagcccgaaggtggaggctgcgttagcgccaggggcgcggacgcgacggggcgggagcgggggcactgaaagtgccaggcccgggggtgtgggggctgtgaggattcgcgggcgggggggccagggttacccagagcaggggccaggagggccggtggcccacgtgctgggcattcggaggactttacacattgaactaggcagctgttcacgaaagggaagtgattcacatcgcagagaagactggaggcagctgttgccagaatagtgatcttgaagccccacttccttgccagaaactgctccaagcgtctcatgtgaatgacagaagcctagacggtagaccctgggcactaggcaggcgtcactgtatttggatgacagtagcctcagacagtagaccctgggcactaggcagacatcaccatatttggaatgcagcagcctagacagtagaccctgggcactagccaggtgtcgccgtatttggaatgcagcagcccagacagtagaccttgtctagac

SEQ ID NO: 8530 - DNA, 1472 bp, Artificial sequence
  DNA replication origin
gggaataaaacacaggtcaaattcctcacccacacactccacagttcaacccctgccagggaaaccaaaagcaggaaaggatctccagcggcgccattctcatttccggtcccagcaccccgcctccatgacgtcaacgcgccgcgccaccgggctgcgtcatctcggcgcgccgctgccagggctgtacacctgctggctgccatggctgaggtgggccgtaccgggatcagctacccaggcgcgcttctcccacagggcttctgggctgcggtcgaagtgtggctggagaggccgcaggtggcaaacaaacggctttgcggcgcccgcctggaggcccgctggagcgccgccctgccctgcgcggaggcccgcggccccgggactagcgcaggctcggagcagaaggagcggggtccgggacccggccagggttcccccggagggggcccgggtcccaggtcgctatcaggacccgagcagggcacggcatgttgcgaacttgaggaggcccagggccagtgccagcaagaggaggcacagagggaagccgcctcagtgcccctgagggactccgggcaccccggccatgctgaaggaagggagggcgacttccccgccgcagatctggattcgctttgggaggatttctcccaaagtctcgcccgtggcaattcggagttgctggccttcctcaccagctccggggcgggatcgcagccagaggcgcagcgtgagctcgacgtggttctcagaaccgtcatcccgaaaactagcccacattgcccccttacaactcccaggagggaaatagtcgtgcaaggtaagagtgttttgatagtggacggatatgattagataaaaaagcattcatagaacctcgggtcaatgaaaaagtcctaagggtactagttcctctgcgatgtcctagggaggttgttaggtgtttcatagttttttgagtgggcgcatagaaatgtgtgtccttagtacagaagatgggataattgattggggtggtgtctggaaggcttcaaagagacagtgaaggactagctggatattgcgtaatacctaggagtttagcaggtaaagctgtaggtgtaaaagtgttggggaccagcctcaacaccacccgtagggtactcaaagtccggtggcgacgaaggaatgagacgagacaggttaagagtgcataaagattgggggccagggggccaattgcaaaatggaggctgccaaagcctgggagctctggtctccacactattgagtacaatcacttagatctaagaagcggacgttcggggcgaaagggtgaaagggagacagtgcatcatacatgtcatctatagcagtggcggtttaaatgaatctcctttgtgctcaaacagcgttatctttaacttgtcggagaataaccagtgggagcgtgcttaactaggagcctgcatgtctgaccacattgtagt

SEQ ID NO: 8531 - DNA, 1234 bp, Artificial sequence
  DNA replication origin
atagacggccttctgactttttagggtctagggctgtaaagcgtctcggggttgctgccaaacgagccgtgaactgggctgggtttttatatttgatgaaaaagagcctaaacgctatctgatttgggataaagaaaaaggagcattaaccttgactatgcctttagctccagccacctttttaagagtaaattgctgggcagatgggggagggctactcacggaatgaaactgtaaaccggacggggtgtgaggaggggaggtgataaaaggattatagggtggaggagtggaggctgaggaagaattgggacctagctcagcccggcgaggagcagcccagggaggaggggagaggtcagatgggtctgtagaaaaggaagattagaaagactcagtgacgcttggggttgggactgaggggacaggcgggagggaaagaaggaaggtttgggacgagttgcactgggcacagagactaggaagggactgatgtgtaaaagaatgcctggacgtcaggcacatcagactgtttgctattttatgacaagaattatttagatcttgcaggatggaaaaattgaaagtgccattttctggctatttggaactactgtcgagtttgtattggggtcaagcggcattgcagaagaaaataaggcatttaggttttatgtcaggtgtgagctgaagaggttttaagttcttgagagcacaggctaagggagatggaggaatggagggtggaaggttgcccgtagtgaaggaggaaagcccagagaaaagagagagtagagacaaggagggaaggggttcgggggttcttaccctccagaaaagcgggaaaggggtcggatcgtggaaataaggggttgaggtgcagagataagaggtcggggcatggaaataagggatggggcgcagagataagaggtcggggtgcagaaataagggattggggtgtagaggtaagaggtcgggccatggaaataagggatcggggtgcagagataagaggttggggcatggaaataagggattggggtacagagataagaggtcggggcgtggaaataagggattgggggttcttgccccctagaaaagcgggacttaccactaagcgtgaaggagaaggggttgaggggttcttgcccctgcctcagaaaagcaaaaaaggggtagagacatggagagaaggggttggggtacttacccctcccccagaaaagca

SEQ ID NO: 8532 - DNA, 765 bp, Artificial sequence
  DNA replication origin
ttcagccccagggagctcagggactggggtggtgaggcagacggggctggcactggcagggcagggctgccaccatggagtgcagtttgcaggtgcagccagggtgcctgggttgtgacaggggcaagagcaagggtttggagcagacccttgagaccccaggaagagctctgccaagcttcagtgccctcttccccacagggaggatgaagggaacttcctcccgggtggaagagatgagctattgaaggtggatacagacttggcgcaggtccacacccaaggattggcaggacctgtgcacactacagactcggcacaggtccacacccaaggaatggcaggagctccgtacacgctgggggtcagcatggagcccaggtctggacacaatgagtggggcggggcaggagctgctggctgaaaagctggagctggcacagctccaggggaggagggcagcagcgcaggcccgggaggaagagggaaggcagtaaagctggcgcgggtacctggcggggaagggagcaggcacgggcagaggggattccctgccttagtgaatgggggccattgctcagccctgcaggagcgcaggagacttaggtgggccatggggaaagccgaggaggtggggacatgagcagcatggaaatggtgctgaatctcaggctgaggggcttacaccatgccatgtccattccatgcagtgcagacccctgatgcagcccctgccccgccctgagaccctcccagcagccacca

SEQ ID NO: 8533 - DNA, 989 bp, Artificial sequence
  DNA replication origin
cccagctgaccctcactgcccttccacgagtcccagcactgtccctggcccattcttcatcactgccgcctctcagtgggaaagccagccaaattctgtgccaagccaggaagccagtcctggggacagggtgggcgagctaacaggtaggtggcaccaaacatgccctgcctaatcagtgcccccccaccgccccccaagcacacctgaaccagctcccagggtcctcaggcaggtgctgggtcacagcaatgatcaaggaggggtggcctctggggtggacagacagacagacccgggcacagggaggtgagggatcaggaggggcagatgggaggcccccagcccaaccttgagcactggggtgagctctcaatggttggggcctgtgccgagagctgtgggccagggtgggagctgggagcaggctggaggagtgaccgtggcagagggagcggcaggggtgccaaacactgctgtggtgggctgggggcagctcgaagcctcttgttggagctggattcccaaagcagcgggtcagcgggggcagatgctttaaagggtcctgtgctgagcggagggtgtgtgggaggggcacaggtgtcccagagctggggaagggctgccccacttgtcccgaggagaggacgccaagggcccgagcccggatgtggcagggaaggaggctcacagcacccacttcacagatgagaaaactgaggctgccaatggcccccgcccattttggctgccttgtgatcatgttggctctggggtaagtaacctctctttccacatgccatgaagggttggcactctgagtaccttcttcttttcactaaaaattccctcccagaacccactttccgcttgttcacaggacccgctggcggggcctcccaccacagtgaggagccacgagggtcccctagttggatgctcaggtcacactgccctcggactttctgcacaaaatgctcaggcccctc

SEQ ID NO: 8534 - DNA, 734 bp, Artificial sequence
  DNA replication origin
agggaggaaatgtggagggaagagagagacagagaaaaggagagagagaaaaggggagggagggagagagggagggagggagggagagagggagggagggaggaagggagagagggggagagagggagagagagggagagagagggagagagagggagagagagggagagagagggggagggagagagagggggagggagggagggagggagagggagggggagagagagagagagagagagatcatgagcatggaattccttagaatagcagagaggtaggaaagtattacagctggcaatattatccacacacttagaaatcacacatgccctcagcagcaacacattcccactaattcctcaatgaaacacggaagggtccctcagtgccatggagctgggacctgtgactacagggcaaataagatctgtccctgtcttctgggagttcacgggccgggggccaagggcaggccagaaactgggcatgactcctccaggtatgactgaggctgagggaggctccaggctctgggggacccttgggtggcacctgacccagcctgggtctccccagagcaagagaattttgaaggacagcagagtttgacaagaagggatgagtaagagattatcagatggtaaggaggaggaaggggtcagcgggaagcaaagttcaaggttgtggactatggccagggcaacccctaaaaaacctggaatgccaggcta

SEQ ID NO: 8535 - DNA, 921 bp, Artificial sequence
  DNA replication origin
tcattcatgcagttgtccagtacatccttgcagatgagcaaatggcctgcctttcataatacaggctggtggagcttccccatgctcatgtctcagaagagatgctctctgctcccctgcaagtggaattgtctccctttggagtagttgagaggtgacagaggctgctgtgagtggctagaccaaagtctccctgtgaagccacgtgatgactccaccgctccccagagctgcacatggtcgctcagaagccttggaggggttgggggaggcccctgctctcaagcccccactatcacaatcactttgtcccagctattcacctgcaaacttgcttgatctgcagaagctgcagagtggcccactcttcctggacatgtcaggaaaactttgacgtggctgctctagcttcagggaaggtctaatttggtgaaaatttgaaagcaggtttgtgggagtgccagggagaaatggggagagagaaagcctctgtatttgatggatggcaatggcttggagctggtgtgatggcctctctggatgacaaggacattggacttagagccagaaggactgaggtatgaatctcggcattcctggtttgtagttatggggacttggcagagacacttgaatgaaacttcctttgcccaggtataagacggaccccctaataaaggttgactgtgttctgatccttcactgcctgctgggatgtcctcagcattttgtgcatgttggccaatttaaccctaacagcaaccaccagaggcagatgctattgctggctattaatatccccatgtgacagatgagaatgtgaggcccaaggggtttaagtggggctatgaatatccccatgtgacagatgagaatgtgaggcccaaggcacagaaccaggggtgccccagcatgccagtt

SEQ ID NO: 8536 - DNA, 1385 bp, Artificial sequence
  DNA replication origin
tgcgccgggcgccgacggtgtccgcccgcgcatcacaccgagcagcgtgaagggcatgtccagcgccgccagcagcaggtggcccagagacagattcaccaggaggacgcctgaggctcgagtgcggagctcagcgctgtaggcgcaacaaagcagcaccagtgcgttggatagcagcgccacggccagtaccatcaccaggagacccgccagcagcgcctcgccggggcccatggcgctagcggctcgccaggcaccctggggttctcatggctctgcttcgggcgcgagcctgggaaagtgaggcgatggagcagctgagcggcgcgcccacggcttctgggaggtgcagagccggctagcaaggtccagagcagcgcgaggaaagcggcggcaagtgcagggtccggggcacccggggggagggcgtagctctgcggagcaggagcagcccggggccgccctggaggcagcgcaaccgcggtgctgtccagggtgctgaatgcgctcaccgtcccggcaggactgtcctgaggctgaagcgaggcgcaggggcgcggggcgtaggggcgagggaggtctctttcctaacactgtatctttccttcttctctcctcgtggcgtggcaggatgggactctgcgcgcttctgttccgggccaggtcagtccctgccctggtcacacctccagccgagcctcccagccctggttcgcgcgcagctgacacgccagcaagagccactcagtggatcctaggcagcacagccctcgccacgcctctccctccaggcgctggcaccaaactggagcgacctggtggcttataggggcggtaggggcgggaatgaattggcaagaagctgtgcaggcggggcagagggagtgacggggcggggaagggggcgggggctgccctcaggacttcctcccatcccccagcctcagcccaggaactgtgactgcatcgacgtttgttgaagcaagaagagcgacaagaagtggaaacaaggttgagaaaggcatgggggaaggaaagagaagaagaagaaaaagtgaagaaaaagtgaagaggaagtggggggaagaagagggaagaggagagaaaagcaacagagggagagacaaagaagggggcaccttgggaggacccacccagaactgggtgccatacagaaatgcctgtccttcacctggctcctggagccccgcggtgcgaggcctctcccacctccgccatcctctgtggtggcttctgagccttctcacccagtgggaatcttctaatccattcgtggccacttggcaggacaaggatatggtgaagcctcctggaagctgcttcttccaggaagctttttggcattttctccccagtgacagcca

SEQ ID NO: 8537 - DNA, 1292 bp, Artificial sequence
  DNA replication origin
aggagatgcggagtctgaggcctgagttagtcccaggttgcctgattttgaaagctttctaggtttaaagagccaggtgctgattcacagaccccatatctgcctgtgcctggacaaggagagtctcctcatttataggacaggatgggagccagtgccacctccctcccaggatctttcccaggagctgaagcacagccctgagcccgtcaggtgtggaggagggtcctctggtggtggccgccctccagatatcttgctgggaaacctcagaggcctactcaactgaggccaagcccacccagctgttcccacaacaggagccggactgccaggacccacctggtcatgacatacggggcaaagcagatgaggaaggtcgcaatagcaatgccaatcttcctggtggcgcggtggcggcgccgcttctgctggatgaggcagcgctgccgcacactgtggggacagaggacagtggtcaggatgatggcagggtggggacagaacccaggcccagagcccaggggctgaagtgagggcagacaggagggtttcaggaggatgtttagcctggaacctgaggaggacagagggatgggggagagagaaagaacaaggggtaggcttgcttttttgtaggtgaaataaaggaagtctggaaagaagggccagctcctcctcccttccctctggctcatccttctccacacagaggcaactgaggcaggctgctgatggaggggcaaggctggggccctcaaggagggagaagtcacgtggcctgcccaccccaggagcaggagagcctcttgggtgttctgtggggggccaagggggaaaggggaacacctacaggaggtaatttggaacaatggcgacaccagctagagattcaggagacaaatcctgccaagtagtgagcagaaagcatgggggatggaccctgctcaagacttgaagcccaagtccatgcaagggcactgggtcagcagtgggcagaaacaagcagatgcctcagacccacagccatgcacaggaggggtgtgtctggccgcccacagcagagcccgcggaacccctcccggagaagcacaccccacagctctgcgcaaagctccctgtgcactgagcacatatcccaggaggcagaggcccccgcagtgtctgcaccaatgaaccaacaggaaacccctgtgagcagcgtgcaggggcagtgctgtggctggtgaactctgggcggagtaacggtggtgatgcccacaggctcctcaagccaactgcccagggagcgc

SEQ ID NO: 8538 - DNA, 1997 bp, Artificial sequence
  DNA replication origin
caagcagagccagctcctagaaatgcagctgagagcaggttgtgttcctgccagaagccctgagaagtccccaggctatggtctctgctcctgagcctggcattgctggccctttctgttctctgtcctcactgctccccactcctatctacgtggcctcgggctaaagtactgggtgccctagtctactggcctctccccagggggcctggatcctttctgggccttctcttggtacttcctcctcctctgcttagccaagtccttccacctgactgaggcagacacaaccctccctcctcaggtgctcatagccccagcacccttctctcaagggtccagccatagggtgggtaggaacagggtcagacccacttttatccccagcacccgctctgcagcaagtgctggggatgccggcatgcacacaccatgtccagctggggagcaggcttccaacgactgacaggctcctccggctgccatgctgaccctaccccaacctcatgagccccaaggtgggccgctcttttgagcggtgagtctgtgctcttttgatgacacaaagtggcttctctcctagaaacttgtcctgcagggcaccccccatgggaccacacacccggccccaggggctgtgctcttgcagacttggctctggccacacctgctggttcactggccccaccttgactgcacaggtgtggctgggtcctctccccgtggcctattgcccgctgggctggctggacagtgtctggggatttggtgtgatggggacgacttggatgcctcttttacccctgggaacgattaaccctgtcttgtgatttgcccctgatgaaccatttggtgggttgggccctcgtgggtgagacgctgtggattagaggctgtcccttccaacttaactgtggaagagagaagctggttccaggaaagatgaccaaattcttctccccgagtcttaaaaagtgacacaagctagcactcaatttcctcaaatctaaaatgccgttgattttaaactgtctgttttaggtaccactgggaaggaaaagcccagaatgagggctgtgctaggagacaccctcaacaggtgggccactcacggctgaacgctcagcgtccacgagaactaagcctgccacagcaggggacaacaaggaggcacggtgtccccaccccagctctcagggaggaggaggaaaaccctccctgggactgtgcactgccagctggggctcgggaaagcatggagtctgaattcgccctcagacctgggctggaaagctcagacagggaagtcaaagactgtggccccggaggctggccggggcagtcagagttgcttctggaaggacccagctgagtccaggcagagagagggcaaggttgagcaccaggcgccccagatcccggggggtattgaaatgggcatctttgagcagatgacctgcaggaagcagcacctgctgggtgccagcaatgagttggggccacagtgagtactgtctccattaccccagcctctgggcgaaggggcttgtcctaagtctcagggctggctgagtggcagctggctctggggactgctactggtgcactggtatagctggcaaaggaacccatgaggcacatggctcctaaaggtccagccacccagcaaagccccctccccgcatccacacaggggacaagggtcaaaaggtggggacatgccttcactttcctcacctgacaggccctggtctgctgggatcagcgctgcagccagaacccgcattcacccgcgacgcagcctgtgcaggggaccaggggttttaggcaggatcagcagggaatctgcataccagctccacagtgcactcaggtggcagatggggaaactgaggcccaaggaggggcggggagccccttggacggggcggggcactccgcccggggcaggcaggggcctttatctgctgtcctgcccctcctcctcccccagcggc

SEQ ID NO: 8539 - DNA, 1323 bp, Artificial sequence
  DNA replication origin
cctccctgcgccgggggcgggagcccagcgagcgcagagccccggccccgcgcggcccgagtgccacatcactgcgctggccgtccaaggtccgccgccccaccatgccgcccccgctgccgctgctgctccttacagtcctggtcgtcgccgctgcccggccggggtgcgagtttgagcggaaccccgccggtaaggccgtcccctgcccccaccctccaccctccaccctgcaacctctggggagtgtgatccgtcgcttcccaggggcccgggagctttcttccagtaggtcacgcgcctatggtcctggcgagaacgtctccaaagtgggcagcatgtggcctgggactggtagtgtgacctctcccctggacggggacaccagggaggctctctacggcatccaggccgggaccccaggcagcagagggtcaccacgcctgggccggggggtgagatctttttcctgtcggacacagcagcaggggcgccctgcaggtgggttcgagggagcaggtgccaggactttgcagggtgagaggccatctaaggtccccgggtctttccaggaacgggacagtctctctgggctgtggcaaactcttgacccctccctcccagctggggctgtgatgtggacagcaagtctccggaagtggccctaagggctgggagggggcgtgggccccctggagggatctggggcccggagagggaatggacgcagggatcctctgggaggtctgcccgcacgacctcacccaaggggtgtgcagcgggggtggggagcaggaaggtagaggctgggggctggatcctgggctcccgtctggcctcacggcctctccaggtgtgggggtgcatctagccaaccgtgctcaggactctcatcagaagcagacatctgggctcctgcgggagtggggccgtgtgtgggttcaagggtgcagggtgtcaggttctgaatcgcttgttctctggggtttgtggatacctgagaactgcctgagccctgcgagtggatgtgccaggaccacaataccccaccccagtgcgctgtgtcgacacttttcctttccgtcctgttgatgcctggattttcctcccacctctgctcctcgccttacctctgggctcttttctacccgctgcgtgtgtgctcatgcaggtgtgcaggtggggtgctgctggagcttgtgccgtgttgtgggtgggcctccccttggcccctgagagcccagacagtatctagaatcataggcttgttggagaccacagccccctcctccaggaagctctcctgacctgccctttcccagg

SEQ ID NO: 8540 - DNA, 1053 bp, Artificial sequence
  DNA replication origin
cacaggcccccgccactttcccttaccccgaagcttctccagcgggtcatagcagccctcgtcctctctcgtgaagtagcggtggcagtcaaggaagtagggccaggccatgtcaatggcgtcgaaggcgggctggcagacctcccgcaggccctcgcagatgtgccggcagggtctgcgcacccagccgccctcacaccggggggccagcacagcacagcccagcagccgcaggtccgggttgcactggccttccaggagctggtgtagaacgctcagcaggatgtactcggagctggcctccaccacctcccacgaccggtgctgaagcaggttggggaaggtggtgtggttgtaggcggcatcgctgcaggtcctgagctgcaggtccacgcaggtggctggggaggcagggtcggcaggtcagtccctcctgcagtggccctgaccgtcacgcatcagacatttacgtaggggaccccacgcagggccagggcctgcagggaggggcacccacggtctggcaggggaggaccaggacaacagctactgtgcaggaatcagagcctgtgagagaccagaggaggagcctaagaccaaccagattcaactacccaccagcaagccagccgcagcaggctgccctgagcctcggcgtctccatctgcaaagcagctgtgccacacaagggcccgtgaaggcagccagctgatgctgcattaggcagggacaggcacagaccacccaggagccacagccgcagcacaaagacgtcccaaaagacacatcctgctttgggcgtctagtgtctttggggaccctaatgggtcagttggggctcaggacttggatgagaagtggataatgacagatgcggctcagccggctcatctctgctctgcagctcgcagggatgccgtaagcccaggcagagggtagggtcctcattgttgctgggcaccttcctgcttcctcatcacagctgtttgtttagctccaaaagccccatctttaaggccctcatcggcctagcagggccctccagccccgtcg

SEQ ID NO: 8541 - DNA, 1971 bp, Artificial sequence
  DNA replication origin
ggcttgctggtgggtagttgaatctggttggtcttaggctcctcctctggtctctcacaggctctgattcctgcacagtagctgttgtcctggtcctcccctgccagaccgtgggtgcccctccctgcaggccctggccctgcgtggggtcccctacgtaaatgtctgatgcgtgacggtcagggccactgcaggagggactgacctgccgaccctgcctccccagccacctgcgtggacctgcagctcaggacctgcagcgatgccgcctacaaccacaccaccttccccaacctgcttcagcaccggtcgtgggaggtggtggaggccagctccgagtacatcctgctgagcgttctacaccagctcctggaaggccagtgcaacccggacctgcggctgctgggctgtgctgtgctggccccccggtgtgagggcggctgggtgcgcagaccctgccggcacatctgcgagggcctgcgggaggtctgccagcccgccttcgacgccattgacatggcctggccctacttccttgactgccaccgctacttcacgagagaggacgagggctgctatgacccgctggagaagcttcggggtaagggaaagtggcgggggcctgtgtggtcatggggtccaggtggtcaaggaggaccaagagccacactggaaggaacttgagggcttttccatcgacagtgacggtgcaggcattggtagagggcggggctgctccccgaggcagcatgttccccacaaaagggtgccaggcagggtcgggggctcagtgcagatggaggatcctctcgctgcccagggccccctagcagaagtctccagccccttagaggcaggctggggtggaagggtgctgagtccaagtgggggcagtgcccccgcccagggtgcagtgagcaggcctcgtgtgggggagcctgggctcagagtgcagggctggccctgggggtccagtcctcagccacagaccctccagaaccatagtgcttacccctggtcaagggggggcggggcatttacatcccccgggaggtctggcgggcaaagcttcacgattgctcatcgctgggcctggaagatcacacagagggtttggcttggagtgactcctccaagcagggtctgcaccgccctgtgggctcaaggagggagaggagctgtggagaaatgctttgatgtctcttgcagatgaaacagtggagggggagtgggcaagactgggccaccatgggccacttgtctctgaggtgtgcaaagaggtgccagagggccacttggcagcggggctggttgggggccctgcatggagtcccctgtgtctgttgtctcacgagtcggtgtccaccagagaccctgcatgatccgcagcagtcctggcccgttagacctttctgtgtaaaagaaatgttctattgtgttctgtccaagacagttaccactggccgcatgtggcccccaaggcttgggatgtggctcttgccactgaggcctggatgtgggcgtttcatcgcatttgaatgagtctgaacctgtctttgaagagcctagggccagtgtgtgccacattcaactgtgcagggcagtgtccgctcatggttgggttcagaggatctgactgcgggtgccacacatgtgctagctcacgcgagtctcacgacagccttgctccatggaagaggaagtggagcctcgggaagggtgacagcagtggggtctttagctggagtggcccaagcccattgcggatggagggatggatttggccatttgtcaaacagctaccgagcacccactgtacatgtggctttgtgctgggacattgaggagggcaggagaaggaaggcagacaaacacccgggccgggctccagcaagccctgggttccgggctatgtcaggtgctcagggctgaacctggcatgtcttgcagcctctggctcccaatctgaga

SEQ ID NO: 8542 - DNA, 862 bp, Artificial sequence
  DNA replication origin
ggcctgggcttggagactcaccgcagtagcacagcctgttggtgactggttgggtactgtgccccaagcatcttctggggtcaacaccaggctccaggtaggcccctgagaccgtggctcccgctgtgatgtggcgtgttggggaggagcgtggtgtggctggcagggtggtgctgtgtgcccggggcagctcctgggccgcagtgtcccccttccacactggtgacagccaccctccagcagggtgccagcgagagctatttgacgcagatgtcggagtggaattttgcagtacgaaccctgactctgcctggccacgcggtgtggccagtgcttctgtacacagcagcaccttgtctgcagggaaggaggcaaaattgcacgtcccctcctggcgaaggccacttgaggcagggccggcgctcactgagcctcagaaaaggcagtccccgttgttgatgaggatggttggaccctgctgtggcttgggttgtggtgtcctcaaaaatactgaagtccagccccaggtactgtgaccttatttggaacgaggggccactgtagatgtaatgaagttaaatgaggtcacctgggatttagggtgggccctaaccagtgactggtgtcattatgggaagaggagaggagacgcacagacgccaggaggtgacagctgaggccgaggctggagggaaaggccacaagccgagggaggtgaaggctgaccggcgacgctgggatctgtgagatgccgggaaggacccggagcgtggtcctgccagcaccttgatttcggactctggcctccaggaccgtgtgaaaataaatgtctgccattgagggcaccccattggtggggctt

SEQ ID NO: 8543 - DNA, 1188 bp, Artificial sequence
  DNA replication origin
gaaaatcaagtaaatctggaaaccctggtatgctctccttttattctccaaggaattctttgggacaggtgacagtctctctcttaaagttggggaaatggaggcacagggttgtgaaggtgcattcaatctgagaattcaccccatgtgagtctgcagatggcagcgtctgctaccaacctgggtgcagagtcggcagcccagagagtcaaccagaacccttctagagcgcagtatggtgtggttttgagcactcaggcatgtttcaaagttctggcccttagacctagtaattctcttccaaagagccgttcaggaaacagggatgtagagccagaaacatctacatgttgttcatgtttttatcatgatgtatttaccatgattgtacaatcctttttattttgagataattgttgattcacatgcagtggtaacaaatgattcagagagatcttatgtacccttcacccagctctccctatggtaacatcttgcatagctaggaggaggccaaccaggaaatcaacatgctaggagacagtccatcaccctattccaattctcggttttgcatggcagtgtgtgtgcgtgtgtgtgtggtgtgtgtgtgtgtggtgtgtgtgtggagggtatgtgtgtatgtggtgtgtgtagtgtgtggtgtgtgtgtggtgtgtgtagtgtgtgtggtgtgtgtagtgtgtgtgtggtatgtgtgtggtgtgtgtagtgtgtgtgtggtatgtgtgtggtgtgtatagtgtgtgtggtgtgtgtgtggtgtgtggtgtgtgtgtgtggggtatgtgtgtggtgtgtgtagtgtgtggtgtgtgtgtggtgtgtgtgtggtatgtgtagcgtgtgtgtggtatgtgtgtggtgtgtgtagtgtgtgtgtgtggtgtgtgtgtgtggtgtgtgtgtggtgtgtgtgggtgtgtgtgtatattgtgtgtggtgggtgtagtgtgtgtggtgtgtgtgtgtagtgtgtgtggtttgtatgtggtgtgtgtgggtgtgtgggtagtgtgtgtgtggtgtgtgtggtgtgtgtggggatgtgtgtgtgtagtgtgtgtggtgtgtgtggtttggtgtgtgtggtgtgtctgcttaatcttgtgcaatttttttcacatgtgtagcttcaaatggccactgccacagtcaagatacagg

SEQ ID NO: 8544 - DNA, 1002 bp, Artificial sequence
  DNA replication origin
agaacaggtgctgccacttaggaaagcataaagttgccctatgacccagcaattccgctctgagcatgcacccaagcaaagttaaaacaacttccataccaaaacttgtacttgaatgttcataacaacatccataatagccaagaagtgaaatgtcccaaatgtccatcatccagtgaatggatacataaattgttgtctgtgcagacaggaagactatttgaccccaagaggagggcagcactgatgcctgctccagcacgggcgcagctcacgacatcatggaaagggaaaggggccgtcacaaaagaccacatgctatatgggtccatgtatatgataggaacagaacagggggtctgcaggacagaaagtagatgagcggttgcttcagactggggcaggggagggtggggaggtgatagctcaggggtggggggttcctttcgaggtgatgaaaatgttctaaaatggactgcagtgatggtggcgggtatttgtgaatatagtggtgttatccttattcatgggggatgcattccaagacccccagtggaagctttgaatggcactgaagcctacgtacactgtgatttcaatctggtaactgaggtggctactagatgatggctgggcaaagtagcatgtacagcatggagatgctggacaaagggaggatgtcctgggcagaacagaatggggtttcatcacatggcacggaatggcatgcaacttaagacacgtgaattgtttattttgggaattttccatttaatattttaggactaaggttgaccacgggtaagtgaaacctcagaaagcaaaactgtgggtaagggggactgctgtatactaaagccattgacttgtgtacttcaaagaggacactgctatccgttccactttccagctggagaggctgaggcccagagaggtgacagtgacttgctgaaagccccacagctgggaaggggcagagccaaactcctgctcaatgccaag

SEQ ID NO: 8545 - DNA, 1608 bp, Artificial sequence
  DNA replication origin
gcagatgcaggaaaagccccccagtggcacagcaggccggagacaccccgggacgtgcacgctccgcttggcctggcctggcctggtggtcttcatatttgctaactgtatggaaagacggagttttctttctttagaataatacaaatgaattcactcatgctacagaaaccgatcgagctccactgggcagggcgcttgggatgtgtcagtgagtgaggcagctgcatctgcctacccatcgtgtttgcactgggaggtggcgtgggggagggagatgggtgataaactacaaagacagcaggcgactgtctgctagacagacagatggacactgggggacagcaacaaacagagccggagaaggggatggaaagggctggggcaggaagggaggctgggtgcagcttcagacagtggcccagagctcatggaagggggcgtcatggagcgggggccttgtggagtggggggccttgcagggggacctcatggagaggggagcctcaggtggggggcgtcatggaaaggagggcttcgtggtggggggtctggaaggggaccttgtaggtggcttcatggagagggagatctcatggagaagggggccctcatgggagggctcaagtaggggggccttgcatgggggcctcgtggaggagaggcagcatgagggggtgaggagtgagccttagagaacctgccggaagggcattccaagcagagcgagcaggtggcacagaggcctatggggtgcaccagggctgggctggggcagtgtgagtgggggaggggctgggagctggagccagggctgcaggcccagctcatggtacctgggtgaccactgccaaggccatgggctttaaccccgagtgggaggaggggcctgtgcagcattcagagccgaggaggggcatgacccaatgacaccgatcctttaagaggacaaggtgcagcatgctcactcgctggggctgagcaggtcaagccgtatttcagatgtcccccaaagacagatctaagttgtaaccccggtacctgtgaaggggaccctatttggaaatagggtggaggcggccttgctggcggcctggctggggcatgaggggcatgggggacgatgttcaggttcagggccagatgaagcaagggaagtctggatacaccccccagccagacacaggccttggggcaggtctcagcaggatgacggcagctcaggtgtggccgagctgttgagtttgctctgcgggtgagacgtctactggagaggtggagggtggtaggtagagacgcaggaggcttgcagggaatgaggcctggcctggagatacagcggtataaatgttgcacaagtcaacacacgtggtgatgtaggtgatgtgtcgaggtcctgcccatttctaaaaggaaggtgttgagcaagaaccagctctcaagttgagtctgtgactgcagcagcatgagaaggagcaggggtgggggccttcgcaggttccggaggtgacagggtcaggggatgctgccaccaagctctgtgatcagagagaggccgggtaagccccatctggcaccttcacacatggtcatctcctcacctggcgc

SEQ ID NO: 8546 - DNA, 1533 bp, Artificial sequence
  DNA replication origin
gttggaggatggaagatacttttggttttaaggatggcagaggtgtgaagtcaaggacagtggttaagacaggggtccccaaccccggggccatgggccaggactgggccacacagcaggaggtgagtggcaggcaagtgagcaaagcttcctctgtatttacagccactccccattgcttgcattaccgcctgagctccacctcctgtcagatcagtggcagcattagattctcaggaatgtgaaccctattatgaccttcacatgtgaaggatctatgctgagcatatgagaatctaatgcctgatgatctgtctctgccttccatcaccccagatgggaccatctatctagtagcaggaaaacaagctcaggcctcccactgattctatattatggtgagttgtataattatttcattctatattataataaagtgcacaagaaatagaatgtgcttgaatcatcccaaaaccatcctctgtgccccccaactccccaccatccatagaaaaattatcttccagaaaatggtccctggtgccaaaaaggttggggactgctgggttaagagatggatgtcacagccagtagccagagcccagagcagggtgacagtggtggtgatggagggggactggtgtagggtctggggctgcctggctggggtgggtcactgggagggggtatggtgatgctggtggtgagggagtgagattggtgtggggtctggggctgcctggtcggggtagggcactgggagggggtatagtgatgctggtcatgatggagggggcctggtgtggggtgcagggctgcctggctgtggtgggtcactgggagggggatggtgacgctggtggtgaggcagtgagattgatgtgaggtccggactgcctggtcaggttggggcactgggggggttatagtgatgctggtcgtgatggagggggcctggtgtggggtgcagggctgcctggctagggcagggcactggtagggggattagcttgcttgggctgccatggcaaaggaccaccaactgcatggcttaaagcacagacattgattctctcaccgtctgaaggtctgaagtccaaaatcaccgtgtcagcagtgccgtgctccctctgcaggctccagcgggggctcctcctttatgtcacccacctggacgcagtcgtccacccttggcactccttggctggcagcggcaccactccagcctttgcctctgccctcactcggacttgtctcctgtgtatctccttctcttcctctaaggacaccatccagtgtgacctcatcttaatctgatgacatttgcagaggctatcattccaaataagatcacattcttgggtctcgggggttgaagatctcttctggggaaacacagttatcttttggggacaagaacacagttagctgcctgctgggcctcccttcacctgccaagctgtgtgctgctggaggatgaatccgtgggatctgaccgtgggccaccccaacccccacccacactggctgatg

SEQ ID NO: 8547 - DNA, 1051 bp, Artificial sequence
  DNA replication origin
gaagtggctccagcaccgggcaggaggcaggagatgagagcagggaggggccagggctccgagtgcaaccgtgccagcgccaggcccgtggggatatctccaggccttgcctcatgcctccctctggagctggcactggcactcccatcccacagatgaggaaactgaggctcagagaggcagagtgacttcggcaaagccatgccggcagcaggactcatttatttcctggcccctcgtggggctcttccttctccttctcacagagtatctgggtcctcagcccaggaatcccatgaggccggacagcatcctcccaaaacggaactcagtcccctgtctcctgtaaccaaaggaagccacggggccagaggagtccggcctttccagatctcgcctgccgtggtcctgtcacaaggaggatgcttgctggccaagcaggcagaggtagagacagaggcccgcaggccgggaggagggagaggtagaggcccacagaccaggaggagggagagatggaggcccacaggccaggaggagggagagacagaggaccacaggctgggaggagggagaggcggagcccacagagcgggggagggagaggcggaggcccacaggccgggaggagggagagatggaggcccacatgccagaaggagggagagacagaggaccataggccaggaggagggacaggtggaagcccacagaccgggaggagggagagatggaggcccataaactgggaggagggagaaacagaggcccacagaccgggaggagggagacatggaggcccacaaacggggagaagggagaggcggaggtccacatgccgggaggagggagaggcagagacccgcaggctggggggagggagaggtggaggcccacaggccaggaggagggagagccggaagcccacaggccgggaggagggagagacagaggcccacaggccaggaggagggagaggaggaagcccacaaaccaggaggagggagagatggaggcccacagaccaggagaagggagaggcagaggcctg

SEQ ID NO: 8548 - DNA, 845 bp, Artificial sequence
  DNA replication origin
gccaaggccactgggcctgtgtggaggttgtcagagctaaaccaggctctgggttgatctctgtttcaccagctttcgctgggtcctcttagaataagcctttagtccatccccacctggggccatggaaacggattggacaccgtcctgctgtcagagagcacatggctcaggggagctgttcatcctcaatcagaggttgtcttgttgccagttacagcacaaaggcaggatgtcaactgtgcttggtgcctctaggaaggcttcctggaggtggtgtcacttcagagattcataaagtttaaagcgaaaattgctagatgcacagggccctgggggcagtgaaaacagaggaacaggaaggagtagctggtgtggccctcagggacctcgggggctcagcctcaggcccccctgtggcagaggatgtggtcaggagtctacaagggccttgactttctggttcagaagaaaactttgtccaggggcaatggtgaacctgtgggattttgtttgcagggaaggagctgatcatgccctgttggtaagctctccgtcagcgggagagggagaaccggggggtgagtctgggaaaggtgaccaccaagaggtccttgaggatccaggtaggctggggtgttagtcctgccaggcagtggcagtagacctgggggagcggacagacgggaaaggtagttctggagggcttggtgcctggtgggacgttggatgggggtaggggaacctcggcgggcatcgaggctgacttcctagtccctggtctgggggttcagacagatttggtgtggaagctgcagggacaagaaaacgtcatcatcaaaaac

SEQ ID NO: 8549 - DNA, 838 bp, Artificial sequence
  DNA replication origin
ggcacggccgaggctgcgcttcaggagtgtccgccaggcgccttcccgggcggttggcgaaacccgaggaggcccacagctctggcctggggcgccgtcgttccaggggcctctgcgcctctctctggcgtctgtctggaccctcagagccccgggatcaaggcgcccatcctcttgatggcggggcgcacctttcgcgtgggtcgggcgctgcagaccaagcacgccgagtgcgtcaaggaagtgcccggaaaccaaagacaacgcacccgggaccaagaggaggccgctgcgcgcaacctcccaaacactgcagcgaagtcggaaccacgtccgcgtgggtgactcgggctggggagccgggaggcggcgccaaggacccttcagcccttgtccgtcctccctgatatgtcctcgacgcggtctgaggcctccccagcggaggcgacgccccggcgccaggtgccctgggtgggggaacccggagggggcaccacgaccagtggagaaggggcggaggccgggaaagctgcgtggaaaagaggaagggttaagactgaaatcattctacagagaccacgttaatgggtttaaatgcgaacattctagctaagtagaaaaaaatttaaaagcagagtgcaagctggaccaaagtgagaccccgattgggcgtagataaacctgcaaccaaaacagccccaggcagagattcagccgctggggagcacaaacccctaatgtttcttggtagtcactttttgaaacattttattatggaagttttcaaatataaaacaaaatcgagggaggcttcaagtgaattcccgtgtacccaccc

SEQ ID NO: 8550 - DNA, 1917 bp, Artificial sequence
  DNA replication origin
tgcccgaggcctcgccagtctgagtagcatcgccgttgggaaggccgaggcagtgccaccggcacacagtgcctggacctcaaaaggagaggctactgctgctgcttctgcttgctgggcctgtgtgggactcggaggctccgcggtgtcgccggctgtgccctggcccctttcctggactcgcagcgatgtgtcccggtgactgggtgaggccagcacaaaagcgacagaagcccagagggcgagggtcccaggagcctgagtcaggggtgcgaggtctagagggcccagtggggagaggggtcagaaggggcggggggtgagggttgggactttgcctgagtggccacgaagagcctcctgggacaccccttgcccctcatggccgccaacagggagctttcattagttttattgaggcctaacctgagtccctcccagatgaaaccgagtgagaacggacttcctggtttagccaggaaagcagttggggcgcagccccaaagcagcgagggagcccggacacaagcctgggaagggctggagggggcccaggcagcaacaagcctgcagggtggggactgggttgggggaggcctgctgcaaggccaaggatggctgccctctctaagaatctctcaaaatgcccacgctgtcatgacacagggcctggaacccagaggtgtggacctgcgggcccagaggctgaaggaggccccctgggcttgctggaaccctggcctcacagtaaggaaccaactgatgggccggggcgggggctggggcttggaggacatgattctgggtcaggagctggatggtagagacacacagatgcactgacccccaggcccactgcacgctctccttggccgtctggcgctaccttgattgccccaagaccagcgtatggcccggctgctgcccatctcacccggggagcgtctacacccaagtgaagcaggacagggagatgggttttcttaggggctcaattctgccatggaagtgaacttttcaaacccgaacaacatatttctcctaggctgaaacacacaccaaatactgtccctcccccacccaaaagcagccagcttggggctgatggaggtggggtggccccagtggcccagaataggggaacgagctctccttcagatcccatcatcaccggccgtgaacagctttgtccaccacctgagtcctccagctgaccagagaccagagactgcaggccgggaggaagacccaaggcaagagcacggtggcctgaccttgagtgccacggctttgttttggcccaaagaaaaattccataccagataggaaatggctgtgcacacggggcgccacacagccgagcccctgtgacgaatgccagcggccatcagtgggcctctgccttcacctgctcctgcctttcggtttcagtcaaggctctagaacttgggacacaccatcatcacttcctcctccctactcccggctcctggcccttccctgtggtgtgtcatagaagaggggcacagcgctcatcacctccgactagggtctgccctgcccacctgcacctggcccagccctgggctccaggtgtccccagtcagcactgaaaggtgctcccaggagggacggcacccagcgcagcttgagctgtctctgccctcgtgatcacaaagcagtgaaactgtccagaaaatgtccctttttattccatacgcaaataagtagattcatttaaaaaaacaacaacccggaggctgcgacgtctgcagagagccccagcctgcctgctcctggaacggacgatgggacccacaggtccagggtcctttctccaccagcacccgcgagaggggtagcacagccctccgggccggcctgctgtctgggtcccaggaaagggacgtttagtgt

SEQ ID NO: 8551 - DNA, 1307 bp, Artificial sequence
  DNA replication origin
gcctgactcccctgtgggtgctgtgagggcacacaccatggggattggccacgggcgtgagtgggatgtgcacactccttgggcatgaggcacagagctggaaccacgcacagaagcccaccagtgtgcgcaccccttgcatgagcgtgcaaatgctgcaaatacactgcaggcacacacccggccgagtgcacagccttccaggggcccagggccaggccaaactctgcctccacctctaacctgtcaacctgggcctgccctttgcacgggaggctccagaccaaggcagaaaagcagcgggtccgagtcagcctccagagccctgcagtgggaggctgctgccctcttcaatctgggcaagtgcttctgggtcccggctggcctctttaacctgacatcatcccttgccagcctgtgggcctcttcttgttcctaggagatgagtaggggagcttggtacttggaacatgaactcagacaccgcctgtgagcttctggtttcagcccaaacccatgaggctgaacctccagtcttgaaagtgtttggggcaggactcagctgctgcatgttgcttagagtggcatgtgcccgtgttccctttgagcatgattgtggctggtgtggacttgccttgtggacactgggtcagggctacaggagtatgtggtgtgggggtgacagcctcacctgatgggagttctcttttggggatcctttgcattggtttgtcctcctactatggaatgtttctgtgcaagcgggcagagggcgcgggaagaggcctgtgaactcttcattcctccttctggggagcttggcgtggggctggatgccaggtggcagggggtgtcctgtgcttgtttttcggtgtgaacatttctcggaaggacatctttcctcttgtcccgggacttctgcgggaggtttgtgtgtttttccgggccgcccgtggtgcagctgggagtggggagtgctcactggggtcagcctgcttttcttgtgtagtatttttgtttcttttctttgctctgcatccctttgttgtcctctggcatgggtgtgcgtttgtgtttgtgtgttgcggggtgttggtgtgttgcggggtgttggtttggagctgctgcctggtctctgggccgcctcccacggttctgacaatgtgtgcatccccagagctgctgggtgcccagccctgtgctggaaggtcttcctgcttgtggctgtgagcgacctcaaggtggggacggctggcctcagtgattgagtctggtaatcagtgccctagaaccaacggtggtgccct

SEQ ID NO: 8552 - DNA, 2312 bp, Artificial sequence
  DNA replication origin
cggagcccgggcgcgccacgccggcccgcgcctcctccttcctcatcgagaacctgctggcggccgaggccaagggcgcagggcgcgcgacccagggcgacggcagccgggaggacgaggaggaggacgacgacgaccccgaagacgaggacgccgagcaggcgcggcggcgacggctacagcggcggcgacagttgctcgcgggcaccgggcccggcggggaggcgcgggcccgtgcgctgctcgggccgggcgcgctgggcctcggtcctcggccgccccccggtcccgggccgcccttcgctctgggctgcggaggcgcagcgcgctggtacccacgggcgcacggtggctatggaggcggcctcagtcctgacagtgagtgagggcgcggggagggtgggtcaggcggtggggcccgacttcctccctgcgcatttgctgggggacttcgggctcgtcgccgcccgttctgggccatcctctcccttctgtggaacggcgtctgggccttgtggggcccccaggagcccctggttgggctggtttggaggcccaccctctggggcaggagctccgctaacgaggaggttttgcaggccatagcttcacccattgccgggctcctccggtcccagggaggctggggacaggggacaacaggaggccaaagaaaaaagaaaggagagtgaaagaggatagggaaagatacaggagaaggcgaaagaggctgagaaagaaaatgggaggatggaggaagaaaggaatgtgctgcgggagagagaatggggtggggggaggggaagatgcaggaaaaagaaacccaagagtgatccgagagagaaaagaggaggaagagatggagggaaagggagacaaagtagcatcagacgtggaaaaataaaagggggcattgagcagagggtgcagtgttgtgggggtggggccggggaggggagccatctaacatggcagctgtgcccccccagagtcctgtttcctctgtgcccgctgcagacagcctggggcaggggcctgggtctccctcttggtccttgaggggcatgggctgtgccaggcaagaagggagcctgttctgaggcccccagtccaacccctctctcttctttttctgcccctccccctccttgcctttgttccctgctgagggcttgagactggggctgggggttctcaaccccagaacccctttgcccccttgcttgggtatctgaccccttagttctgcttcccctccccagggttccagggtcgctgcctcccttttgtacctgccctttaggaagacccctgggaggaaggccaggaaagccagtccaaccccccaagccctggcttagccagccccccacccccaacacagcctttggaccttgaggccagctgaggacgtgggccctctgcaggctccggctctgggatccatgctgtcctctgtatgaatattagtgtgtgctggggagtaagtggcctacgaccctcactcacttgttagataaccctttccatgtcgtggagtgatcctttgcaaaagcccccacatctcggcacccacactcaggaagtctaggcccccacccccttcacgtagacttgagcagggcttccgtggtttcccagaaatcgagcgactctgtctagtgcccttctgggggagactatggaaagggtttctcagggtgaaatttgttctccactcatccctggggtgcatcccctcctgcagcccaggtggcacccctgcagaggcggctcccccttatttcgtgccatgcgggttagggtcccacttcctcactggagctggcaagtcagcctagtgccttgtggcagcacatgggcctctgtgagtttggggtattggggggaggcagggactccccagatctagtagcatgcaccacaacctgctgcctgactcccctgtgggtgctgtgagggcacacaccatggggattggccacgggcgtgagtgggatgtgcacactccttgggcatgaggcacagagctggaaccacgcacagaagcccaccagtgtgcgcaccccttgcatgagcgtgcaaatgctgcaaatacactgcaggcacacacccggccgagtgcacagccttccaggggcccagggccaggccaaactctgcctccacctctaacctgtcaacctgggcctgccctttgcacgggaggctccagaccaaggcagaaaagcagcgggtccgagtcagcctccagagccctgcagtgggaggctgctgccctcttcaatctgggcaagtgcttctgggtcccg

SEQ ID NO: 8553 - DNA, 1225 bp, Artificial sequence
  DNA replication origin
cccgggcgcacgcgcgggccggccctggagctgctacccggaccgctggcgtcgggccccgcagggcaggcggcggcctccgcgccgggctgggctgggccgggccgggagcgagtgcgcgccgacagctgatcgggcagccgcctggctcgcctttcaggtcgccgttctggtcgccgccggggcggcctcactgggggcggggagggggaggggccagcaggggcggggggtcgcgggctgggccgggagggcggcccgctgagccccgaggacgctgcgccggccccgagcgcggccgctgccgggagacgctgcccagacctgagcgcgcgggcagcggcgcagccgagggcgggcggccccgggcgcaggcggggggtcgcgccgggtccgatcccgcgtgatcagttcccccgtcccgcgccacccgctccgtgggggcggggcctgggctgagcggccacccattggctgtggggccccgatgaggaacgggctggccaatcaccgtccggccagagccgtaattaccccgctgcgaggagggtgttggaccgaccgtgagtaactgtgtgtgtgcgcgcgcgtggtgtgtgcacgagtgtgcgtttgaatggctgtgtgtgtgtggagggcggcgtggagaccccggggctcccaagaaactgcaagaggctgggccacatttttttatttaagactttgtgtgtaatttaaaaatgggaacactgccaaaacaggactgcgaaatgtggcatatcttaatatttgcacttaaggaaagatgctttcaatgccaactgtagttcggtagaactcttcagttcccgggctcggtaccagtatgtaaggaagtgcaaccacagggctccgctggcagcccgctcgatgttaccaagcaggtcttcaccgcgccagcacccccaccgcccgctccaggggaagccagggccttagaagggggtgggagcttttggcccagcctctgccctgggcgaaggtcttgggggcaggccccttccctcgttgtgcctccgtttcttcgctctaaaggggtggggaggtcctcccatatctgcagcgggaagttcgggaacataacgcaccctggagctgtctccgttccggcgtcgacttcagacttacctacattaggtcactgcgcggacgcgcgggttaagccggcttcacccgatgcgagttatttcgcagagatacatcc

SEQ ID NO: 8554 - DNA, 1065 bp, Artificial sequence
  DNA replication origin
agggttatctgctgtcaccagcactggagacagagtgaatcccgtgaatggggagatgcagaaacgccccaccaccaccaccatggaaatgagtgcagccactaaacagggagtggaggctaaaccagaagacagagaggggttttcagggcccactggatgggaaagaaacaggcagaagaatgtgtgtcatggatagaacacacagaaaacggtgagcccgaaaccctactgcttgtacattgcagccacacgtgcttgcgttgctctgcgtctctgcaggattcactgagcatcgagaggcagagcgatgtgtaaagacatcgagctggcgatgcaggatttggagggggatgggatgggaatgggtgggttcctgatgggccacacagagcctgtgaccccatgggcgggaacgggacctggtatccatctgggtgacatggcaggatgtatggctgtgggggcatgtcaagggggtagggctgtgtgggcacctatacggacccgtggggtgtgtgtctgtgtgtgtgtgtgtgtgtgtgtgtgtgtgtgtgtgtgtagggggatgtgtgaggcgtttacagggtgaggtgtgtatacaggggtgtgtgtcagtgtagacaggggactgtgtgaggagtttatggggagaggtgtgcataaggggttgtgtgggtgtggacaggcacgtgttttcatatgtgtgtgttaaggcaggggtgtgggtctgtgtgaataggtttgtagattgtgtctgtgtgcatgggcctgtgtggacctggatggatgtgtgtgggtgtgtttctgtgtggacgggggcgtgggtgtgtgtgagggtggggctgtgtgggtgcaggtgtggatggtgtgtgtttatgtgactgtgtgggggtgtggagggatgggtctgtgggcgtcggtgagtgtggggtgtgcgtgtgtgtttcggcctttgtctgcctaaagagatgccaggtgagaccatcccagaatgctgacgggagtctcagagtggtgcgcttacagacggcctgttatctccgcatcgtggaggatctgtcc

SEQ ID NO: 8555 - DNA, 1149 bp, Artificial sequence
  DNA replication origin
gatggcatggctggggaggcagatggcgggccctgctgggctggctgcctgcgctctttcgccgccaagacttctcggcaaacccagcctgcgtccggggagggcgtgtttgcggagttaggccagcgaggacgcggagacccagtggaggagctactgtgagtgtagttcctccagactgttcggctcgcgatagcgtcttcgtaagcgtctgtgtttgcggggtaaccgcgggtcccatgcaacccaaagcctcagtcttcctccataaaatggggctaacagggccgcctggggatgtcctggctggcccgtggtgcgcctgggctctctgagtttctcgaggagccgcccgcagctccgggagggcccgagacaactcgcagcttcgcggtcgcagacgcctgggttcgcacacgcggtcagaccgggcaccacggtaacagcgctcaggtgacgcaacttggcgctccagttgcgcgcggcccagcggggctgcaaacgccgagctggggaggaggagatagggcaggacgcagccgggaagactgcctggaggaggccaggtcagagctccgctctgaagggcatgagtcgggagtgttgagtgtcctctcccgtcatttcaccactccagagtcccgaaggttcccaccgtcttttcccaacccacatggggcaaggatcccgcccccaaaccccgacttttccttggggtttcagtaccggctcacagtggctttgcggggttcaaacgtgcagctgcggctcggattcgtttctgtccgcggataggatggagcgtctgtgagccgcgggttctcggttttgggcgaagcagtgaagcaaacagtggctctcgcagggagcttttaggggtgtggtggtgtaaagcacacagagaacgctgctgtatggtctgaggtcagggaaggggactgggcatctgagctgggtgtgagcaacacgaaagccatttccccggtgctgggaacagtggagatgtgaccgctgctgcctgcgcttgaaggcagcgcctggagtttggaggaccgagtctaggagcggagtttggagttagagctcctaagaggagacgaggagacagcggtccctgagaccccagcgacgggacagcattgggacttg

SEQ ID NO: 8556 - DNA, 866 bp, Artificial sequence
  DNA replication origin
ggctgcactcgcacacgccgcgctagaccgaccggaggcaggcgtttcccggagccaaggcgcgcaccgacgcggggagggggcaggcggccgggtggggggagtcggcttgctgtccgcagcgtcgtggggcgggggcgcggccattggtgtcctttcttggagaggtcacatcagagccttgagcaaccgagaaagaaacccagacaaacagggaaggaagcgtcttatccggcttaaaacgcgcagatgctgcgggcggggtgggccgaggggtggcggcgggcagaggacccaggagggccccgcccgccatcggtgcccgcgcctttggaccccccgccgctctcgggaacccggggccccgggcgcctccgagagggcggcagccggggaagggcgtggggggaggggaggggtggcgtggggatgagggagggggtggcgtggggggaggggaggggtgatgtggagtgagggaggggatggcatggctggggaggcagatggcgggccctgctgggctggctgcctgcgctctttcgccgccaagacttctcggcaaacccagcctgcgtccggggagggcgtgtttgcggagttaggccagcgaggacgcggagacccagtggaggagctactgtgagtgtagttcctccagactgttcggctcgcgatagcgtcttcgtaagcgtctgtgtttgcggggtaaccgcgggtcccatgcaacccaaagcctcagtcttcctccataaaatggggctaacagggccgcctggggatgtcctggctggcccgtggtgcgcctgggctctctgagtttctcgaggagccgcccgcagctccgggagggcccgagacaactc

SEQ ID NO: 8557 - DNA, 1091 bp, Artificial sequence
  DNA replication origin
gccgggtctccccacggcattttgtcatgtcgagaatgacacccaggacaggctgtgcctggcctgtagtaggactctgaacaacatttgttgcatgaatgaatgaatgaaggtatgaatgaatgaatgaagatatgaggtgcaaagaggctcggctcccacgtggttcgttctgggagccagagggttctggcacactggacaacagcagtgtgggggagggtgggggctggcatgggggagggtggaggacctgcgtgggggagggtggaggacctgcgtggggaagggtggaggaccggcgtgggggagggtggaggaccggcatgggggagggtggaggaccggcatgggggagggtgggggccggcgtgggggacggtgggggctggcatgggggaggggggggggccagggtgggggagggtggggactcgctgcacctttgcactagcaccacgggaagtgctggaccccgtgttctgccatttccagcaacatcttctgtgggaccagagcacagccagagggaagtgatagtgaagaggcccaaatgcccatcaccagagggatgggagaaagaaggtctgggggccaggctgctgcctgcacatagctgaagagcggccatgtggggatgggggccccaggacatcacctgtggctctctggacacagccaggactggtgcatggatgtcctgggaaggcagacaacagtcagagccgtgcaagtgtggaagagagtcctcaggaggtagtgagcaccccatccctagaggcgtgtaagttcagtctgatcagccaacaactaggaatttgtgtaaagcaccaatgggagcaaagttggatttgggaccatgtaaagtcacagccaaatggtacaaggctgagggggccagctgctgggggtctgttgctctgagccccctcggggaagctcagccctgtgaccacactgctcccttcattcccccaccggaggttcacagccacgtaccccagcctggcaggcatcacttctcctatttcatggaagagaaagctccgttcctgggagcactgggcaaaggccctgttgggatgcccagc

SEQ ID NO: 8558 - DNA, 1135 bp, Artificial sequence
  DNA replication origin
agcaacaagagcgaaaatccatctcaaaataaaaataaaaataaaaataaaaataaaaatagaactaaaaatagcagggagtgggctgggagcagtggctcatgcctataatcccagcattttgagacgctgaggtgggggtatcacctgagatctggagttcgagaccggcctgtgtaacaggctgtgaaaccctgtctctactaaaaacacaaaaattagttgggcatggtggcacgtccctgtgatcccagctactctggaggctgaggcacaagaatggcctgaacctgggagatggaggttgcagtgagccaagattgcgccaccgcacttcagcctggaggacagagcgagactctgtctcccaaaaaaaaaggaaaaaaagaaaaaagaaaagcagtgagtgggctgggcatggtggctcacgcctgtaatcccaacactttgggaggctgaggcgggaggattgcttgaggccaggagttcaagaccagcctgggcaacataggagaccctgtctctacaagaaatttaaaaattagctgggcgtgatggcgcgtgcctgtagttccagctgcttgggagactgaggtgggaggatggcttgagcctggaagattgaggctgaagtgagcgtgccactgcgctccagcagtgggtgggggaagggagggagggggcgcggtggggaaacggagcgaccgtgtctggaaaaaagaaaagagcaggaagtatgcatacagaggtgtgtgtgtgtgctgagctatggtgtgaaatcattcctgactgcgggttatagtcaaatccccatgaagagcatcactgcagcccacgggtgtgtcagggacacagtgttgtgagccctgggaaggcagggcctgtggccagcactttatcaacactggcacatgcaccctatgaggcaaagggatttgcattgtccccttacagcgtgggacactgaggtcgccaggggcatggcgactgtaagggacagtgctggatgtgagcctcgcctgcaggaggcggtccaggaagcgtgggtggagcggctggagaagttgagggtcgcgtggcccgggaggctcccggaggagggaagggcctatctcagagaggggcataggcgagg

SEQ ID NO: 8559 - DNA, 2053 bp, Artificial sequence
  DNA replication origin
tgtcttcaaaggcccctgtcacccctcccccacgttggggacgccccttccagagcccgtgtcacctccgggcttccgcagcccccctccaaggcggagtggagccttgggaacccctcggccaagcacaggggttcgaaaatacagctgaaaccccgcgggcccctagcacgcgccccagccccggagcagggtcagggtcttcttgcgacccggccccgctccagatccccccagctctcggccgcggacccgggccgcgtgtgagcgcgctttgcacctcctatctccagggtcctccgagagccacgattttttacagaaaatgagcaataaagagattttgtactgtcctgactggggagtcccaggccgccggggatggagcgcccctggggtacacacccggctggcccggcgtctgggcgcggtggtgggaggccctgacctagggggaccacggggtgtggggagtgcggagccccactgggggcggggcgaggtgtccgtaggccccgcccaccagcccttcctccctcctgaggccccgccccccatatctgcctgcctttgccagccccagccaggagaagggagtggcggagcggctggcagatacagaggagggtgtgacggcgttgctggtcccccatgggtccagagggcaagacagactcccgaggcacaccctccaggggcctgtgtaggcatcctcggccctccagcgaccatccccgcgtcggacagggtccacttccgagccacggtggggtcaccctgtgcccagtaggggccttggaagtggtggttggaggccaggtacgctcggttactaccctttcccggctacagcctcagctgcgatgcccacgagaaacaggctggtggaggggcagaccccctacaaggcctgaagttgccgttcctccacccactcctcttgtgggcacaggagagggacaaccccgccatgaagagctctgaacggttgggtgaggacaagtaggggccgtgggagggccatggagcccccagctgcaccccagcaggcccggggctggcccacaccattcctcactccccacagcctctccacccctgattttggcgagaccctcgtccgtacctccaggctccatgtctgcctcagcatcgctctatggattctcccagccctaaactggccccatctctcctctctgccctcatgtgagtttggtttttgaagcctctagtggtccctggggccagactctgtggccttggacagggagtctcccatgtaagccacaggttccttctctgttgagtgtgtgagggaacatgttggagcccttagtgtggcggcagcaagtgccccaggtcctgtaagaaacacaaaagggtgcggcgggagacttgacattttctaaatctgggagggaacgctgccttcctcacgccgaacttcagtgaaaagcagactcagaagcggtcccaaggtgccactgtaagctgggtgaaggccagcgctgtgtgcttccagttccccctcggcatctgtagactgagtgttctctggaggtggctggctgtcgacatcctccaggcagcctccagcaaaaccagtcggagttgggcaacctgacgctcagatgattcacctctgaatggagggcaaggtgatatttggaagggtgtgggcccctgggatgctgggcaaacgggcagcgggtgcctggatagtgggcctacagctcttcccagtttcgagtcaattccaatgtccatgatgccaaggaacagaggctctgatgttgagcagacttgaaggtgatccaggcacatggagtggccactcaggggcgtggctcctggctgtgctcttcctatatgggcatttcccatgagaaggcttcacaggccacctggctgctcctggcacacggagaatgcccagatgctgacatgtgccagacaacacacgtacacctgataggccacacacatgcaacatgcaaacacacgtgacgggtaacacctgtgacagacactacatgacaacacacgtgca

SEQ ID NO: 8560 - DNA, 2037 bp, Artificial sequence
  DNA replication origin
gtctcctccctgcctgacctcagcgcgtcctccccgtcctcgcagtcgtcgggctgtgcgcttcccccctccagcaacagccgcagttcttctcctagggagggacgtcgtcctcctccctcctgggccggccatccctgcctcggggcttgccagtggctttggagctgcccgaagggctggccgtggctgcggaggctcggcctgcacttggggaagaggaaggacccggcgcgagcggcctctcggcggagctggggcgtctgagcgcgagctcggtgggtccgcgtggcgcggagctgggaatcggtgccggcgcgggctcctccgcaggccgctcctggctctctggcgccctctgctggccgctcgcgcgcaccgcggacacgccgggccggggcctgcgcctcgctcacctgccccggcctaggcggtcgctgtcccctgcccttggccagaccagttccggccaggctctgcacctcctccccgccccagccaggttgcaccccgatggtctccctgcccaaggaagagagaagagaagggacgccccgagagggtggacatcagccacagccaccttgtctttgctcttaccctgtgtcttgcatgatttggaggtggtgggaaaaccgaggctgctcaaaactcgtggagaattccgcctgcaggatgacatgaatgcaccttcgcattgcctaccaacagatcttttttgagcatctctgtggaccaggcgtggtgatgggagaggggatattgtcgtgaacatgacaggcatggccttcacacagtggggctcagcgctgggtgacaaggcattgagaacggacattgtcaattgggcaaaaggaggccaaggagaagtgctggggtcatgggaactgagaaagacaggaggctcagcaggtcttggagctgggagagggacagcagcagcggctgttccaaaggaagcaacagctgagagaggtctcagagagttgttctcagcccagtggagcatgttcgggcagagggaacagcgtgtgcaaaagcccagaggctaggaaagaagcagaaagaggactgtggggctggagcatggagggcgaggggagagaggtgtggtgggcagacagattgcctgggacccagccgtgcagggacagaggagataggggatccttgcaggcccccagccagggctcaggcacagagataatgcaggtgggcaaagagaggagacgtggagaaatattttggaggcatgccctgatgaatgagcccaggatgcacccttagtgtcagtgtggagctccttccttggctgtgtgataagctgaacccgggggtattttctggacatcgaggtgctacaccaagagtccaggacaggctaagtgagcaccagcagctcctggcctacctcaaaagcaggagagacaggggagactggggaggctggggaggaaggggaagccaggaaggcaggagaggccagggaagcagaggaggccagggaggcagtggaggcaggagaggctggggaggctatgtcctttccatgattctgcccgggatcctaggcccctctactccctgagcttccccaccccaagcgctggaaccatgttgcacaatggtctccccactaagctcctgatggcggcccctaccctgctgtgctccctatttcaaccctaacagctctcacagtgggcagcacataggcgctcaggaaacacaggtgggagagcacatgggtctgctcagcaccttcctctctcctccagctctcccctgtcatgaaataattctgctaatgacacatgggctttgagaccctcttctattactttccatatgctaatccatgtatacctcacagcagccctggggtttggtgctattagatgcccatttttacagaggaggagactgaggtataaagagggtaagtgacataggcacagtacaggggctggggccaagtgatcgcagcactaaatccccaaaggcaaggtggacgcagttaccataaaagacaacaga

SEQ ID NO: 8561 - DNA, 1095 bp, Artificial sequence
  DNA replication origin
tgcgaggacggggaggacgcgctgaggtcaggcagggaggagaccggcacccagacaggtggcgacggcagaggagtaagtgacgcgggcgcaggggtccgggggtgccggggacgcgggggtgccggggacgcggggtagggtgggcgggaggctccgtggccggccctgggttgaagttggtaactgagcggcaactccggcgggcgcggagtgacagctcgtgacggcctccgagacgccagctgccccttctcggctgtgtgccttcgacttcctgattctcccacgacgtccctggcctggagacccgctggactctgcggctagccaaaaggggaaggggagccccgcgtcctgggggcccccagcaggggaaggggcgggggttgccccgggcatcctgtctggggcatctgtctgggactctgccggtgcctttcacctggcgaggggcttgtggcgggggcaggggggaagtcgctggcgccaggcttggccaagccctgctctgctgggctgcgggctggcggcgctcacccagctcctcacctgccccgcatcttcctgtttttcttccctttctggttgggcagcgagagttgagaggaggcagatggcttacatcccagaaatcgctctcctctttccatccctacagagagggacagagagacaaagttccttgcttcccccggggcgctgtccctgtgagctcccggtgtcctgcacacgtggaaccctgagtcaccgggcctgtgtgtgtgcgatggggctccgtggccagcctggcctcctggggttcactttctgctttcctaccccaactcttcctgtgtggctttgctggccttccactgaggaggcacgtgggtttggagggcagatgaggcccgctggagagctgtacccctcagtgagggctgccaccttgatggtttttgatggataatggggttgaccgctttgttccttccacatatttttatgtttgaccatttgctcagcagagcgtgtcttaatcatttgattcgtggtgaatgagccccacatgggagagagggcggccttcattctgaacccatttaggcagca

SEQ ID NO: 8562 - DNA, 1280 bp, Artificial sequence
  DNA replication origin
gtgaggttaattaagtcctgttgtggggtttgagggctggaatttaatttttggagttttatttaatgtcgggagcagattgggtaataaaatgtatattgagaataagacggccttttgacattttagggtctagggctgtaaggcatctcagggttgctgccaaacgagccatgaactggggtggatttttatatttgatgaaaaagagcctaaatgctatctgatttgagataaagataaaggagcatttaccttgactatgcctttagatccagccacctttttaagaggaaattgctgggcaggttggggagggttagtcacggaactaaactgcaagccagacccagtgtgaggaggggaggtgataaaaggattatagggtggaggagcagaggctgaggaagaattgggacctagctcagcctggcaaggaggggagaggtcagatgggtctgtagaaaaggaagattataaagactcagcactcttggggttgggactgaagggacaggtgggagggaaagaaggaagttttgggacgagttgcattgggaacagagactagggagggaccaatgtgtaaaagaatgcctggacatcaggcatctcagaccatttgcccatcttatgacaagaattatctagatattgtagcatggaaaatttgaaagtgccattttctggctatttggaaccactgttgagtttgtattggggtcaagcggcattgtagaagaaaataaggcatttagattttaggtcagttgtgagttgaagaggttttaggttttgaagaacacaggctaagggagaagaaaggagaatggagggtggaagcttgcccatagtgaaggaggcaagcctagagaaaagagggagtagagacatggagagaagggatggggggttcttgccttccagaaaagagggaaaggggttggggcacagaaataaagggttggggtgcagagataagaggtcaggttgtggaaataagggatcggggctcagaaataaaagggcgggcatggaaataagggatcagggcacagagataagaggtctgggcatggaaataagggatcggggtgcagagataagaggtcggggttcctgcccctcccccagaaaagtgggacttgctgctaagggtgaaggaccaaggcaggcatccctgcgtggtctgacacctccgaaacctgggtgaataatcagagaggcgtccctgcaatgattaaacaccaagggaaggctgccttccctagtccatgacc

SEQ ID NO: 8563 - DNA, 1968 bp, Artificial sequence
  DNA replication origin
tcgtgaaaatgatcgtgaactgtgccccacaccgaacgcgcgtctgccccccagggcggtggagacgcccccagcttccgccgccagctcgcggggcagaaggggtgcgagcgactctggccaggccccagggacggggaccgggtctcgcggccctgaccggggagagcccaggaacgcacgtggccggagcgccaggggtttcagcaccgagacccatcccgtctgcccctggactcccgcgacccccgcgggcctctccgctcgccccgccggccacctgccaggggaaggagcgcagtgagcgcgccgccaggaagcggcgctcgaaaccctgcagccagagttctgtccccgcgttctcctcgggcgccatgacgtgggcggagccgcagcgttgcctggagacctggaggaagccgggcctggactgaagagggggcgggccgagggcagtgcgcgggggcagagagggggcggggcctggggatacggtcaggaggtgcgtcctgggggcggactctagggcggggccaagatgagcgttaggagggcggggcctggggtgtggccaggatgaacgtcatgagggcgaagcctggggtagggccaggataagcgacgttggggcaggtcctggggagagtccaggttggcggttcctggggcggggccaggatagggcgatcctggaagctgggcttcggaagcgtgcaggttggtggcgtcctggaggcagtgccttgcgtgggggcaggataagagtcctggaggcgggcattagggcggggataaacgccattgggttcaggaggcgggactcagagccgagcccaggagagaggtcttagggcggggctaaagccagacccagggaagggctcaggaggcggggcaggggcggggcgttgactatgtcgtagcacacggccaggcggtgcgcggactctgggaggcgaagcttaggacgggcccacgtggggaggggcccagggtccgggaggcggggccgagtccgggctgggctgcgctcaggaggtgggccctgggaggcggagcttagggaggggccggtgtcgggagggacccagggactgggaggccggtcggggctgggctcgggggccgagacctagctgggcttggggcggggccgagacggagcgaggggtccagggtgtgggaaacggggagggatttgaggaggggatcggaatgtggctccagttcgggaggcgttacctgcggagggtttgaggaaggcccaggagcgagcccatggtcttccgacgcggggccaggggcgggccccaggatccggagcttcgggggggccgagtccgggtttggggcccgggaggcggggccagttaggtcgagggtccctgggatcgtcgggtcaggccttgggctaacgtaggcactctcgcagttcctccgccttcaggaaggtctttttagcaggggccttacgggtgcatgcttcggtcctggaggacttaggctagcctcctctccatcagcgccacccgtctggggcccgaaaggagggagctttccctctgtcccccagcctttggactgtcaccaaacaagccattcgttcaccaaatactttttaagcgcctaccatgtgcctgacaagggatatgtaacggtgagaaaaactaggtgtggtccaggcccttcagggactcaggggctcgtggaagaagtggatattgaagtacttatcacacaaaggaggataaaagtacgatagcgatatctaccacgaaggtgagcagacagagctagcggggcttgcaggaggagttttgatcttgcagggacaggaaggaggagttagctcctgcggggtgggattgggggtggtagtgatatagacgtggggacagagtggaaaacaacaaaaatataattattttagttcaaagttattgtgtcttgagttgaaaggcagggcag

SEQ ID NO: 8564 - DNA, 1193 bp, Artificial sequence
  DNA replication origin
agccgagacggggccttggcactccatccagcctaagcaacaagagcgaaaatctgtctcaaaataaaaataaaaataaaaatagaactaaaaatagcagggagtgggccgggagcagtggctcatgcctgtaatcccagcattttgagacgctgaggtgggggtatcacctgagatctggagtttgagaccggcctgggtaacaggctgtgaaaccctgtctctactaaaaacacaaaaattagctgggcatggtggcacgtccctgtgatcccagcttctctggaggctgaggcacaagaatggcttgaacctgggagatggaggttgcagtgagccaagattgtgccaccgcacttcagcctggaggacagagcgagactctgtctcccaaaaaaaaaagaaaaaaagaaaaaagaaaagcagtgagtgggctgggcatggtggctcacgcctgtaatcccaacactttgggaggctgaggcaggaggattgcttgaggccaggagttcaagaccagcctgggcaacataggagaccctgtctctacaagaaatttaaaaattagctgggtgtggtggcgcgtgcgtgtagttccagctgcttgggagactgaggtgggaggatggcttgagcctggaagattgaggctgaagtgagcgtgccactgcgctccagcagtggttgggggaagggagggagggggcgcagtggggaaacggagcgaccgtgtctggaaaaaagaaaagagcaggaagtatgcatacagatatgtgtgtatgtactgagctatggtgtgaaatcattcctgactgcgggttatagtcaaatccccatgaagagaatcactacagcccacgggtgtgtcagggacacagtgttgtgagccctgggaaggcagggcctgtggccagcactttatcaacactggcacatgcaccctatgaggcaaagggatttgcattgtccccgtacagagtgggacactgaggtcgccaggggcatggcgactgtaagggacagtgctggatgtgagcctcgcctgcaggaggcggtccaggaagcgtgggtggagcggctggagaagttgagggtcgcgtggcccgggaggctcccggaggagggaagggcctatctcagcgaggggcataggcggggaaggtgcggggcgaggcggccgcgggtccctggca

SEQ ID NO: 8565 - DNA, 1600 bp, Artificial sequence
  DNA replication origin
cacgtcttaggtcggggggaccccctccgagtcccgtgctgtcttcaaaggccccagtctctcctcccccacgttggggacgcccctcccagagcccgggtcacctccgggcttccgaagccccctctaaggcggagtggagccttgggaacccctcggccaagcacagtggttcgaaaatacagctgaaaccctgcgggcccttagcaggcgccccagcgccggagcagggtcagggtcttcttgcgacccggccccgctccagatccccccagctctcggcctcggacccgggccgcgtgtgagcgcgctttgcacctcctatccccagggtccgccgagagccacgattttttacagaaaatgagcaataaagagattttgtaccgtcctgactggggagtcccaggccgcgtgggacggagcgcccctcggatgcaagcccgtctgtcccagcctctgggcgcggtggtgacaggccctgacctagagggaccgcggggtgtggggagtgcggagccctactggggcggggcgaggtgtccgtaggccccgcccaccagcccttcctccctcctgaggccccgccccccatacctgcctgcctttgccagccccagccaggagaagggagtggcggagcggctggcagagacagaggagggtgtgacggcgttgctggccccccatgggtccagagggcgagacagactctggattcacaccctccacgtgcctgtgtaggcatcctcggccctccagcgaccacccccacgtcggacagggtccacttccaagccacggtggggtcaccctgtgcccagtaggggccttggaagtggtggttggaggccaggtacgctcggttactaccctttcccggctacagcctcagctgcgatgcccacgagaaacaggctggtggaggggcagaccccctacaagacctgaaggtgccgttcctccacccgctcttcttgtggccagaggagagggacacccccgccatgaagagctctgaacagttgggtgaggacaagtgggggccgtgggagggccatggagcccccagctgcaccccagcaggcccggggctggcccacaccattcctcactccccacagcctctcttcccctgactttggcgagaccctcgtccgtacctccaggctccatgcctgcctcagcatagctctatggattctcccagccctaaactggccccatctctcctctctgccctcatgtgagtttggttcttgaagcctctagtgggccctggggccagactctgtggccttggacagggagtctcccatatgagccacaggttccttctctgttgagtgtgtgagggaacatgttggagcccttagtgtggtggctgcaagcaccccaggccctgtaagaaacacaaaagggtgcggtgggagacttgacattttctaaatctgggagggaacgctgccttcctcacgccgaccttcagtgaaaagcagactcagaagcggtcccgaggtgccaccgtaagctgggtgaaggccagcactgtgtgcttccagttccccctcagcatctgtagattgagtgttctctggag

SEQ ID NO: 8566 - DNA, 1678 bp, Artificial sequence
  DNA replication origin
cctggccgcggcgcgtcctccccgtcctcgcagtcctcgggctgtgcgcttcccccttccagccccagccgcagcctcttctcctcgggaggtacgtcgtcctcctccctcctgggccggccatcccagcctcggggcttgcctgtggctttggagctgccggaagggctggccatggctccgggggctctgcctgcacttgggttagaggaaggacccggcgcgagcggcctctgggcggagctggggcgtctgagcgcgagctcgttgggtccgcgcggcgcggagctgggcaacggggtcggcgcgggctcctccgccggccgctcctggctctctggcgccctctgctggccgctcgcgcgcaccgcggacacgccgggccggggcctgttccgcgctcacctgccccggcccaggtggtcgctgtcccctgcccgtggccaggcccgctccggccaggccctgcacctcctccccgccccagccagtttgcaccccgaaggtctccctgcccaaggaggagagaagagaagggacgccccgagagggtggacatcggccacagccatcttgtctttgctcttaccctgtgtcttgcatgatttggaggtggtgggaaaaccgaggctgctcaaaactcttggagaattccgcctgcaggatgacatgaatgcaccttcgcattgcctaccaacagatcttttttgagcatcactgtggaccgggcgtggtgatgggggaggggatattgtggtgaacatgaaaggcatggccttcacccagtgggactcagcgctgggtgagaaggcattgagaatggacattgtcaattgggccaaaggaggccaaggagaagtgctgggggcatgggaactgagaaagacaggaggctcagcaggtcttggagctgggagagggacagcagcagcggctgttccaaaggaagcaacagctgagagaggtctcagagagttgttctcagcccagtggagggtgttcaggcagagggttcagcgtgtgcaaaagcccagaggctgggaaagaagcagaaagaagactgtgaggctggagcatggtgggcaaggggagagaggggttgtgggcggacagattgcctgggacccagccctgcagggacagaggagataggggatccttgcaggcccccagccggggctcaggcacagagacagtgcaggtgggcaaagggaggagacgtggagaaatattttggaggcatgccctgatgaatgagcccaggatgcacccttagtgtcagtgtggagctccttccttggctgtgtgatgagctgaacccttgggtattttatggacaacgaggtgctacaccaagagtccaggacaggctaagtgagcaccagcagctcctggcctacctcaaaagcaggagagacaggggagaccggggaggccagggaggaaggggaagccaggaaggcaggagaggccagggaagcagaggaggccagggaggcagtggaggcaggagaggctggggaggctgtgtcctttccatgattctgcccgggatcctaggcccctctactccctgagcttccccaccccaagcgctggaaccatgttgcacaatggtctccccactaagctcctaatggcggcccctaccctgctgtgctccctatttcaaccctaa

SEQ ID NO: 8567 - DNA, 1498 bp, Artificial sequence
  DNA replication origin
aattggggcctagctcagcctggtgaggaggggagatgtcaggttagtctgcagaaaaggaagattagaaagactcagtgacgcttgtggttgggactgaggggacaggtgggacggaaagaaggaatatttgggatgagttgcactaggaacagactagggagggaccaatgtgtaaaagaatgcctggacgtcagtcacctcagaccgtttgcccattttacgacaagaaatatctagatcttgtaggatggaaaaattgaaagtgtcattttctagatatttggaaatactgtcgagtttgtattggggtcaagaggcattgtggaagaaaataaggcatttaggttttaggtcaggtgtgagttgaagaggttttaggtttttaagaacacaggctaagggagaagaagggggaatggagggcagaaacttgcccatagtgaaggaggtaagcctagggaaaagagagagtagagacacagagataaggggtggggggttcttgccttccagaaaagcgagaaaggggttggggtgtagaaataaagggttgtggtgcagagctaagaggtcagagcacagaaataaggggttggggtgcagagctaagaggtcaggtcacggaaataagggatagggtcacagagataagagtttggggcatggaaataaaggatcggggcacagagataagagggggttcctgcccctcccccagaaaagcgggacttgctgctaagggtgaaggagaaggggttgaggggttcttgccccttcccccagaaaagcgggacttgccactaagggtgaaggaccaagtcaggcgtccctgcgtggtctgacacctctgaagcctggctgaataatcagagaggtgtccctgcaatgattaaacaccaaggaaaggctgccttccctagtctgtgacaggcaccggaattttggctccacggataaaacgtgtctcctttgtctctaccagaaaatgaaaggaattgaaattaagagaagggagagattgaagtgtggcgccaagattgaaaggagaaagaggttgagggatagtgagggaggttggagaagagagtaaaaagaagctgcttcccagatttgaaattggtgagatgtttcttgggctggtcagtctgaggacctgaggtcgtaggtggatctttctcacagagcaaagagcaggagaacaggggattgatctcccaagggaggtcccccccccgcatccgagtcacagcaccaaatttcacatgggtgtgtgtgaagagaccaccaaacagggtttgtttgagcaataaagctgtttatttcacctgggtgcatgcgggctgagtccgaaaagagtgagcaaagggagataggggtggggccattttataggatttgggtaggtaaaggaaaaggggaggttgttctctggcaggcaggagtggggggtcacaaggtgctcagaaggggagcttttgagccaggatgagcaagg

SEQ ID NO: 8568 - DNA, 823 bp, Artificial sequence
  DNA replication origin
ggctcaggaggcggggccggggcggggcgttgactatgtcgtagcacatgaccaggcggtgctcggactctgggaggcagagcttagggagggccgacgtggggaggggcccagggtccgggaggcgggtccgagtctgggctgcgggctacgctcaggaggcgggccatgggggtatggccaggcgctgctcgggccctgggaggcggagcttagggaggcgccggtgtcgggaggaacccagggactgggaggtgggtcggggctgggctcaggggccgagacggagctgggcttggggcggggccgagacggagcgaggggtccagggtgtgggaaacggggaggggtttgaggagggaatcggagtgtggctcacgttcgggaggcgttacctgcggagggtttgaggcaggcccaggagcaaggccatggtcggccgaggcggggccaggggcgggccctaggagccggagctttgggcggggccgagtacgggtttggggcccgggaggcggggccggttagggcaagggtccctgggatcgtcgagtcaggccttgggccaaagtagacactctcgcagttcctccgccttcaggaaggtctttttggcaggggccttatgggtgcgcgcttcggtcctggaggccttatcccagccgcctctccatcagcgccacccgtctggggcccgacaggagggagctttccctctgtcctccagcctttggactgtcaccaaacaagccattcgttcaccaaatacttactaagcgcctaccatgcgcctggcaaggcagatgtaacagtgagaaaaact

SEQ ID NO: 8569 - DNA, 948 bp, Artificial sequence
  DNA replication origin
gagggcgctcaccatgagctgcgccgggctgcggagcgcgcggggacttctcttgcctcctgaagcgcctctggctccatggccgtggtgcgcccctccagtctccgcgatggggacaggaagcggctggtgctcgctgacagccagggctgttctcgggagtctgtagcgcgccggacggcagcggcagcggctgtgtctggttcggagcgagagaagagagcaagccgccactgaggggctggggcaggcagtcgcgggcgccaggctggcactgaggcgctgccgcggtccctggccgctcccaggccccgcgtcccgccccccgagcctccgcgctcgactcccgccccacctgtgccttggcgccctcgctcaccgccctcagcgcgccagagtgtaggggcgatcccgcaggtccgaggggcgccccagcgccagaccctagtccccgggccggggaaaattctccccgggaaaaccgaagggtgcttggcgcatccctggagccttagccctggccacgcttggggaacaagaggtggggtaaggatgaggacgcgagggcttccggagggggaaagagcatttgaagggtaagcggggcagccttggattacccacagacccgagtcccaatccggactttattcctggctctgcgactttaagggccctacataactttacccggccttggtttccttctccacagcgtgggataatgattcctactcctgggacagtgtcagaactcatggaagccgtctaggatgaggtgtccagtagacagtgtctcctaggaacaggctcccgcttcccccagcccctctctcaacaccctgaggctggggcttcagctgacctcttgggagattgtccttttccccaccaccgcccccagtccttgaacgatttttcctttggggaataattcggaatgaactc

SEQ ID NO: 8570 - DNA, 1105 bp, Artificial sequence
  DNA replication origin
taacggcgttgggcatcatgtggatgtaggcagctgcgatttccttgtggaagacgatgtcttggttgtaggagatgagctcattgctgatgttcaccgtctccaccggcgtgcgggagcagaagtggctgcaccccagcagctgggcaaacaccttctgaaagtcggcgttgaaggcatagatgacggggttgagtgaggagttagcccagccgaaccagacgaagacgtcgaaggtggtctcactgacgcaggggaagccggccggagggccttcggggtgtccactgcagaaagggaccatgcagttaaggatgaagaagggcagccagcaacacacgaagacccccatgatcaccgacagggtcttgagaaccttggtctccttcttgatggaagcgcgcaggctggtgtcgggcgcgcaggctgcgctgctccggcagctctgcgcgtgctctgcggccctctccagggaggaaatcctgcggatctgcacctgggcgatgcggtagatgcgcgtgtaggtcacgatcatgatggcaacggggatgtagaagctgatgagcgaggaagagatggcgtaggttcgattcaggctggagtcacagttctctgcattcacgtcgggctcccaaaagtcctcctcccagggcgtccagttggccaggttgtttggcaggtccagcccgccccaagaggccgcctggtccctgtgccagttgagctggaccggaatgaaggagatgaggatggacaaggtccatgccaggccgaccatgaccaaggccatgcgctgagtcatcttgcgcttgtagcggaagggcctggagatggcccagtagcggtccacgctgatgacgcacaggttcaggatggaggcagtggagcacatgatgtcgaaggccacccagacgtcgcagaacgctccaaagggccagtaaccggccacctcggcgactgccttccagggcatgaccagcagcgccacgaaaaggtctgacacggccagagacacgatgaagacgttggtcatgttggcgcgcaggtggcggctccgcacgatggctgcgcacaccagcacgttgcccagcagggtccagatgat

SEQ ID NO: 8571 - DNA, 929 bp, Artificial sequence
  DNA replication origin
cagcagtgacatctaaactcatggcttgaggatgagtaggatttatctgggcgggtctgtaggaagagagaggcaatgggggcggggagttctagccagaggtaagagtatgggggaaggccctggcatttgttcagaggcagaaaaactcaggtgtcaggagcagggggagggggagggggagggggagagggagagggagagaccgctggcaaggcaggcagcagagagggccacacctatgctgtaaatgagcacagggaaggatgggcaaggtgagaggttcccaggacctgtggctgcttgagggacaagggcatctcctactgtttccatcacagacactggcctagagatgacagattttctgattttcaagagacattacaaatccagatttgtcatatttcataatttgtaaatattggaaactgacctttaaaaaacaaaaaacgtcccacctgtgggctgggtctagccttagggccacctttcacacaccttgatggggactgtgtaactgtgaaggcttatttgtaccccaaagcaatgggacatcattgaggacatgatgagtgcttcaagaaggcttttggcctgcagcatggagaaaggattggatcccagccaggactgaaggggttgactggtccagttatgagttgggtcagagtaatggcagtgtggatggagagaggcagatgaggttgagtgaggttagtggtgatgggatgtggtgtcccagagaggaggagtcaaaaataactctcaggcgtctggcacatcagccagatagaatggtggtaccagatgctaagacagggagctatgaaagagaaggagtagctctgcaggggaaaaggtgacaagttcactgatgtgaactgtgcatgtctcagagcaactggaaggaagagctgattcgagga

SEQ ID NO: 8572 - DNA, 1009 bp, Artificial sequence
  DNA replication origin
tacattcctgctttggagctgaggttttttgctgtcattcagccttggccttagttgtagtcaccagtgaacataagggccctggccagttatatttgcacaggtcagttacagcagtaacagctttcagcctctgttgcttgcaggaacttggagtatttacaaagccagtgccctgactggaagctcacgctcacttggcctgggtggaccatggaggacgcctgagactttctctggggttcccggggacagttggcagctaaaggagggcacagcaggccccttcatcagtgttgtgtcgtcatctgctgaaatgttttttgcttgggcaggtatctccaaccttctagcatgttccatcaggttcactgtgggccaggagctgagataccagtggcaagccttgagacccaagccccaggacccagggtcatcacagcctacctgtaaattggagtagtgacctctggcccctccgtcacccacctgagactgggaggacataggaaagtaagagagctttgaggggctcagggctcactaattgtaaatgttgctgcctggggcataacagagttacggaaatgtcgcttctgtgtgcttgtttgcatgacctgtgtattatagcgagtctcaaaggcggcacagacattgtacaggtgccgggggggagtatgtttaggtttgccattcaacaggattctcagaaaaagaccagctattcctgggcaggatgcctcagtgcacaggtgggaggtgggggctggtgggacctgagcatagtgtgacagagtagaatggcctcccgggtcaagtccaaagcttctgcttcaaatgggcaccactgggccttgaaccaggccctgtgttggcagggctgggtgctgttacatgctgtcacttgccgaagtccgtgggtcctgggtctgctcgcgtgtgtgactccttgattgctggctggtgtccttcatgtcctcagaggcccccggactcctccaggggtggt

SEQ ID NO: 8573 - DNA, 1101 bp, Artificial sequence
  DNA replication origin
actccactcccggcacgcccggtgccgccttccggctccagtccccgggctcggcctcggcgaggtgtaattcgcagcgcgggccggccccggaggctctcggcgagcgcggcgcggtaacaagtgggcgaggatgccgtacgagatcagtaagtgccgcggcgcggggcccccgagcggccgccgcgctgccccggccccggtccccggcccctaggcgccgtgcgggtggcgggggagtcctcggcgcgggggaggggtgcgggcgccggccggaggcgtggcggggccgccctcggtggtgcagggcgggacccccgacggggggtgcgcccccaagttggcgccgtgggccgagccggaggagccccgctgcccccaagggcctggcccggggcgcggaccaggaagtcgcgcggttcctggcgctcgtggaaagtggaggccgccctcccggcgcagtcaacaggtgaccggccgagaccggtccggggctccttctcccttctgtccccgccgtccccgccctgccctgacatgccccgccgcatttgtgtctccgcagagaaggtgttcgccagcctcccgcaggtggagaggggcgtctccaagatcatcggcggcgaccctaagggcaacaattttctgtacaccaatggaaagtgcgtcatcctaaggaacatcgacgtgagtaccccctaccccgggcgcggttctgctccggagccaccttgggatgggataattcgccttcctctccacttctcacctcctgcccattggcccggggagggtgagggcgccacgccccctctaccgggagccacacctcggagccccggaagccggcctcagattcacccaggtccttgtctgctccttcttgatgaggaaactgagtcttagttcgtttctgtctacggtcatagcaccctgaaagcgccggatcgcctctgatcttggaagctaagcacggtcaggcctggttagtacgtggatgggagattagattagttcattccttaaaagcaagggctccggatttgagggatcagactgacccggtcggccgctgcgtgaccttgagaagattggcgattt

SEQ ID NO: 8574 - DNA, 1232 bp, Artificial sequence
  DNA replication origin
ggccgctcgggggccccgcgccgcggcacttactgatctcgtacggcatcctcgcccacttgttaccgcgccgcgctcgccgagagcctccggggccggcccgcgctgcgaattacacctcgccgaggccgagcccggggactggagccggaaggcggcaccgggcgtgccgggagtggagtgggcggtccgaggccggggctcagaggccagctcgcgcctgccctgcgcgctgtggttgcggacgccccgaacccggaagcgcggtcccgcgcgcggctcgcccccagctttgaccatatatagtcaagcgctcggctcggcggctgcggtcccggcgagcctgcgcggacctggcgctcccctcccccgccggccccggccccgcctccgccttgctcgccccgccccggaagtgacgtatagcacgccccgcgggcccttgaaaaggcggcgcagacaagcagccgcgtcagaatgcttctgggagtcggggggtgggtgcctttctgttgctagcttgtaggagaagctgggctgtaggaagtttatttgcgggggggtcttaaagacgctgaaagtactggcgggctttggtgggggtctggaaaaacctctctgtacctgtgaccgcgttgcgtggcgggcgctccccggcctctcctttttgaccggtcccgggcgttgcccagccgccagtcctcctgctcgggttttgtaagcaggagagggatgctttttacgtcttcttaaagtacggttaagtgcccttgcttgaagtagttgctggcaacaagaacgtaggggttactctttgttgggcctgaactcgtgctttttctctcaaaagttgagcttttgaaaggcaaaaaaggcgtgggggatgggggagctgtcggtcttaaggaagttaaaggttatttcctaaacaaaacaagtctcactcctaaaaccagggtagtggctcagttgtggcgggagagcaggggctgtaaagtgtccaagtttctagtctcatctttcagtaggatgggtacaagctttccccttggggctctgggggctgggagggttgtaaaagtgggagaaagcaaagtatttggcggggtgcgggcgggtagctgaatgttgttgtaagtggaagaggaatgctgttggcgtctttctctaagcacggttaagtgctttttcttgaagtagttactggcaacaagaacgtaagggttactctt

SEQ ID NO: 8575 - DNA, 1096 bp, Artificial sequence
  DNA replication origin
ggagggcgagggcccccggatccgcgtgtacgtgaccgaagcgccagctgcggccgggtcgtgggggcgcgcggggcgggggcctgacggggccaggccggggcgggtcgagcggccgcggccccgcgtgcccgcgctgagggctggcgtcgtggcaagtggcaccgggtaggccgaacgcgggctccggctggtgggcgtggggcaccggctggggtgggggcccgggccgcggcttggcgcgcgttgagcaggtacgcgggcctggcctagggtcggggtccggcccggcgcccccagctcgcctttgtgcgccgcgaccccgcggactcggccgacgcgccggggcgaccgaggcgggggtggcagcgtcccgcggggccgttcgtgtggcgccgctggcccggcctgcgctccccgcccccagcgttatgaaggatgcctcctccgagggctcctaccgtccgcgccgagcaggaagtgtcgtcaggaggccatttttaaagcctcctgcgggcctcggagctgagcgttgacggttttggttttcttcggttggaagaaccccggccttccctcgcggcgagcgggacgcgcctgggagacgacgatgcgcccgatgcacctggcctcgtcctccgagcgcccaggctcaggcgcgctcgcctcggatgctgcctgccatcgggggagcgtgccgacaataaactcgaaaaccagcctggcattgtctttccttgagagggtcaggggtgggctcgtccatcgaggtcctgcgcatcttttacggggggcgaggacataggaggttgagaagagatggtgaaggtttgaattgttccaaatgctgatgtcattgtgggacctccccataccggcctgcccgtcttatcttggtgtctttggggtttggggctctgtaaagccaagaaattgcagggttcaaaagaatgaaagtttcttaaccagaaaggaaaagccaaaagagcgaacgggagaaaacacttaagtctttataagttgggtagttaatgtatcccgttacaatacctctgactttaaaaattgtaataatgaacgatttatcaacgtaaca

SEQ ID NO: 8576 - DNA, 1321 bp, Artificial sequence
  DNA replication origin
acgtacacgcggatccgggggccctcgccctcccgctcagctacttacccggcaggccggattcgggtgccaggtcccggcgaaggggcgtctacaccgccggccgcagaccgccggcgccgcgcccgctgtaggtccctacccggggggcggagcccgcgccagccccgcgcgtgcgcaatgtgaagcggcggcgcggctccagcgaggccggcgcctgaggtctctaaggctgcgcccgcccccgccgggcttctaagctgtccagagcggggagcctcagacccagccgagccccacttctgggcttagagcttgacccaacacgttcgcaccgtagcgagcgaggtccacatttagccatgccgcaggcaaaagaaggattcggcttcggtcctggcccagtctgccatcccggggcgcctgccttgtaccgggtcccgcggagggcggccttggcgcctgcctccctggagcctgcagtcctgcagtgggtgagtgaaagcgagagaagaggagctcaggtcctcagcctccaaactcgtcttcttggagagcttcagtgaaggagatggccttgaagtcctgggtacaaatcctgactctccctactcctttacatcttagctgctggaccttggcgagaaagtcccctgacctctctcagtgtcttcatttctgaagacggggaaggtcgtatgtgaggcgcaaagcctcctctagcagttgggcgttgcgagggtcagaggggacaatgactgtgggagtctggagagggtgtgagctcatttaatgccagagtttctttcctgcctcctggacttcggtgctattttgggcgagccaactgccctctagatacacctgcatctacggtccggaaggaagacatatttagaatagagcctctaagaggaaagaagaagaccatattgccaggtcccgcacaatcagtgactccccacaaagtgaaacagctctccagcaggggcaggttgaggcatgggagcagcgtcactgggaagtacagtttcttcgggatgaacagctaaagtttatttcaaagctctggaggcgggggcggggcaaggctggtttccatcaccttcctgttggcggccaaaggtcggcgtgcacggacagcggccagtatgctgcacggaggagatgtgggcctgggcagtactgccacacggagaagcggagttgaagaagacaggctcagccacaagtccagcagctgggcaaaacctccaccactaaagtatcaggagctgggcagagaaaatagcagcccagagagcaaatccttcttcctgcc

SEQ ID NO: 8577 - DNA, 1279 bp, Artificial sequence
  DNA replication origin
taagaaatcaatgcaccctcctagttatgactacctaatgtaggagagaagaaggaagacatgaaccagtccttgagtataagatttgggagccaacgttcattcattcactcatgcattcaacaaaacatgtattgggctgggcgcagtagctcatgcctgtaatcctagcactttgggaggccgaggcgggcagatcacctgaggtcaggagttcaagaacagcctggccaacatggtgaagccccgcctctactaaaaatacaaaaattaactgggcgtggtggcgggcgcctgtaatcccagctactcaggaggctgaggcacgagaattgcttgaacccaagagacggagggtgtagtgagccaagaacgagccactgcactccagcatgggcaacagggcaagactctgtctcaaaaaaaaaaaaaaaaaaaccaaaaaaaaaaaaaccgaccatgtatgaatgcccattcagtgcaggcacaggctggtgctgaggctagaggaatgacgaacagggtaaggctcagccctcagggaacattcatttctggaccacgagccttacaaatgcaatgacggggacttgggagatgagctgtaagccacgagtaggaagctgccacaagaagatggagaacaggggagaggagagcatgtacaaaggccctgaggtgggcgcttttgaggaagaaaaggaaaggcagtgtggatttagatcattctaggcgtctacagactctgatcttagagagcccttcatcaaattctgccagtggggagcttggggctcagaggaaggcctccacgagctttccatgatcatcctttctcttgctctgaacttccttccatgcttcattacccacttttatattctctctggcctctaccgctcccgaatattatatgacttgacaaaaacagcactgtccattggaaaagggccaggtctttaacacccaggtcagagcacagacatgtcaatctcagacacttcaaaactttatgcatggacaggagatcccagaaagtggcttttttttcttctaaaacatttcagaagtttttagtaacttccttgagccacagtttgcacatctgtaaaggagggataaaggccccccaagctctgataagacaaccccggttctcaagcttacctcgcctcacagtcctggggtgcaggaggttaaggatgtagagcccgaatcccgaactcatttgccatccttccagctgtgtggccttggccaagttactgccagtctctga

SEQ ID NO: 8578 - DNA, 1165 bp, Artificial sequence
  DNA replication origin
gccacgagcggcgcgctgagcatgcgcgcccgatagagcctcgagatgcgccgggccgcgctgcgctgcagtaccgcccgcggcctgcagtgtcgctgcgagcccggctggcccagctcggcgtgtagagctctaccccgcgcggcgggcggtgcagccccgcgctcacctgggcgtcttcgctcccgctcgccccgcgcttccgaaaatcgggaatgtaatgttttgtttttacattccaatttgctccctccccaggctggcgtggaatccgagggttcctgatgactgcagctcctcgcccctcccgctgtgttcccgccgcctctgggctgaaagcgccatcaggacccgtggcgcgtgggctttgttaagtcattaactgcttgggacatagcaggagcatggtgcgcggcacagaacaggcttggcttccacggcccatccaggcggagccgtcagcgtcccttgcctagaccagagctctggaaagcggagaggcggacaggggccgttccccagatctgttccggaggatgcagatcagaaccagagagggtgcatttagaaactcattgcaacctgacaaagttgcagcgttgtagcgcggggtcagcaacaggaattcgggttgggtggagtcggactcagggagtggtcgcttgtgcgcagaactgcgtagactcgagtaggttcgaaaaggataggcctgggggcaagacctagtccttcaccacaggtaaatctaggcgtccgcgagggtctcctggctcattttcctgcatccactggcctcccaccacactgcgacatccagagtggtcgttacacaaagcaaactgaattaagtcattcccctgctccagagtccttgcagcctccggccctacaggatgcgcccctgcctgcctgccaggtcgtcttataccctctccgcatggtcttgcaaaactgactccgctatgcaccgctgatgcaccaggcttctcccgggaaagacctttgcacgaattatgcctgcctggggtatctctttcccctctcaactcaaaaatcaccttctcagaggcctttctaaccatttcagtactcctcattctgtcacatccctgtgttttatgttcttcataatgaactgaaactgtttgttgtatgttttgttggg

SEQ ID NO: 8579 - DNA, 970 bp, Artificial sequence
  DNA replication origin
ggctgaggaaagcaggaggaggtggtggcggcgggaagatgtaagttggcgcggaatccgaccgcatccgtgtttcgggggctgcccggcaggacgcatcgtgaagccggtccactcctcagccccgcagtgcggcggtggtctggcagcgcggtgcgggctccgagaagaaagagtgtggcccggggcgggcgcattaggaggtgtcgaggccgtggcccggaagtggtcggggccgctgcgggcggaagggcgcctgtgcttcgtccgctcggcggtggcccagccaggcccgcgggactcagaccagcggggagcgcgacctccgcccttggggctctcccgctgggccggagacccaagcccccaacgctaggccctgccctggaagcgctcgcggcccggcgcctggacggggaagttgtgagtgaacgcggacgggtagcggcaaggtcggcgtgtcgggccggtgtcggcgggcgcggagtttctttgtgggatgcggtggaaggtcggctgatccccccttcggagtcattaattcaaacgtgtactccgcgaacgtttcccggactcccgtgtgcaattatcgacgctaggccttggggatacggcccactatggaccgagcacggtggccgagctcagtttgatgggttaccccagaggggcggatacgggaagattaaggttgttggaggagaaacgtggagtaggctttttgtcttgattccgcatgaactgtgcctgaaatgtacttttaaatggggaaggtgctctgaagatttgtgccgaaacgccctctcctcgagatttaactaattgttctctcctctctctggctgttggacgcgcacctttccagaggatgggggaggtaaccgaggtcctgagccggtacctgaacttgggtgaacagagaacctcaacttttgctttctagcactcgaccgcacccagcaaggcgtcc

SEQ ID NO: 8580 - DNA, 1197 bp, Artificial sequence
  DNA replication origin
gcaactcagaaatacactgttacttggctgcctctactctattattgtacaccttgaaggcgaggttaattaagtcctgttgtggggtttgagggctggaatttaatttttggagttttatttaatgtcgagagcagattgggtaatataatgtatattgagaataagacggccttttgaccttttagggtctagggctgtaaagcatctcagggttgctgccaaatgagccatgaactgggctggatttttatatttgatgaaaaagaggctgaacgctatctgatttgggataaagaaaaaggagcattaactttgactatgcctttagctccagccacctttttaagagcaaattgctgggcatgtgggggagggctagtcgcggaatgaaactgtaagcctgactgggtgtgaggaggggaggtgataaaaggattatagggtggaggagcggaggctgaggaagaattgggacctagctcggccgggcgaggaggggagaggtcagatgagtctatagaaaaggaagattagaaagactcattgacacttggggttgggactgaggggacaggtgggagggaaagaaggaagatatgggatgagttgcactgggcacagagactagggagggactgatgtgtaaaagaatgcctggaggtcaggcacctcagactgtttgcctattttacaacaagagttatttagatcttgcaggatggaaaaattgaaagtgccgttttctggctatttggaaccactgtcaagtttgtattcgtgtcaagcagcattgcagaagaaaataaggcatttagattttatgtcaggtgtgagttgaagaggttttaagttctcgagagcacaggctaagggagaagaaggaggaatggagggtggaaggttgcctatagtgaaggagggaagcccagagaaaagagagagtagagacacagagggaaggggttcgggggttcttaccatccagaaaagcaggaaaggggttggggcacggaaataaggggtagaggcacagagataagagttcagggcatggaaataagggattggggattcttgccccctagaaaagcgggacttgctgctaagggtgaaggagaaggggttgaggggttcttgcctgtccttcagaaaagcagagaaggggtagagacatggagagaaggggttggggta

SEQ ID NO: 8581 - DNA, 1030 bp, Artificial sequence
  DNA replication origin
gtattcgaggagaatcactcggcaagcgccatcttgcccacctccccgccctctgcgcgcggccccgccccctacgcgcacgtcgggcgcgcgcccccgcctcagagccaacccgcgccgaccggcggccccgcctgacgagccgaaccactcgcggccctggactggtgtgggggacattccggcgggagaggcgaggcgctgcgtttcccttcaggagacagttggctagaagaagaaaagaagtgttcgttcaaattaaggagagaaaacgggagcagagcagctttcaggcgttccatcaaattcccttttctccttccctcttgagaaagtctctgaagggaatggttcagcctgacggggtggagcagtgacgcccgggctacgcgccagggttgcctggcagccaggagttcgaggaccggcggcggggcggggcctgtctccgggcacccgggacgcccgtagcctggcggagagcgccagagagggcccctgaaaaaccggaccagggaagagggtacctcggggcggatgaggggacagctgctaagggccgaggctgctgggaagcctcagtagcggccgtgaatacagtggagctccggcgctgcttatttcggcctaactcttggtttcctcatctgaacaaccccaggctcccatggttcgttcatcagacgctactgatcgccaacctcctggcaccccatctttaccctaaggcagcagttctcataaagtgtggtctagggacctctggaaatcccgatgacctcagaacaattttcataataatacggacaccttgtctgtctttctcacgttccttctctcactagtataccgtttcctggaggatacgctttgtgtacgacgtcatcactggcagctaagggagcttgcgtttgttgtttttaaacatttctcagttttcatttcaatgcagtagtgataggtgtaacccacataaacataagctctttggaggtcacagtaattctttaacattatagagaggccctga

SEQ ID NO: 8582 - DNA, 803 bp, Artificial sequence
  DNA replication origin
gagacccttgcaaagctggtgtgggggcagcacgaccagctagcagtctccaagcctggccaagttctcattcttgttcttctggactgctgggggcgggtcctggggggcaaaggcccaacgcaagagccaggcttgtttctgggtcaagttctccggcctcagccctcagaatttttcctggcgcctaggcagggagcaaacctcatatgccatcatttcatacttgaccgcattaaaatgcacataacttcccctgaccagctaagggctgaaaaacaaggtccctgaaaacacactccccgtttcaggttcatattggaaaatggttttaaaattggaaagatactgtggtgcagtgtggcagctggggtgtgtgaagacaccctgggagtggctgtggctggcagtggagtgggggactgtgctggggtggccgaggcgtgggtggggggcgggtggggggcgggggtgcagggagggggaggaaaggaggtaaggtgagggaggggattagacctcttggggtcctggcagagcagcttctcccagatgccttgttgaggctagagggatttagacccccgtacccattgggatcatgagcttaagccagtgctgcatgttggaatagttgttttccagcaattgctcttgctctctggatttccagcgcagggtttgacacataataagccctgaaatgttttcagatgaaatattcctacgtgaagcattttatgtttcaagaatggattctccacgcgggcgcggtggctcacgcctgtaatcccagcactcca

SEQ ID NO: 8583 - DNA, 1882 bp, Artificial sequence
  DNA replication origin
gcggcgcagatggctgtgcgcggcgccaacaccttgacgtccttctccatccaggcgatcctcaacaagaaagaggagcgcggcgggctggccgcgccagaggggcgcccggcgcccgggggcacagcggcatcggtggccgcggctcccgctgtctgctgttggcggctctttggggagagggacgcgggcgcgttggggggcgccgaggactctctgctggcgtctcctgccggtaccagaacagctgcggggcggactgcggagagcccggaaggctgggactcggactccgcgctcagcgaggagaacgagagcaggcggcgctgcgcggacgcgcggggggccagcggggccggccttgcggggggatccttgagcctcggccagccggtctgtgagctggccgcttccaaagacctagaggaggaagccgcgggccggagcgacagcgagatgtccgccagcgtctcaggtctgctgcggcttcgcggggatgggggccgggctgaggggatggacgcggagggcaaccacgccgagtggggtggtcggcttgagcaccctgcgccctggggctcggaggctggccaaatcccgaagttctgcgctctggcgcgagctgctctatcacttcgggaactgagcccgcgagagaccggagtagctcctcagagccctacgtcctggggtgaggcctgagacatcctgggccaatgtgcattagactgggttgggagaaccgctgccccttgcgttcgggagtttttgagttcgtcgccagtgctttctgccgtgtctgtccccaaatccccaaaatcagggaagcggaaaagtgaggggttcagagacctcaggtagccagtgacctagctctggaccagagacctgccagttcaaggtcccagggccgggccccacagtaggtggataggtggtgaagaacacctccgagtgggccagagctgagaatctgcagaactagagctttggggaaagggctggtttggctttctcagaccccaggtctgggagagcagccctaggccgaagatcccggattgggtctttagttcatcctggaggcaggagagaggcctcctcagccgtggcctgtcctgtcctgtggtctggaagacccgggtgcctgccctagttgggtacaagcttctgtaggcctcaagcacaggggaccgctggacctttctgctggagttcttcggaagggcgggtacgagaccgagaagctggtgtgggatcagggtccaaaaactcgatgcaggggcaaccctccctctttactctccagtccatcctctcatctaaggcctcggctcagcctgtttccatgtctctcacagcaatcccaggcggctgagggtgaaagattctaaatacctttggccccaggatccgcctccaccttcccttacctgcaccagacaagtgtgtgctgcgaggacgcgcgcgtgtgtgcgtgtgaactaagtgtggagaggcgcgtgaacccaagcagagagacggaaatgcagtctagaatcccaatgctcaacgctgagagccgggagggctttcgcggatgctcgggtcgagtgccccaagttactgaggggagcctggggcccagagagggtggggagctggtctcgacaacacagcgttgacacagcggctgagtctgccgccctccccagaagaggcctagatgggatacccagtggggcaagagtctaagactggtctcccgggcccagggcctcccagacctccgctccgcttgagtgggatcaaagtgtatttccgccccactcccgtgacccctgcagttgaggcccggcctcacctcgtctgtggcgctgacagtctcttgtttctgttccca

SEQ ID NO: 8584 - DNA, 921 bp, Artificial sequence
  DNA replication origin
gagcgcgggcacgtgtgcagcagtttactgcgcgcccccgagggccggggcttccccttccccgcccccttggctttcgcagtcaaatcccgctctccgcccgccgcccgcggaagtctcaccgcgcagcagcacccccagcccgggcggttccggggaccgaagggcgcggcacgtagggggcccgtaggatccaaactgcggaggagaagcaggaggagggaggaggaagaagacaaaggtgtggaggaggaggggagggaggaagaaggaagagaggcagaagactaggaaaaaatgggcccgtgggcgcggagggggcgcggcggggtagagaggcgcggacgctgagcgagcccggtgcctctcgaaagcctcaccggccgcccggccgggccgcgcagctccgccaactcccgggccggcccaagccggagcgtggcgcccgtcgggaggttgcagagttcctggagctcacagctgagcccgaaggaagtcgccctcgatgggcaggaagcgggacccaggcacgcccgcgcggtcgcgtccagatctgccgtcctccgacaggcgcaggcctgctgcgccttcgccacacaccgccactctgggcctggactccgtagttacgccgggatatctctgggcatacaaccacctccccttccccacagtcttttcatctccacccgaccccttgctaggagcagcttctagttgcagctcaagacccgcgagttcaccctccgcgccaagcacccaactcccggctctgcctacagtcacccacagacctaatgatcgactaagcgccgtaatggcccgagatgacaccaggagactcccttgctgtgcgcctccggaagacgcggaacgtagcccctttctcacactcctgggacacaaaaatacccgacaact

SEQ ID NO: 8585 - DNA, 792 bp, Artificial sequence
  DNA replication origin
tggggagcgcctctgccccgccgccccgtctgggatgtgaggagcacctctgcccggccgcgaccccgtctgggaggtgaggagcgtctctgcccagccaccccgtctgagaagtgaggagaccctccacctggcaaccgccccgtctgagaagtgaggagcccctccgcccggcagccaccccctctgggaagtgaggagcgtctccgcccggcagccaccccatccgggagggaggtgggggtcagccccccgcccggccagccgcctcgtccgggaggtgacgggcgcctctgcccggccgcccctactgggaagtgaggagcccctctgcccggccagccgcaccgtccgggagggaggtggggggtcagtcccccgcccggccagccaccccgtccgggaggtgaggggcgcctctgcccggccgcccctactgggaagtgaggagcccctctgcccggccaccaccccgtctgggaggtgtacccaacagctcattgagaacgggccatgatgacaatggcggttttgtggaatagaaaggggggaaaggtggggaaaagattgagaaatcggatggttgccatgtctgtgtagaaagaagtagacatgggagacttttcattttgttctgtactaagaaaaattcttctgccttgggatcctgttgatctgtgaccttacccccaaccctgtgctctctgaaacatgtgctgtgtccactcagggttaaatggattaagggcagtgcaagatgtgctttgttaaacagatgcttgaaggcaaaaa

SEQ ID NO: 8586 - DNA, 1303 bp, Artificial sequence
  DNA replication origin
aaggtcacagatcaacaggatcccaaggcagaagaatttttcttagtacagaacaaaatgaaaagtctcccatgtctacttctttctacacagacatggcaaccatccgatttctcaatcttttccccacctttcccccctttctattccacaaaaccgccattgtcatcatggcccgttctcaatgagctgttgggtacacctcccagacggggtggtggccgggcagaggggctcctcacttcccagtaggggcggccgggcagaggcgcccctcacctcccggacggggtggctggccgggcgggggactgaccccccacctccctcccggacggtgcggctggccgggcagaggggctcctcacttcccagtaggggcggccgggcagaggcgcccgtcacctcccggacgaggcggctggccgggcggggggctgacccccacctccctcccggatggggtggctgccgggcggagacgctcctcacttcccagagggggtggctgccgggcggaggggctcctcacttctcagacggggcggttgccaggtggagggtctcctcacttctcagacggggtggctgggcagagacgctcctcacctcccagacggggtcgcggccgggcagaggtgctcctcacatcccagacggggcggcggggcagaggcgctccccacatctcagataatgggtggccgggcagagatgctcctcacttcctagatgggatggcggccgggaagaggcgctcctcacttcctagatgggatggcggccgggcagagacactcctcactttccagactgggcagccaggcagaggggctcctcacgtcccagacaatgggcggccaggcagagacgctcctcacttcccagacggggtggcggccgggcagaggctgcactctcagtactttgggaggccaaggcaggcggctgggaggtggaggttgtagcgagctgagatcacgccactgcactccagcctgggcaccattgagcactgagtgaaccagacaccgtctgcaatcctggcacctccggaggccgaggctggcggatcactcgtggttacgagctggagaccagcccggccaacacagcgaaaccccgtctccaccaaaaaaatacgaaaacctgtcaggcgtggtggcgcgcgcctgcaatcgcaggcactcggcaggctgaggcaggagaatcaggcagggagattgcagtgagcctagatggcagcagtacagtccagcttcggctcggcatcagagggagaccatggaaagagagggagagg

SEQ ID NO: 8587 - DNA, 1193 bp, Artificial sequence
  DNA replication origin
gtggaggcaaggtattgcaacttttttctattattgtacaccttgaaggtgaggttaattaagtcctgttgtggagtttgagggctagaatttttggagttttatttaatgtcgggagcagattgggtaatgtatattgagaataagatggccttttgaatttttagggtctagggctgtaaagcgtctcagggttgctgccgaacgatccatgaactgggctgggttttttatatttgatgtaaaagagtctaaatgctaactgttttgggagaggttggataaagaaaaaggagtattaaccttgactatgcctttagctccagccacctttttaagaggaaattgctgggcaggtgggggagggctagttgtggaaccaaactgtaagctggaccaggtgtgaggaggggaggtgataaaaggattatagggtggaggagcggaggctgaggaagaattgggacctagctcggcctggcgaggaggggagaggtcagatgggtctgtagaaaaggaagattagaaagactcagcggcgcttggggttgggactgaggggacaggcaggagggaaaggaggaagatttggtatgagttgcattgggcacagagactaggaagggaccaatgtgtaaaagaatgcctggacgtcaggcacctcagaccgtttgcctattttatgacaacaattatttagatcttgcaggatggaaaaattgaaagtgccattttctggctatttggaactactgtctgtattggggtcaagtggcattgcagaagaaaatagggcatttaggttttaggtcaggtgtgagttgaagaggttttaagtttttgagaacacaggctaagggagaagaagaaggaatggagggtggaaggttgcctatagtgaaggagccaagttgaaagaaaagggagagtagagacacagagggaagctgttcgggggttcttaccctccagaaaagcgggaaaggggtcgaggcacagagatatgaggttgggggcgcagaaataagggatcagggcaccgagatataagaggctggggtgcggaaataagggatcggggcacagagatataagaggtcggggcatggaaataagggattggagcgcagagatataaggggttggggtacttgtccctccctcagaaaagcgggacttgcctctaagggtga

SEQ ID NO: 8588 - DNA, 743 bp, Artificial sequence
  DNA replication origin
cgccgccttcctgcagcagaggaactcctataaccaccaccaggtacggcgggcggcggcctggccgcgccgcgggaccgggagaccatgggcgggggacggaggcgggggcagggcagccggggacccgaccttagccccgagagaagccgcgacgggggccactcgcccaagtgagagtggaactgagggcggacaaccgtgacaggactcggaaccccagcccccggtgggttgggagggcagtggccaccgtgggctgtgggggcgtgggagacgagttcgcgctgggagccgcggctggccgggcgccccctcgaacgtcccggcgcagcagtggggactggggcaggggccgaatagcgccggggccgcgggcggccgggcgcggcgtctcaacccggccctcctagctggcgcaccccgggatccgccctgtgccctgggcctggagggccgccgccccggacccccgacgcggggaggcgcggcgaggaccgggggctggccgggggcctcggaagagcggccgtgggaagtgaacttgggcaggggaaaaatgattgctggagaaggtgcgtgcggaggagcccaagactctgtctcgctgtccaatgagggaaggcggaaaggcttttttttttctttggagtttgtttattcttatttggccggcggtgatctcgccttgaagcctcagcccctcgggcggtcagtcgagccgctcccaaagctccgcccga

SEQ ID NO: 8589 - DNA, 1386 bp, Artificial sequence
  DNA replication origin
ggcgggcgcatgcgcaagggggcgcgccgcctctgccccgcggcgagggtgtctatggagaggcggcggccgcggctgctgaggcggaggctgaggcagtggcgatggcgccctttcctgaagaagtggacgtcttcaccgccccacactggcggatgaagcagctggtggggctctactgcgacaaggtaacggagcgctgagcctcccgctgtgggcggtgcgggcggcgatggggagcgggctgggttcttggggcggcctggcctgcgccgcgcccgcagccccgtgccgtcgccgcgcgagtagccgcctgcgcagctgtcagcgccgcccgctcccgcagcctgcccgcccgctgcgaggccttcgcagagccggcctggccgccgcctcggacgtgctctcggggcgggcggcgtcccctgccgagggcctggcggctgaggaggggcgctaccggcgtcactggccgccctcgggccggccccaccgccgcgctgggactcccgctgctgcctctaaggagagcggccctacctcctcgaagccctgggtgccccggccggccacctgcggtggactcccatctgcaccgagtagttgttcccgtcccccgtcactcccccgggcctgttcggggctctccgtgcagacacccacccatcctctgcacctctcgctggcttcctggctggaactgcagcgtctcccagctacccggttccttttacccccggctttcttcactggtttgatttgggagaaaagccaagtttagaactgaagaaccttcactcttcatgtgtcgttatcgttttccttgcaacttttattgccctgaacacttactggatgtagattttgttataagacagcaattctctcttggatttctttatatgagctcgaataaagggggcctcaggaaaagttggtttaactgtgagaaccattttgggcccataattggtgcagcataagctgaagaggcacttttgtggagatggttcagggccctttgctagtgattttaaaacaatattaacattccacgtatttgtcagtttatgttggggaaagtcatggatatctgcaaacctcaggcagtcccgtttcttgtggaaatgatccaactaaataaagcattcaaatgactactgtttaagcatagaaatcaacttttaggaattctcagaaattgcatagcattatgcagaaccattgtctacagaaaagaggggtgtttcatagctcagccaggcgattggaggatgcccagggtattcactgttaggccacactcaagaccagcaatttaaagcagtgacgttgaatttcaaatcttagcactccatcttctccctccctccattctgaaaattt

SEQ ID NO: 8590 - DNA, 1003 bp, Artificial sequence
  DNA replication origin
cctcccgcccccactcttttcgttttttgtcgtcttcataagccgcagaaggaacccaaaccttttccctgtttctttcactacatgaaagcacagtagctgagggtaggggaaagtcgttgcagtggcgctctcggcgcttctcccgttgctgccctgcccaccacggccttgaggagaggcagccaagcacaatggccgcggtcagggccgcgagctctgcttgtgcccacgccccgacgcctgcttggcctgggtgaccaatgcttctggccaggacctccggagctgcccttcgcctccctgcgattggcccgtgccagatttttcctggggccgagcgcagaccaccccggccgccactcaaaggccgggcctggctcccacccagcggttggtgaaccagagctgcgggctctgagagcttcggtcccgggcggcagcccacagcgggcgcggggcctgggtgcgaggggcggggcagagaccgcgagagagagttctcgtgaaattcgggagactcaacgtgggggaaaaacagtatctggggatccaggtgcggaaatgcacctcaagtgcaggaacgcgggtcagggataggcccgacgggccttgggggtggggagaagggtgaataatggaaggttggtgcgggaaagaaccttggtacaaatcccgccattttaagcggaggttcggagagaaaacaaggtcactaacccaggaaaatgtctgcctctttcccataaatcgcctggccctggccacagacctcctggagactctgttctctgctcacgccggtcagtcttagattggttggctggagtactgctggacagatagagaaataggagaaaacagggaagcctgagaaccttgggaggaattgttatttgcttaatggccagaacctccaggagggcaagaaccagatatgctgtgttcacccttgttctctattatctatcacagttgcaagacaacatggggatcagtaaat

SEQ ID NO: 8591 - DNA, 1817 bp, Artificial sequence
  DNA replication origin
ggaggtttctcacctgtatgttactcaggtttgtctcgaactcctatactcaagcgatccgcccgtctaggcctctcaaagtgctgggattacaggcatgagccgccgcgccccgccccacgctcagtcttgaaattgtctggaacgggaaacggcaaacagcgagatatccgagcgagagtcccgccctgcatcagtttgcggaaccgccttggtagaaggagagaaggggagtggaggaagcacgggactggagggaccaaagttccccgatggcggcccaggggtgcgcggcatcgcggctgctccagctgctgctgcagcttctgcttctactgttgctgctggcggcgggcggggcgcgcgcgcggtggcgcggggagggcaccagcgcacacttgcgggacatcttcctgggccgctgcgccgagtaccgcgcactgctgagtcccgagcagcggtgaggcagtcggccgggtggaaggggagccggaaagaggcaacggtggggagggcctggggaggggaaaactggcgctaaagttcggggtgagggggcaatgagagaggccttgaggggagaggtgagtgtggagacagcgatggtcctgaacgatgggggcgagtgaggagggggctgtgaagtgtgtctgcaggtgaggggtgcgctgtgcggggtctagagatgagtgtgtgtgtgtgcgcgcacacacacactgtagaggtgaggggtgtgtgcgtgtgttctagaggtgaggggggtgtgtgtgtgcgcgcgctctagaggtgggaggtgtgtgtgtgctctagaggtggatgtgtgtgtgtgtgctctagaggtgggggtgtgtgtgtgtgtgtgtgctctagaggtgaggggtgtgtgtgtgtgttctaaaggtgagatgtgtgtgtgtgttctagaggtaaggggtgtgtgtgttccagaggtgaggtgtctgtatgtgtgttctagaggtgaggggtgtgtgcatgtgtgttctagaggtgaagggggtgtgtgtgcgtgcgctctagaggtgaggggtgtgtgtattctagaggtgaggggtgtgtgtgttctagaagtgaggggtgtgtgtgttctggaggtgagatgtgtgtgtgtgtgttctagaggtgaggggtgcgtgcatgtgttctagaggtgtgtgtgtatctgtgttctagaggtgaggggtgtgtgtgtgtagtctagaggtgacaggtgtgtgtgtgtggtctataggtgagggatgtgtgtgtggtctagaggtgagggatgtgtgtgtggtctagaggtgaggggtgtgtgtgttctagaggtgagggggtgtatgtgtattctagagctgaggagagtgtgtgttctagagatgaggtgtgtatgtgtgttctagaggtgaggggtgtgtgtgtgttctggagttgaggggtgtgtgttctagaggtgagatgtgtgtgttctagagatgatgggtgtgtgtgttctagaagtgagaggtgtgtgtgttctagaggtaagggatgtgtgtgtgtgtgtgttctagaggtgagttgtgtgtgtgttctagaggtgagatgtgtgtgtgtttgttctagaggtgaggggtgtgtgtgtgtagtctagaggtgacaggtgtgtgtgtgtggtctataggtgagggatgtgtgtgtggtctagaggtgagggatgtgtgtgtggtctagaggtgagaggtgtgtgtgagtgtgaaggagggtggagaggtatccctctagaagtgagggtggggtagaggtgaactgggtaacagcccattgccacccagcagatg

SEQ ID NO: 8592 - DNA, 987 bp, Artificial sequence
  DNA replication origin
gtccctgaagcggtgaagcgggctgagcgcgccgagggtgggctgcagcccggcgaggggctgggctcagggcaccttgcccagaaggcgggcatcggtgccaagtgttcaccggctacgcagcagagccaccgagcagcgcccccccccgcctcccgcgggcacgctcggtgccaaggccagctgctcctgaaagcggcccgcggagccccgagcccgggactccctactcagcaccacccggcgggctctcggctgacccgccacggaagatgcccggttccgggcgatccgggcggcttccctgcgcgcggggccctgctgtccccgcagtgcccaccggtgcgccttagtcgccaacccacctcatctcaggatgaatttcagtgtacttgacgcatcgcgccaggacggtctcgggaaagcgcttggtggtgcccggaccgctccactgctggcgccacctcgggacgaccaccgcgagcaccacgacgaggatcaggaccaggatactgacgccaagacagagttgggctctcctagagagccggcagcagggtttgtccccggacaccgggctgaactcgcagttggccatagggctccaggcggggttggctgggcgaagatgaggccggcaggaggctaggcagcaagagagaggctggctgggttctgaaactgcacctccccttctgtttcacttgccttttctctgtttcccttcccacccccaaccccttgcctcagagttccgtggctggttacaccaataagagtttaaaagaccaacaactataggctcctgtgcagtgacccacccactccacctccagggagaaacagccaccttaatcctctgcaggtgtcctaagggggcagacagtacatccttatactccctccgctaactcccttcatcaaccgggcactttacacctgagccacatttgcttcctggaaagcatgagggtgggctgcctgctt

SEQ ID NO: 8593 - DNA, 1320 bp, Artificial sequence
  DNA replication origin
tcccggactgggcggctggccgggcggggggctgacccccccccacctccctcccggacggggcggctggccgggcagaggggtcctcacttcccagtacgggcggacgggcagaggcgcccctcacctcccggacggggcggccggccgggcggggggctgacccccaccacctccctcccggacggggcggctggccgggcagggggctgaccccccctcccccctcccggacggggtggctggccgggcagaggggctcctcacttcccagtacgggcggccgggcagaggcgcccctcacctcccggactgggcggctggccgggcggggggctgacccccccacctccctcccggacggggcggctggccgggcagaggggctcctcacttcccagtaggggcggccgggcagaggagcccctcacctcccggacggggcagctggccgggcggggggctgacccccccccacctccctcccggacggggtggctgccgggcggagacgctcctcacttcccagacggggtggccgccggacggaggggctcctcacttctcagacggggcggttgccaggcagagggtctcctcacctctcagacggggcggccgggcagagacactcctcacctcccagacagggttgcggcccagcagaggcgctcctcacatcccagacagggcggcggggcagaggtgctccccacatctcagacgatgggcggccgggcagagacgctcctcacttcctagatgggatggcggcggggaagaggcgctcctcgcctcctagatgggatggcggccgggcagagacgctcctcaccctccagactgggcagccaggcagagaggctcctcatatcccagacgatggggggccaggcagagacgctcctcacttcccagacggggtggcggccgggcagaggctgcaatctcggcactttggggggccaaggcaggcggctgggaggtggaggttgtagcgagccgagatcacgccactgcactccagcctgggcaccaccgagcaccgagtgaacgagactccgtccgcaatcccggcacctcgggaggccgaggccggcggatcactcgcggtcaggagctggagaccagcccggccaacacagcaaaaccccgtctccaccaaaaaaaaaaaacgaaaaccagtcaggcgtggcggcgtgcgcaggcactcggcaggctgaggcaggagaatcaggcagggaggttgcagtgagccgagatggcagcagtaccgtccagctttggctcggcatcagagggagaccgtggaaggagacc

SEQ ID NO: 8594 - DNA, 910 bp, Artificial sequence
  DNA replication origin
gcctctgcccgtccgcccgtactgggaagtgaggacccctctgcccggccagccgccccgtccgggagggaggtgggggggggtcagccccccgcccggccagccgcccagtccgggagggaggtggggggatcagccccccgcccggccagccgccccgtccgggagggaggtgggggggtcagccccccgcccggccagccgccccgtccgggagggaggtgggggggtcagccccctgcccggccagccgccccgtccgggagggaggtggggggatcagccccccgcctggccagccgccccgtccgggaggtgaggggcgcctctgcccggccgcccctactgggaagtgaggatccctctgcccggccagccgccccgtccgggagggaggtgggagggtcagccccccgcccggccagccgccctatccaggaggtgaggggcgcctctgcccggccgcccctactgggaagtgaggagcccctctgcccggccaggaccccgtctgggaggtgtgcccagcggctcattggggatgggccatgatgacaatggcggttttgtggaatagaaaggcgggaagggtggggaaaaaattgagaaatcggatggttgccgggtctgtgtggatagaagtagacatgggagacttttcattttgttctgtactaagaaaaattcttctgccttgggatcctgttgatctgtgaccttatccccaaccctgtgctctctgaaacatgtgctgtgtccactcagggttaaatggattaagggcggtgcaagatgtgctttgttaaacagatgcttgaaggcagcatgctcgttaagagtcatcaccactccctaatctcaagtacccagggacacaaacactgcggaaggccgcagggtcctctgccta

SEQ ID NO: 8595 - DNA, 883 bp, Artificial sequence
  DNA replication origin
ttacccggaataattccttgctcgtgtaaggttcacagatcagtttttccacatttgcaccaaagacaaaggtaagaaccacaatgatcatcaatatccagcaaaagaggaaacttaatccaactccactggaaaaaaatataaagttagtaattcaacaaagaatgattcaatattacctactgatacttactaaatctacctatactctataaaatagccctggggtcttcagtgttattcaggtgaaacagatcatccacctaggagtgacacagggcttggggacctggagaggggcagctccaggacaggcaagggtacactggatgggggcctggggacctggggaggggcagctccagagcaggcgggggatcactggataggggcctggggacctggggagggacagctccagggaaggcggggatgtactgtataggggcctggggacccacgaggggtagccaataaggggctgaaagcacacgaggagcacaacccgacttctctctgaacgcaagcactcttggcacagtgtaaaggatagactggacaggtgccaacgtggatgggacatcattgcagaggctgttatcatggcccatgagggtggcctaagggggcaggattggtggagagttggtggatgatggagatgtaatataggagacacaggaggcataatataggaggcagcaggactcggaaagcgctgaacacgagaggtagaggcaaggaagggctccaagggcagtgccagggagcgctgatgctctggaaggaaagagaagatgggctggatgttggtcttgttgccagagacactgaatggaaagactgtgtaggagtcagtatgtttggagctcagatatctggg

SEQ ID NO: 8596 - DNA, 859 bp, Artificial sequence
  DNA replication origin
cggggagggggccggccggaggcagaggctggagggaggcggcggggacagtttgttgtgctcggaacatggcgggcgtcggcgacgcggccgctccgggagaaggcggcggtggcggcgtggacggcccgcagcgggacggccgcggcgaggcggagcagccgggcggcagcggcggacaggggcccccgccggcgcctcagctcacagagacgctgggcttctacgagagcgaccggcggcgggagaggcgccggggccgcacaggtgaggcgggcggcgctaggccgtggcgggctccgaggggcggactggggaccgagggcggcgggggcgccttggaaccccggcccccgagccgcgcggctgccgttgcctcccggggctccccaggctgtgggcgcgcggagccgccgaggctgccgaggctccgcggccgttgacagttcctcgggcgggttgcgcgcgcagccccgaggcccccgcggccgcgccaggccaggtgtgccctagaaggggtctgcggccgggaaagttctgtccgggtccttgcatcgccctcggaaggtcttaggttagcgggcatctcccacgtctcggagcccaaacgtgagaagcacacggctgatttcttaattatattcatgccaaggtgactttttttgttctgtattttaagcaaacttgagccatagaaacctgttaacttgccctgcaagtagatttttcacagacagctgacggtgtggtagtgaccatgaagttcagtagttttgcccagtacagaaatatttaacactccataaaatgttgcatctgaacttttcctgaactgaaacttatgccaaaaaaattacta

SEQ ID NO: 8597 - DNA, 1307 bp, Artificial sequence
  DNA replication origin
cctccccgcctcgccccgcccctcgccggagcccgagccgccgccgccgccgccgccatccgcggcccgccgaccggcgcgagccattggcgtcagcgacgcgtgtgaggccgctgccgccgccgccgccgccacggtagccgccatcttcttcctgccctcgccgtggcgggcgacggtttctcgcgccgtggctggctcggccggccggggcaccgcgccgggctccatgcagccgggctgcgcggtcccgcagagcgggcgcctccggggctcgagtcggggacccggcaggagcgggccggggatggcggcggcgggcggcgggtcggccgtggagccccggagaggcggccgccaccaccgctgcccgcagtctgcgaggtgtccggcggtccgctcagggcctcttttgcagactcggtgcccggagtgcgccggcgccgcccgccaggtcttggcactgctggcgcggccgcggcggcgggggcccggctccagatcaccgacccccacgagcgccggccctgcctgcccgctattttggttccatctcttctgcatatttatgcttgcctgttacattccctggcctctgagtgtcctttggcagtttccaaagcatttgggcaagaaggagcttgggcagcttcacaacaggtggggacgcgcaggggaggggccgcggccggaccggcagagtttcaagggctggcgcgccggcggactttccacactgtctttcgggactggggttaggagacagcccttggccaccactgtgtccttactttgtcgctttacttggggctggacctcccctttccagctctggcgtgtgaccccgcaacgagcgtggtgtcgagaccaccaccagctggggcggtgggagcgaaggtgccccaggctcggggaaggtggaaaccttttccccgctccccaagtgattgttgcgcgctccggtgaggggacagtggtacctcgatttcccgtgtgccagcttcgggactcagctgtgcttttgtgtctctttgattagcaaaagcaaaacgaattcctccccgaacactaagcttcctggaaacttccctagacctaaacttgagaaccgcatataaatgggccttgagggttctgtcgtcagtagcgggttacgtgattgcaaacgagcaagtttaaaacggagtgggctttgggctgcagagccgcctggcattctgacagctgagcaggaggcagaggtgagagtccaagatggactaaaaatgtcccagcagctgggagcccaacctcggcccaacctcgtt

SEQ ID NO: 8598 - DNA, 1269 bp, Artificial sequence
  DNA replication origin
ggagcccctccgcccggcagccgccccatccgggagggaggtgggggggtcagccccccgcccggccagccgccccgtccgggagggaggtggggggggtcagcccccgccaccggccagccgccccgaccgggagggaggtgggggggtcagcccaccagccgcctcgtccgggaggtgaggggcgcctctgcccggccgcccctactgggaagtgaggagcccctctgcccggccagccgccccgtccgggagggaggtgggggggtcagccccccgcccggccagccgccccgtccaggagggaggtggggggggtcagccccccgcctggccagccgccccatccgggagggaggtgggggggtcagccccccgctcggccagccgccccgtccgggaggtgaggggcgcctctgcccggccgcccctactgggaagtaaggagcccctctgcccggccaccaccccgtctgggaggtgtgcccaacagctcattgagaacgggccatgatgacaatggtggttttgtggaatagaaaggggggaaaggtagggaaaagattgagaaatcggatggttgccgtgtctgtgtggaaagaagtagacatgggagacttttcattttgttctgtactaagaaaaattcttctgccttgggatcctgttgatctgtgaccttaccccccaaccctgtgctctctgaaacatgtgctgtgtccactcagggttaaatggattaagggcggtgcaagatgtgctttgttaaacagatgcttgaaggcagcatgctcgttaagagtcatcaccactccctaatctcaagtacccagggacacaaacactgcggaaggcctcagggtcctctgcctaggaaaaccagagacctttgttcacttgtttatctgctgaccgtccctccactattgtcctatgaccctgccaaatccccctctgtgagaaacacccaagaatgatcaataaaaataaaaaaaaaagatgcatgtccaatgtaggttagtcttatgaagtttaagaattccaatatcatcgccagctgttagaggtgaaggaaacctactccagagatcatctagctgccttgctactctaagtagcagcattgcatcacctgagagctcattcacaatcccacctgtcaacaagggagaattcatgtgcacgtcttaaagccctgctttaccccattcacccagcagtaacatcctaggtcttctgcttggactatccagcttcatcttgctcaca

SEQ ID NO: 8599 - DNA, 1093 bp, Artificial sequence
  DNA replication origin
ctggccaggcggggggctgaccccccccacctccctcctggacggggcggctggccgggcggggggctgacccccccacctccctcccggacggggcggctggccgggcagaggggctcctcacttcccagtaggggcggccgggcagaggcgcccctcacctcccggacgaggcggctggtgggctgacccccccacctccctcccggtcggggcggctggccggtggcgggggctgaccccccccacctccctcccggacggggcggctggccgggcggggggctgacccccccacctccctcccggatggggcggctgccgggcggaggggctcctcacttctcagacggggaggttgccaggcggagggtctcctcccttctcagatggggcggctgggcagaggcgctcctcacctcccagacggggtcgtggccgggcagaggcgctcctcacatcccggacggggcggcggggcaaaggcgctccccacatctcagacgatgggcggccgggcagagacgctcctcacttcctagatgggatggcggccgggaagaggcgctcctcacttcctagatgggatggcggctgggcagagacgctcctcactttccagactgggcagccaggcagaggggctcctcacatcccagacgatgggcggccaggcagagacgctcctcacttcctagatggggtggcggccgggcagaggctgcactctaggcactttgggaggccaaggcaggcggctgggaggtggaggttgtagcgagccgagatcacaccactgcactccagcctgggcaccattgagcactgagtgaaccagacaccatctgcaatcccggcacctccggaggccaaggctggcggatcactcgcggttaggagctggagaccggcccggccaacacaacgaaaccccatctccaccaaaaaaatacgaaaaccagtcaggcgtggtggcgcgcgcctgcaatcgcaggcactcggcaggctgaggcaggagaatcaggcagggaggttgcagtgagccgagatggcagcagtacagtccagcttcggctcggcatcagagggagac

SEQ ID NO: 8600 - DNA, 1738 bp, Artificial sequence
  DNA replication origin
gtcttccttctaactaacttatattttaatatccttataacttagtcattcaacaggtttttcttgaatgcctgctatatgttagacactgtgccaagtattgggagtacagagatgaaaaaggcagtattactgtcctcaaggagattcatctaatggtggactcaaacatagcaaagaccgttgacagcttactcagcatctgtagccccttcctccttcttaacagacccctgctcttgttcagttatctgccttctgccacttatgggtccaaggacaaggtgaccccattcctggcttgaagattgtgcatgacagttctaaggggaaccccttagccttgccagggattagtgcaggaacccaggcctgagagggtcagcacccagccttcccaattaaaagactgactcagaagcagccacatgacctctaagagttcaatgagataaagagggaaagtctgctgtctctttctctggccactggatgtagtaaaatcattacagccaacttggagatgaagccagcacctagaggatggcagggcaagagaatcacagagaaactcagcagaagcacccagattaggtcagccctgcagcccaatcaacctgtgcaatcccagcaacaagagtctagattttttgcccattatttaaacccctttgagctggtctgttccaattgatagagacaactgaatagaaactgagaatgcaatgaaaagtagtgcagaaggcattagcggattgctgaggttaaaggataaccactggcagtcccagtgagggacggggtgtaatgggcagctcagggcatgctttaagcagaagagacacccaagtggagcctacagggattattaggagctaaccagatgagggaaggaagacagttcagatagaaggaacagccagacagaagaagcacaggaaggaaaaacagatcgaggctcagcttttctgagtcacgaactataaggtagatagtggaaggtgaggctagagccagaccatgaaaaatctggataccatgaagtggaatttcacattgcctggtgacaccttccgtgaccactcagagaagctcccactcctccaacagcaaactctatcccctaaccttgatatttttttttcttcacagcattcattactgtctgacattatattacttatttgtttgtttcctggtttcttatctgtttctctcactggaatgtagctccattagaaaagggaattttgccttgctttctgttacatccctacccagaagaacactacctggcacatcacacgcaaagaataaattcttattaagtggctgagtgaataaattcctgcccctatcaccagaacaatctaatttatgagggtcttatcaggaaaaacctaaaacctgagtctgaaattgtgaccatcatttcttattctatgttcagttttcccattttgcaatctctgctcttctcatatcatcctatgatagctcccatgcaatcatcctggaaaaacctgggatgcctctatatcatatatgtcatctgtaatatccagcaatgccaagcatccaaaatgacccaaagagactataattactttaaggtcaaatggaattcaggatgttagtgtgatagaggtgtgacacagagggacagagacaagaggaatgcaggtctaggtgggtgaagaacagactttaagatgcatgtctctccctctccctctcc

SEQ ID NO: 8601 - DNA, 1198 bp, Artificial sequence
  DNA replication origin
atatggctggggtttgtctcccagtggagacaaggaattgccttttttctattattgtacacctggaaggcaaggttaattaggtcctgttgtggagtttgagggctggaatttaatttttggagttttatttaaagttgggagcggattgggtaataaaatgtatactaagaataagacgaccttttgaccttatagggtctagggctgtaaagcgtctcagggttgctgccaaaggggccatgaactgggctgggtttttcatatttgatgaaaaagagcctaaacgctactgatttgggagaggtaggataaagaaaaaggagcatcaaccttgactatgcctttagctccagccacctttttaagaggaaattgctgggcaggtgggggagggctagtggcggaacgaaactgtaagcgggaccaggtgtgaggaggggaggtgataaaagggttatagggtggaggaggggaggctgaggaagaattgggacctagcttggccaggctaggaggggagatgtcagatgggtctgtagaaaaggaagattagaaagactcagtgacgcttggggttgggactgaggggacaggcaggagggaaaggaggaagatttggtatgagttgcattgggcacagagactaggaagggactgatgtgtaaaagaatgcctggacgtcaggcacctcagaccgtttgcctattttacgacaagaattatttagatcttgcaggatggaaacattgaaagtgtggttttctggctatttggaactactgtcgagtttgtattggggtcaagcagcattgcagaagaaaataagacatttaggttttaggtcaggtgtgagttgaagaggttttaagtttttgagaacactggctaagggagaagaaggaggaatggagggtggaagattgcctatagtgaaggaggcaagtttaaagaaaagggagagtagagacatggagggaagtggttcaggggttcttaccctccagaaaagcaggaaaggggtcggggcacagagatacgaagttggggcatggaagtaaggtattggggcgcagagatgtaagaggttggggcacggaaataagggatcagggcgcagagatataagaggtcggggcacggaaataagggatcggggcgcagagatacgaggttggggtacttgcccatccccaag

SEQ ID NO: 8602 - DNA, 840 bp, Artificial sequence
  DNA replication origin
gcaggagccctccgcgggggtggagagaggctcaggcatggcgggctgcaggtcctgagccctgccccacggggaggcagctaaggccgggcgagaaattgagtgcagcgcctgtgggccggcactgctggaggacccggcgcaccctccgcagctgctggcccgggtgctaagcccctcactgccggggtccactctgagtgcggggcccgccaagcccacctcatccggaactctatctagctggcccctaagcgctgcgcgcagcccaggttcccgcccacgtctctccctccacacctccgggcaagctgagtgagccggctccggcttcaaccagcccagagaggggcgcccaaagcgcagtggcgggctgaagggctccccgagcatagccagagcggacgccgaggccagggaggcgccaagagcgagcgagggctgtgagggctgtcagcgtgctgtcacctctcattggtgtactggaagaactggagggcacatggacttagagaatgagtgcaaggttttattgagtggaagtagctctcagcagatgggggagccataaggctgatggagtgggaaagtggttttattcccggagtcaggcagctcagtggcccaggctttcctccaaccatcccatccaaactgtgagccattccaccggtggatagccagccggagtgctcttccttaggtgtgctcccctcaacgccttctcaagctccagccacctgtatgttcttccgccaatgtgttcttccgccaatgttttcctctttacttccaaccacatgtgtgtctgcctgctagagtctaggggggggtttatag

SEQ ID NO: 8603 - DNA, 807 bp, Artificial sequence
  DNA replication origin
agtagcccacgggcagggccccagcggcggaccatgagcgagccgccgcctctcaccttcgtcatgtctgcggtggagagactccggctcccgaaacgtctcacggccagacgtcggacgactactcgccccgcagccggaagaggcagcaagaacatcttgtcggctcggcccctcgcaccgccctccagcgagcacgtggagagcggtgggcgggcgcgccttggggcggggctttcggggcgcagacggcgtgcgcgcggactggctcgggcgccgggcgagcggacgtgcgtctagggggcgggacggatgggcagcaccggccgactggaccgctgggatcaaaccgcggttgtggaggggactcaagggtgcgcccgcattcgtgtgcgcccgcattcgtgtgcgcccgcattcgtgtgcgcccgcgcatgcgggcgggggcgaaaaggcggggcttccggacgcggttgacagtcccgggagcaacgcgaagtagaggggcgggaccgatatggtgacgtcacacgatgggtggggcggaggcggggcgagttctgcaagcgggcgtgggcggagcgctgggcaactcccgggaaatagaaactgagtgccagagcttgttgtcaaggttgctgaatagacgactgcatagtgaagacactcccactgagttttcgtttgtttgtttggtttttttgagtcggagtctcgctctgtcacccaggttggagtgcaatggagcgatctcggctcactgcaacctcccgctgcttagttgaaacgattctcctgcctcgtcct

SEQ ID NO: 8604 - DNA, 985 bp, Artificial sequence
  DNA replication origin
gagtgtggttggtgttcatttggatgcaagacccattcttagctcagcagttttattaaactctaagggccagatttggccaactcccaaaggaggaaattttttaagagactagatgggagtccctgcagggaactcaggagcctgccacaggctccagcctgggcggggtgccagtgggtctccatctcgccgcagcacatctctggccctttctgccttgtctgcccctgcgcctcctgaaaacacctctcctggttgccttcctcaggagcggggcggcccgggccaggccggctccccaccgggcgctgctgggcagggttccggcgagggatgcgggctctgggaggagaacgcgcagctccaggacgcggtgcggcggctgcgcgcggaggtggagcagcatcagcaggaggcgcagaagctccgagaccagcgcaggtgggtgacccggcgcgccccgccaccgcgccaccctcaccccctaccccgccaccccccctccccctactgcggctggctgagcctgagacctgaaatgggtcactgcctcggcatcctgccccacaagacactagacactgaatgcgccagcatttcacagatgttactcctctgacccatgaaaagtcccagagctccagaaattctggatctcaaaaccgcagaggaagtgccttgaaataaaagagggagtctggctgggcgcggtggctcacgcctgtaatcccagcactttggttggcagaggcgggcgcatcacgaggtcaggaattcgagaccagcctggacaacatgatgaaaccctgtctccactaaaaatacaaaaaaaaaaaaaaaaaaaaaaaaaaaaggccgggcgtggtggtgtgtgcctgtaatcccagttattcgggaggctgaggcaggaaaatcgcgtgaactcgggaggaccaggttgcagtgagccaagatcgcgccattgcactccagcctgggcgac

SEQ ID NO: 8605 - DNA, 1067 bp, Artificial sequence
  DNA replication origin
aagtgctgggattacaggcgtgagccaccgcgcccagccagactccctcttttatttcaaggcacttcctctgcggttttgagatccagaatttctggagctctgggacttttcatgggtcagaggagtaacatctgtgaaatgctggcgcattcagtgtctagtgtcttgtggggcaggatgccgaggcagtgacccatttcaggtctcaggctcagccagccgcagtagggggagggggggtggcggggtagggggtgagggtggcgcggtggcggggcgcgccgggtcacccacctgcgctggtctcggagcttctgcgcctcctgctgatgctgctccacctccgcgcgcagccgccgcaccgcgtcctggagctgcgcgttctcctcccagagcccgcatccctcgccggaaccctgcccagcagcgcccggtggggagccggcctggcccgggccgccccgctcctgaggaaggcaaccaggagaggtgttttcaggaggcgcaggggcagacaaggcagaaagggccagagatgtgctgcggcgagatggagacccactggcaccccgcccaggctggagcctgtggcaggctcctgagttccctgcagggactcccatctagtctcttaaaaaatttcctcctttgggagttggccaaatctggcccttagagtttaataaaactgctgagctaagaatgggtcttgcatccaaatgaacaccaaccacactccacactccacctgccagggtgccctccatgcctgcctcagtgaagtcttccctccgtgaagttaagtgttcagtgaagtgatactgcctcagtgaagtcttccctacctctcagggggaactgataagctttctctaataccaccaaatcttgctaactctggctctgtaaggggtgacactgaagagaatatgtgtccatgctggtttccttggctagattgggagctattcctctcttcatctttccaaccctgtagcacctagcctggtgtattctataggtgccacgtgaatgcttgctaaacagaattgtgctagaatgtc

SEQ ID NO: 8606 - DNA, 849 bp, Artificial sequence
  DNA replication origin
ggcgtcggcgccccgcacgtgccgctggcgatcagtctgcagttccccagccagtgcaggtttcgtgtgcaaggggagagcttccgcggctaggagctgccggccttggggggtttgcggtgggcgggcactgcgctcttggacacgtgggtggcgcgcggccctggacttggtggcgacggaccctgcccgaggtggggatcccaggctaaagaggaagaagagcctccggagagggacagggcacagtgactggcggcctccggagagggacagggcacagtgactggcggctcccgagtctccgagctgatagcggagatggcggtgggggacgagatgctaagagaggggcgggtaggtgagggcgagccatcgggactcaaggaggtgtgggatccggggcgcacggtgtgggccagcgcctgagttgcgcgagtgcacagcggggctggggatggtagccttcctttttggatcttggagaggagccaggacattgcgggaggaataccggagatgcccaaagaggagaagccaaggggatggcagggtgcgggtgaccgaaatctgagatgagaaagtgcgaaacgggtaatgcgggaagcggtaggaacgcaaagacaaagtcgttagggaggtagaaaggatggtggcaggtgcgggaaaggaagaagcaaagaggaatggagcagttagatgagtaaaagatggaactgaaaatcttagcaaaccgagcccattgaaagtaaagtgagtcgtccaaatccacactactggccttgggcagactggagccagactgtcaagttttcggattctgagctggtgtctgtttagtgtttggtg

SEQ ID NO: 8607 - DNA, 1208 bp, Artificial sequence
  DNA replication origin
tgggagcggcgcggcgcggcggccccggcgctcgccttttgtcttgcgggctgctggcccggcgcggtccgcgctccttcgccttcccagctcttgggctccccgggaactgttagtttggacccgcttgctgagcccccgcggaagccgcccgctcgctctctccccgaaactcctcggcgcccgtcgctgcccgccgtcgcccgccgtccaccctgacaggacggaggaagcggcccggtgggtcggcgccctggcggaggagagccggcgggcagggcggccggaggaaggcgggctggtccgcgcccccgccgagcgcacacacacccccttgtcgccgccgggggccgggtgagcagacgcggccagttcccggggacctggacctggagacccacgggcactcgcagggcgggggccgctgatgggccggctgggggcgaggggcggcgggggcgtcgtccgaggggcggggggcgcccaactctgccctctcgcgctcggcggcggcgctgtgtgtacccctttaagaaggagccgcttgagcgctgacggttgggatttgaagttcttcctccctctttggaagtctggacggatggggggtgttgccacggcaacgacaccctcccccccgtctgcttgcggacgccccgacgactctggtcctctttcactgtcatgtgatggactcttccttacacacacacacacatatacacgcatacgcatcgccctccccacctcccatccccattcaactgcaattccctctttttggttggatctgaatcgttttgcctcaaacttctgggcttggggctctcaccctgtggattgtttagggtgacaggaatggtgggactcccgaccttgctgcagtcgcttttttttttttctttttttgcctaagacgaatgcatagagctgttatccagcaggttggtttagtgggcttagaggggcgaacacggattatggaatggggcgcgttgtgggtgtttgttttggaagggggttatgggtgggagtgtaggggaagaggtagaaaggaaggttgtattgtgtaagcagtggatagtggcagcagcttgctctactggcgagtgaatcttggcatttggagttggggagtaaccctagtgtcttaagaaaacaactctcttaccttgtttccatctgctctggcaccacctcgcaccccc

SEQ ID NO: 8608 - DNA, 886 bp, Artificial sequence
  DNA replication origin
aaggaagggagggaggaaggaaggaggggggaggaaggaaggaggggggaggaaggaaggaggggggaggaaggaagggagggagggaggaaggaaggagaaagggaggaaggaaggaaggaaggtgaaagggagggaggaaggaaggaaaggaaggcaggaaggaagggaaggagggaggaaggaaggggggagaaaggaaggaagggagggaggaaggaaggaggggggaggaaggaaggaagggagggaggaaggaaggaggggggaggaaggaaggaaggagaaaggcagggagggaggaaggaaggaaagaaggaaggaagggagggagggaggaaggaggggggaggaaggaaggaagggagggaggaaggaaggaggggggaggaaggaaggaggggggaggaaggaaggaaggagaaaggcagggagggaggaaggaaaggaggaaggagaaaggcagagagggaggaaggaaggaaagaaggaagggagggagggaggaaggaagaaagggagggagggagggaggaaggaagaaagggaggaaggacgtctgtggaacactaccattgctatcatcacctccatgaccactcttaccacccctgctgctgtttctacttctgctctgctactgcccgggatttatgacatgctctctgtgtacctaacaccatgctaaatgttttgcatgtatcatctaatgcagcagtccccaaactttctggcaccggggaccagttttgtggaagacaatttttccacagatgagggttgggggaagggatggtttcaggttgaaactgttctgcctcagaaaatcaggcatcagttagattctcataaggagcatgcaacctagattcctcacaagggcagt

SEQ ID NO: 8609 - DNA, 1193 bp, Artificial sequence
  DNA replication origin
gcgctcagcgtagccaaacaaaaacccggcccgcgcctccggagccggctgcgggcccccggcgctcccctttctgctcagcactcccgccgtgcccagaaagcgcggcagcttcggcctgcgcctgggcgcttcggcgctcccatgcctcgcagctgcctccgcctccgccgccgccgccgccgccgccttcttttttttaaccacagtctgcggcagccaccaccaccgccgccgccaagctccgccgtccgggcgcttcccaaataaataacaccaagtccgaagttgagccggcgcgggccttatatagccgcccgagcctccgccccctgaccccgcccctcgaggcccaggcccgccccctggctccgctctgggagcccgcacctcgctggggagaggggagaggtgaggccggggctgccagcgctgggcggaggcggcggctggcggcgcgcgttcccgtgcgccctggctcgccccctcgctcccacgcgcgggcaaacttggcccgaagaaggagccacccgagccccagcccccaactccttggccccagaggtgacctgggctcggagatagtcgtttgcagtgggagaatgggaagaggtcggctttgaacgcggctcataaataaacagccctgccagtgcctctcctgcagcttttgccacgcgatccttaagggggctgctcactctttgcagcgcagcaagagacagagagacagaaacagagaaattatgatttaaatttaagaaaaatcctaccgaaatagatctgcctgcgcttacagacacacacgtgtattttggggagctgaaaagttcagtttttgcaagttggaaaacagcattttccaaccttcttgcttgcctttctatctccaagccacccccttccgtttaacccttcctttgtagacacacactgaaccacaccgtggtcagttgatgtcttggatattcaataggctcacaaaactcttaagggcttgaacgtatctgtgtgattttttactctcttatgagagaaaggaggggaaaaaataaatccctagcaacgcacattataccagaaggttttctttatttcagggcagttctggatatttttttccccgctatgttttgaaagagaatttccttgtttcatcttgtctctttagtgtgacgtatgtctggcaacgg

SEQ ID NO: 8610 - DNA, 1134 bp, Artificial sequence
  DNA replication origin
atgtgcaccaaataatatggaacaaggcagtagagcccactcaggcacacgcctcccaccgccctctccaccctcctctggcagagcaggagctccttgggcaactttaggtcctgaggatgaatccgcctggccagggctgcaaggagaccccaagagcagcggagaggagatcacgcgtcttctgtctcccaaggatgaacttggcggtaaaagagctggggcttccaacggctgctaagatgcaggggccggttgttgtggggagggcggtcctctgatcccacgcacgcttctgcaaatccgatgccagtggcgaaggtacaagacagaagaggggatctcaataggtattatggccccgatcaaagtgggctccggaagctagaaggcgcggaagcccagcgggcccgtagcagagcgcgcggggcaactgggcatggcgcgcgggggtgcacggggcggacgcgcagttctgggggcgcacggctctggactctgctcactcacgcggcctctccctcgccctcgactccgccgcagcctggaccggtcctcgcggtctcccgacagccaacgatggtttacaaacacacatgcacttcgctgaaggatgtctgggcaatcccgcctcccgctcggcgtccttggcgacgctctgcaccaggacctgccccgaggtcacgcagaaaagacaaaagggcagtcgggccgccgcagccgggcagaaatatccactagtcagcactccggcgaggaactccaagaggccaagtggaggatgagagctgctgcgaagactgagtggggactgactgggggcggacttaaaaaccaggcagaccggaaggagtggaaaggcaaaggccaaggttggaggtgtcagcgtcctgctggggcgtactggagaatggctcggtggcaggtgggcgggtgggatccactactccaggcagagccaggcggcagctgaatggcagtagtgtgtgcgcgcgtgtcaaccccgctcgtctcccagataagccgcagctccgcggcagacacctgatggcaaaggtagaagaaacaagagccgggttccggagggcgcagagccacggccggcccccggcggtctcccactagtggttcgtc

SEQ ID NO: 8611 - DNA, 1726 bp, Artificial sequence
  DNA replication origin
agaacggcctccatgctccacttcgctgaactctggaagcgcctcatcaggagcgcgtgggccgtcaacaccgggtctgcatttacttcttcattagagactcgcaaagacagggaggcggggacgtctgcgagcaacggagcgcgaagaggggaaggcaggggaactgctgccacgtgaaggggcgcagaaactgccagaaaggtggatggggacgcaggggttcagcaggaagggccggagggggcagccgggcaccgccgggtcgccgcagtggtaagacctggttgggctggtttgcgctggagaaccagtgctaacttcgcttaacggatgggacacggtcctccctcgcagtcgcccgctgagacaagtccctaggggcctgacgccgtcttcccctccccggagaagtggggggcggggggctgcgcgaggctactatgcgaggtgtcgccgtcctggggcacccttctccccgcgacctgtgagaagcacccccaggcactccatgaccccttcttcctaaccttcgcccccaggagggtgacaaaaaatcggggaaggcaagtttctctcttttgagtctccctgctatcccctccgcgccagcctgcgacaagagcgaggactgggctctgaaaccgacctggatgctggcaatcgcaaggtgactccgtttatggactctggagaacaaagtggcgtctcacttgccccgggcatcctccagtacttgtcccctatctacccgctccccagccccagagaactagccagcaaggagctgcgagtggcgggacgagagcaggggagggagaactagcgcagctgccagcggacccgcccctccttggacagaggcccttccctggccagtgccctcccggagagctcaaccccaggatgtgcatgggggagagctagcgagggctgccccaggcacaggaccctgagctgacaggttcctccagtggaggcaggggtgcgcggcccggatggggagaggggaagacgaagagcgcatactcacagtctctcggtgttgcgggggatattcctgggcacgctgcgcagcgccagcccgtgacagtccactgtgctgcccgagcaagagcactgcgccgggcacgcctgcggtgccaccttgttcaggatcgccagcactaaccccagcgacagggacagcatctgccagccaacgccgcgcatctttccccgccgcctccttcctcgccggcactgggggctttctttagcttgctgctccgagggaaccgcgcagtgtctgaggcccagtgcccggcggggctagcaacccagagtgccagggaaaatgtgcaccaaataatatggaacaaggcagtagagcccactcaggcacacgcctcccaccgccctctccaccctcctctggcagagcaggagctccttgggcaactttaggtcctgaggatgaatccgcctggccagggctgcaaggagaccccaagagcagcggagaggagatcacgcgtcttctgtctcccaaggatgaacttggcggtaaaagagctggggcttccaacggctgctaagatgcaggggccggttgttgtggggagggcggtcctctgatcccacgcacgcttctgcaaatccgatgccagtggcgaaggtacaagacagaagaggggatctcaataggtattatggccccgatcaaagtgggctccggaagctagaa

SEQ ID NO: 8612 - DNA, 1227 bp, Artificial sequence
  DNA replication origin
gtggctggggtttgtctcacagtggaggcaaggaattgcaacttttttctattattgtacaccttgaaggcgaggttaattaaatcctgttgtggggtttgagggccggaatttaatttttggagctttatttaaagtcgggagtggattgggtaataaaatgtatattgagaacaagacggccttttgactttttagggtctagggctgtaaagcgtctcagggttgctgccaaatgagccatgaactgggctgggtttttcctgtttgatgaaaaagagcctaaacgctaactgatctgggagaggtcaaataaagaaaaagaagcattaaccttgactatgcctttagctccagccacctttttaagaggaaattgctgggcaggtgggggagagctagttgaggaaagaaactgtaagccagaccgggtgtgaagaggggaggtgataaaaggattatagggtggaggaggggaggctgaggaagaattgggaggggagatgtcagatgggtctgtagaaaaggaagattagaaagactcagcgacgcttggggttgggattgaggggacaggcgggagggaaagaaggaagatttgggatgagttgcattgggaacagagactaggaagggactgatgtgtaaaagagtgcctggacatcaggcacctcagaccatttgcccattttacaacaagagttatctagatcttgtaggatggaaaaaatgaaagtgccattttctggctgtttggaaccactgtcgagtttgtattggggtcaactggcattgcagaagaaaataaggcatttaggttttaggtcaggtgagagttgaagaggttttaagttcttaagaacacaggctaagggagaagaaggaggaatggaaagtggaaggttgcctatagtgaaggaggcaagtctaaagaaaagggggagtagagacatggagggaaggggttcgggggttcttaccatccagaaaagcgggaaaggggtcaggatgcagaaataaggggttggggtgcagagataagaggtcggggcacagaaataagggatctgggagtggatgtggaaataagggatcggggtgcagagataaggggtcaggacatggaaataagggatcggggcacagagataaggggtcggtgtggaaataagggatcagggggttcttgccccccagaaaagtagaaaaggggtagagacagggaga

SEQ ID NO: 8613 - DNA, 1262 bp, Artificial sequence
  DNA replication origin
cacgggcggctcgagtgcggggaccccagcccctcgccctcgtgagcgccgcccctgccacctgctgccaagtcaccggactggggatgcggggggcggggtgcggggagaggaaagcgccgcgggtggcacggtgcctctggcgacagagtagatggacccgaaagagacccgaggtgacttcgggctgggcaggacacccccgggagttgccagcggctctcagcgggcgcctctaggaccccttgtcactgcgagcagcgcctgctctggggaggggctcgaaggcgccgcgccttctcaacgcgccgctgcgtcccccaggggctccaacttggacagctagactggaaatactgctgcacaaagttaggctgagttcgaaggacaccagagaggaagcgcaaggagatgcccttctccggagccgggcagagcgccagaactcctagacgggaaactttcccccattgaagctagaaccggtcatgcgactcggctaagtgtggggaaacactggctctagactccaggtgaacatcgcagggccgaggtgcagaataccaccttggagagagggggtggcatagactggtggcattttggagaagcatccatgtggggggtttcatttgagatctcccaggcaggtcaaccaggaggtatcgctcaccacccgcaaggtcatttgcccttctaaagcacagtaaggccgggaatagttgggaaggtaaagagaaaccaatagaccacttgtggccatggttactgtttgagaagtcaaaattaaaatgcagatttctgtgtccccaagagtcaagtgcatgaagcctctcttttcagaagaaaggtcaagttgacccgttctccaggcaaactgaattaaaattccctctcactctcagctgcaaggtcagttggccatgacttgggtggaagccatttctaagtgtttgtgaaactatttgccttccctatggctgctggattatttatacacactgtcaccaagtgaaatcttccccctttctccaagtaggtctcaattgacaccttattgcccttctccccacccccaaacgcacgagcgatttacttagtcctttgagcccttgtagcatgtatttgtatatttcttgagagccttttactcttttagttcattgttaaggagacagatgctgacaccccattgtctgggttcaaatcctagttccactacttcataatcctgtggcctggtacaaatatcagctataact

SEQ ID NO: 8614 - DNA, 1227 bp, Artificial sequence
  DNA replication origin
cggggaggagccgccgcgcgcgggtcctggccaggggaggaggcagtggcggcggcggcggcggcagaggaggaggaggaggcggtgctcgcgccgggcggtagagcggcgctgggacccatgcggccgtgacccccggctccctagaggcccagcgcagccgcagcggacaaaggagcatgtccgcgccggggaaggcccgtcctccggccgccataaggctccggtcgccgctgggcccgcgccgcgctcctgcccgcccgggctccggggcggcccgctaggccagtgcgccgccgctcgccccgcaggccccggcccgcagcatggagccacccggacgccggcggggccgcgcgcagccgccgctgttgctgccgctctcgctgttagcgctgctcgcgctgctgggaggcggcggcggcggcggcgccgcggcgctgcccgccggctgcaagcacgatgggcggccccgaggggctggcagggcggcgggcgccgccgagggcaaggtggtgtgcagcagcctggaactcgcgcaggtcctgcccccagatactctgcccaaccgcacggtcaccctgtgagtatctcccgcgacgctgggtcctctcccgctcggctctttcttatctctccgctcaactttggagcagggtccagccggcacccacgcgcctttgtgtggagctgtaggcagggggcggtgctaggaaagacctcgtgtgcttggcatgggtgcagttcagggaaaggcaagggaatctgcgtccgagctgcctcccagctccactagtttgcaaagtaaagttttcgggttctcaggcgctccccgcgctgtccccggcgcagcgcttttgggctgcgcggtgccacgtgaggatgcaagtaaacacgcagtcaacagagttaaagctcattcatcctgggcttgggtttccagaaaacacaatgcttgattgcaagcgccagtccttctgcttctttgcaaattaagttacacttacgtggtagagtttgcaaaacacaaggactgtgtgcgagcccaaaccccaagacgcttcctttgccttttgctatcttagttttattacagttaaagagcaccttttaagatagagttgttattaagggctggaaacatttcagatcaatctgtttatgtaccttgcagtcccgttttcgtgtctgtgagggcttatatttaaaagccaggaacattggaac

SEQ ID NO: 8615 - DNA, 1156 bp, Artificial sequence
  DNA replication origin
ctccattttagaggacaccaacctgactcttcttatggggtgaaaaatctccaggccagcacccaaagcctgggtacccactatgtccccaagacccaggaccctggaattccctgactggtattaccaaagccacttcttggccctgagctagcttcttctgagaactgtcctcccaatgaaggacccaacaactggtataggcacacctgagatccagacgcagacagagggtggctgttagaaagtgtgaacagaacttggttttgtgggctgcggtgttcacacacaggtacaaaaaatcccctcttgtccttgaagatagctgggcacaggaagcaaagacggtgaaggtgtacaggccaaaggtttggatctgactctttcccacctgccatgtttcagggagaaactccaaggtgtctgagaatcctgcttacaaaccttccaggttgttatgaaggtaatttctcaaggcaggagcacagaatatattttattagcatgatatagtccttgtaaaattttaaacatagggtaggtaagccctgggcttgcaaatgttagggcgaggctggaagtcagagtaatcaattctgttggggtttcttggagggtttgctcattattgctcgaactggtgaacatctcaagtatctttgcctgtcgaatttctttcaaaaggctgcctttctagtgaggtccagatgcatcctttagagaccatcgctgttgttgctgaaggccagaaacagcttcagattgttcactgtattgaagaggaacctgtttactggctccagtgtatttgggacaaataagactaccataatgaggtgagaaggcgattccttccgaaacacttggttttgggtacttttcccatagggttggtcagggaaattccctactctcgtccctactccatcctccgggccaggctccttgggccacatgggcagtctccaggagcgcacaagactgctttgtcctgtgcccgcggtgcgagcgcggtggcggcgaagggaaacgagcaggagagtggccaccgcgggtggagtttggactcgaactttcctccgttcggactcgaactttcctccgttctctctacgagttactgccttcccgcgggctccccacaactcctgcccgg

SEQ ID NO: 8616 - DNA, 1885 bp, Artificial sequence
  DNA replication origin
ggggctgcccgccgcgctcgccggcgctggcgcgctccctcccgggcccggggcgcagcgcgttcctgcgagctcccggcagagaagacaaaccccgaaagcaaccgaaaaatgttcgccgccgccgcctccgcatcaccccaagtttccaagaaacaaatcgccaaactactagctgccaggtgaagacctctccggcgtgggctctccagaaagcgctgcggccatccgagtgaataatacataagggccgcccggagccttggagaggctcccgccgccgcggcagcagcagcgggaggcggcggcgagctctgggcagaccgtcgggccgccgccgcgggtgggggcgtctgggctgcccccgggaagtacgccggccgttcgggcggggcgggagggcagcccaggcgcgcggagtgaggattcgcggtgaggcagccgggagacacgaggcctcgctgcgagtagaaacttgcaggagctactgaggtggtcgggccggcgctggagctgggggcctggagaagcacgatcggggcccggagggtgcccggctgcccgtggccggcgccggtggcttccttcaggctatcctgccccgcctggcgggccttgggtgctctccacgcttccttgcatccgcccaggattgccgagagccaacgaccactccggctccgcaaactccagctctccaggagcgggcgtccgcgtgcctgcctgtgtgagagagtgtgtgtgtgtgtgtgtgtgtgtgtgtgtgtgtgtgtgtgtgtgtgtctgtgtctgtcgatgagtcagaaaccaagccctgctcgtctttgaggactgaggcgggtacgaaaggcttgaaccacgcacccggtacaagcccggccggcattcgggcatcctcggcagcgccgcgccccccagtcctggagtcagaggcgttaggacaagtttccaggcgcgtgcctccgacctgcaccccggggccgtgaaactcaggcactttgtattcctccaaaggaagagaggaaggagacttgggtctaaggaagcagtgatacagctttgcagagatgggaggtttcgcagcatctttaacgagatagaaacaagtcatttgagagcgtttaaaagcgaagggctgcggctggatttcacaagacaggcaatcacgtgcaaactcctaggaaaccagaggaggtgggagagagggactggatgggggcaggtttggagtaaaggaaagagagaaccatttgcggaggggggcgttttaaaaagaggaaaactaccggcttcttcaggtaaagttagtttaacttgaggtggaaaagcgtttccccaagaggcaacatctttcttctagaaggggatactcatgttgctaagaaaatcgaaagaatttctgataaagcagctggctctgctctctggagaatgattggctctcgggctggtattgggtactgtgctactcttagtgcagtgaaattgtatggtggggagaggagattatttgaagtattgatttcttcttccagtggtgtggtatgaactttaagataaagtacagaaacaaatgagagatgtacatcattaggggaaggtgcgtcagatgctaccgaagctttaatctctggtggtaaatgcagccggggcagtgaatcttaccaggatttgcggtttccaacactgccacaatctccattttcagagatgaagaatacatgtgcataacgggccttactgatctccagtttgcattttcagcatttgagcatgggcacatgtttgagaaacctgctcctaactgttcctaagaagaaaaagaatacaacaaaggcgatactttaaatctcatcttggactcgggcagagctgctataggaag

SEQ ID NO: 8617 - DNA, 888 bp, Artificial sequence
  DNA replication origin
aatctgccatcgacaccttcccccaccacctcccagcccagcgggaacccgagaaagaggcaggagccggcgcgttaccccgaacaactccaggcagaaccagggaactcgagcgcaaccttccccaagtcgccgcgggcgccgcgcccctgtgcgcccggcgcctacccgccttccagttgcgccgaggggctgcagagccgcaagccccccgcgacgtgctgtcccccctccactcccctcggggcccgagccgcctctttccctaaaatggctgcaatctcaagtagaggcgtcccctgacccgcggaggtggggggggtggggtgcagagtggagcctccgctcctcctgaccccgcgcctcccctggggcacagaagcaccccacaaacacacttaactttgatgactgtgcaatgcagtccggctgcatcgtgccctagacgctccacgccgccggcctgtaggtgtgcgtgtcggtgtgactcggggggcccagggacgctgggggtagacgccggaaggggggcgtggaaggagatggatgtcagcgggccactggtaacctggagagacaggcatgtgctcagggtctaggggtgaaaaagctattctgggagctggagcgagaaatagagagaggaaaaatgccttttaattaaataactgttgtagtctgctgcccccaccgcttgttggtgaaagtctacaggcatctgtcatctccaaactacgcggggaagtagagctggggtcgagggaggggaggcatgtgtgtacgtgtatgcgtgtgtgtgtgtgtgcacgcgggtgtgtgtctgtgtgtgggtgtgcgcgcgcgctcgcgtgtctgggctggggaaagttggggccagaggagcggtgg

SEQ ID NO: 8618 - DNA, 776 bp, Artificial sequence
  DNA replication origin
ctcgctccagctcccagaatagctttttcacccctagaccctgagcacatgcctgtctctccaggttaccagtggcccgctgacatccatctccttccacgccccccttccggcgtctacccccagcgtccctgggccccccgagtcacaccgacacgcacacctacaggccggcggcgtggagcgtctagggcacgatgcagccggactgcattgcacagtcatcaaagttaagtgtgtttgtggggtgcttctgtgccccaggggaggcgcggggtcaggaggagcggaggctccactctgcaccccaccccccccacctccgcgggtcaggggacgcctctacttgagattgcagccattttagggaaagaggcggctcgggccccgaggggagtggaggggggacagcacgtcgcggggggcttgcggctctgcagcccctcggcgcaactggaaggcgggtaggcgccgggcgcacaggggcgcggcgcccgcggcgacttggggaaggttgcgctcgagttccctggttctgcctggagttgttcggggtaacgcgccggctcctgcctctttctcgggttcccgctgggctgggaggtggtgggggaaggtgtcgatggcagattgggcacgggaggaacgcgacagaacctggagactggaaagctagcgatgggggaagggggggtatctcctctcgccggttggcgctgacccagacagtgcgacccacttggccccccatcctccccaccccctcccgagcctct

SEQ ID NO: 8619 - DNA, 1079 bp, Artificial sequence
  DNA replication origin
ctgccgccttctcaagacggtacctagataggttcgtcctgacttgggcagccgccgccgccgcctgtgccggctgcgtgtgtgcgcgcgtgtgtgtgcgtgtgcgtgtgtgtggtgtgtgcgcgcagagcgagagaccgcaggggaagcgagagggcgagataatgagcgagccgggatggaggcgcagaggcagcgcgagcgggcgggcgtgtgcgcgcgggggtgcgtgcgtgtgtgtgtgtgtgtgtgtgttgtgtgtgcgcgcgcgcgagcgcgcgcgtgtggctgggtgtgcgtctgtttggggagctcaccggagagccggggccgtcacgtgggcgcgctgactccgccggctgccggggacagcctgtactacagccccggccactaaatcagaccacgccgccagaccttttgcagcccgcggccggccggccgccttctccgacctcctcgccatagccgccgggccatgcgcgtcccgggacggcagggggcgcgggtgaggccgcgggcaggtggatggatgggtggggagtgggccgccctgagcccgggaagaggaaaaatgctcgaggaaaaacacaggcgcccacccccccgctacgtccggcaacctcctggcaagccttccttccgccctgtttgaagatttttttttttattcctaaaattgcttttccatgcagagacccctcttccagccactggaaaattattttcacatagttgctatgtcccgcttttcttgctttcgcgatccctccagcccccccgcgcgcgtgtccacgcaggcacagacacaccggtgcctgcctcctcccattccaaatgcaaacccacttccttttgccggttgctgtagttaagctaagtcaatgctacatcaaactaggctaggctgagaggactggaaagtggatttaggggacaatactgccccagcaggaagaaaggctctagtttggcgttctgttgatttaacagtttaaaacgaaaatggattttgtagcttctgcactaaaactcaggccccttgagtcacaattatttaaagggagctattctctaaa

SEQ ID NO: 8620 - DNA, 1321 bp, Artificial sequence
  DNA replication origin
cccacatggtctcatttcatcatgggagcagatgcttttcctggggagcaaaaggagccaaattaatcaacaaatgatcaacatttagcaggcaccacctatatgcctgacacataagatcattccctgcctccctctccccactggctggtttattcccctttgctttcttacttaacggtttgtattgtatggtttatacctgtttccctcatgactctataagattctcttgcatagcaaaaacctatgtacagtgcctggggcaaaatagggaaggtctgctagtgaaatggagggagggagggagggagggagggagggagggagggagggagggagggagggagggatggatgggtaggtgactggatgggtgcataggtgggtgggtgactggatggatgggtgaatagatggatgggtagatgggtgggtgggtaactggatgaatagatgaaagggtggatgggtgggtgactagattaatgggtggatggatgaatgggtgggtgactaaatggacaaatgaatggataggtagattggtgaccggatgcatgcatggatggatgacaggatggatgggtggatgttagtgggtgggtgacttggatggatggatggatggatggatggatggatggatggatggacaaacggatggatggatggatgagtggggactggatggatggatgggtgtgtgagtgggtaggtgaatggttggatggatggatggatggatggatggatgggtaggtgactggatggatgcataggtgggtgggtgtgtgagtgactggatggatgggtagatgggtgggtgggtgactgaatgaatagatgggtggatgaatggatgggtgggtgactggatgaatgggtagatgggttaatgagtaggtgactaaatggacaaatggatggatagctgagttggtgactggatggatgcatgggtggatggaatgatggatggatgaatggatagatagatataggtgtgtgggtaactggttggatggatggatggatgactggatggacagatggatggacagatggatgaatggatggatggatggatggatgactggatggacagatggatggatggatggatggggactggttgggtggatggatgagtggggactggatggatggatggatgggtgtgtgagtaggtaggtaactctttggatggatggatgaatgggtggatggatggataggtggggactggattgatggatgagtggataggtcggtgggtgggtagatggatacctggacgggtgggtgtgaatgaaaggac

SEQ ID NO: 8621 - DNA, 893 bp, Artificial sequence
  DNA replication origin
gattacccctctggcaagaagcgtgcggggaccgatgggtaagccaggccgggggcgcgaggcggcagctcgggctttgttggggtcctggcagggagcgggccggggctggcctggccgagcgggtcctggagcccgagcctttgtttctctctgggctgggttcactagcggcgggtaggagaagcgcggcgcccgttcggcccggcaagggcgcggggggttgcgtgcgacggggccgctgcccagcccagtccggagggtggagaggcctgcagtagccatgagggcgcctcctcccccaggccgaaccgagcgggagtcatttgcgagggcgtcgggcgggagtgaaccgcggacctcgtggcctcggttcccgaggaaggcctggagccggaggagagggtgggggagggcgcggtgggagtattcgcttccaagggcagcaggcacttcccagccagaggggccgtggggagggcctgggtgggggcgcggccaggcactccagacgggaaaggcggagggcggaaagtgagagcagcgcgtggatcataatgtaggctgggatgggggtggcgggagttgagagaagccagcaaatagggagttctcgggggaggtgggagtagaggacctgccgggagaaaggaaaacgtggagtaatatacctgatgggctggaaggctggtgttttggggcgactgagtttatagtttggcgggagagagcgtgccttggtccattcaaacacttcaaagtagatactagcaaacttccgctctctgcctacgctcccgccatctcctgtatttcctgctttggttaaaactggttactgaacatcgtcccatggggagggattagaaggcattgtttttttttttcatcat

SEQ ID NO: 8622 - DNA, 1284 bp, Artificial sequence
  DNA replication origin
ggagcgtgaggggtgtctcatggcccttccagaccacctccctcatctccccacctggtctcctgttaccctcttcctccatcctcccccacagacatccctaaggcttctgtccctgccttctggggctttgcatgtgctacgccttctccctgaagtgccttctccctgttctctgctacactcagtagacttggagcttcttgaagacagaaactcagttttattcatcggtatccccagcacctgggcccacacctggcaaaaggaaacatataatatggattttgcataaggagttcagtgagggacagacttggcatccaatcattccagcacaatcctgtgattgaagatggggcctgtgctggagaaggacagaggaggcagtacccatctccctaggagcctcagggaaggcttctcagaggtggtgacttttgaactgggttccacaagatgggtaggagttttccagccaagttgggtaggaaggccatctcagcaggcagtgcagtggaagtttttaagaagaaaagtgggtgatgagatagtctttagttccttaagtcctactggtaaaaggatatgggttggactttgggatgaagaggaaaggggaggaagaatgggagtagcctagggagagacagagaagcagaaatagagacagtgagatgagttagggggcgttgtagtaacccaagcaggaaatgaaggcttttaccaaagtgcaggtggtgcacacagaggaggcatgggtttaagagacacaccgggcagcactggcaggatggaagatgaaggcacagtgcagatgaccagggttcccagcaggagagactgagtggagggagggtgggacctgttctggaaaagcagggagagaggattagttcagctggagtctcctgagggtgagacgctggcgggtgcccaggtgggaagacaggtgggcagacagtcggaaacttgggtctggcacttagaagaggagatgaagctggcaggggttctcagtgttgactgcacatcagatgtctggtttttaaaaatcagatgcccaggccccaccccaagagattttgattctgtgagaaagaaaggagagaagaaagacagagagagaggaaggaagggaaagaaagaggaaagaaagaaaagaaaagaaagaagacacctctatcaaagattctggggcccagctaggaattataaagtcaggtacagatttgaatcccaattccaacctatactaactgtgacttcacggggttactgatg

SEQ ID NO: 8623 - DNA, 1080 bp, Artificial sequence
  DNA replication origin
cacgatggagtgcgggcccgcgagcgaggcggccaggccggcgcggtacctccagaggctgccgtcgcggaccgcgaagttgccgaagtcgcccgggtgctgcgggtgcggcacggccagcgggttgtagtggggcccggtggactcgcagccctggctcaggtccccgaactggtgcacgtggatggcgcggctggagctgttcggctcggtcgggaagccctccagggcgaagaaggcgtcgagcttggcgcggggcgcaagctgccggaagaggacgacgccggtcacccggggctgcgcggcgtccagcgtggccgacggctgcacctggcaggcggcgtggagcgcgccgtcgtcgtcccgccgctgcatgacctcctgccagatctccgtgaccttggcgtacatgtctcggatccactccgccgagtcagagttgggctccgccgagtcctcgcccgtccaggcgtccgaggcaccggctgccaggagcaggcaggaacacagtagcgccagcatggctggagtcgggcacctgcgggacgcccccgcggaggtgggggcagagtgaggcttagtcacgtgaaacatagaatctcagggaccccattatcgcagaaccaaccccccagtccccagtgggcttcctggcccagtgggcatgacttcatgtggcaaacgtttgtctagggcctgctgtgtgccgggcactgtgttaggtgctgtggctgtaaagatgggtgagacccaatctgaagaaacccacagggatctgagtcacaaatgatcatcgtcctctccagtcccatctctatagcgtggagggggtctcagggagcgtgaggggtgtctcatggcccttccagaccacctccctcatctccccacctggtctcctgttaccctcttcctccatcctcccccacagacatccctaaggcttctgtccctgccttctggggctttgcatgtgctacgccttctccctgaagtgccttctccctgttctctgctacactcagtagacttggagcttcttgaagacagaaactcagttttattcatcggtatccccag

SEQ ID NO: 8624 - DNA, 902 bp, Artificial sequence
  DNA replication origin
ctttggattccacagctctgggatgtagcccaggaagctgtattttttttttttaacttccctgagtgattctggtgatcttcctcttggagccacactgaagggcaagacaagcagtggctgaacgttgttgccagcagggttagggaggtgggggcagaggataaggagaagtcctgtagggatttgggaagcatgtttgccactcccaaaaaaaagaaaaaaaaggaaaacgaaaacaaaacaaaaaaaagctcagcttgggagagaagcctaaaacaaacaaacaaaaaagtaaccaagacctcgacgcagtactgaattgctgaatttttaatctgtaacacaaaggttgccaaacattcccccaaaggagcagctctcagtggggtggcggtggatgcgaaacagctgaagacgcggggcagttggcctggcttccgttgcacgggctggcttcccgcgggagcggtggtgggtggggaggggtggggggactcgaggcaaccccccagagcggcctctgagcgcctaggaggaacctgaaggcgggaagggggaagatcgtcaggtcaaaggcgggagtctcagggcttatggggtggggaaggagggtctgggtggaaaggtacctcagggagcctaggaggctgtcagcgtgagcggggtgtttcggtacaaatggaggccttcagacctactgagtggggggctccgagggttggggcggtcctcaggatggaaggatggtgggtctcggtatagggagacctctgggtggagagggctgcggggagacttcagcaaaggcgaaggtgagacctcagagtggagggtgtctgttggagcagaggagaagctcaaaggcagaggggggcctcgggggtccctggccgccgccg

SEQ ID NO: 8625 - DNA, 941 bp, Artificial sequence
  DNA replication origin
ggccccggcggccgcgcccctcctccctttccctccggcggaggctgacgtggagtcaacagcgctggcggccgcgagaggcggcggcgcagcggctcggaggcgccgggccctctcggggccgcgcggggcccgggcggcggcggcgacgcgacgtcgcgaggaggaggaggcggcgggggtccaggaggccggccagcgcatggaggaggaggccatgaacggcgaccggactgagagcgactggcaggggctggtgagcgaggtgaggccgcggcgccggccaggcgggatgggccgggccgagcggccgccagccccgggcccgcgcccccagagaggccgagctgggagggacgagaggggggcgcgcactccaagtggccgcggctgccgcacccgcgcgaccccgccaggtgcgccgctcctcctgcactttcgggtctgcgcgggcgccactttcttccgcgccatctggtgtcagcctttggggaggggccttccccccaaggcaggggttggccctggattggaggctgaagccctgggatccgggagcagaaggtgccaagccccacctgcctgcccgctcgccactgttgtggagccaaacaattggacgcctgggactgaaacgggaaggtggtgccatgggggagaatccgagccctggggtggaacctgggccaggtggaattacctgcggcggtggttcgagttgggggagttcgggggtccgctgcagccgttcactcattcacttgctcaattcaatcaacacgtgtttactgcaggcctaccatgtgtaaggtggggaggggcatttatcgaaaaagtgaaacacaggtgcagaagtgattcgatttgtggaagcacagaacaccgtgtccccctgccctgcgactcttttgtcataaacataccctgggggtccactttca

SEQ ID NO: 8626 - DNA, 949 bp, Artificial sequence
  DNA replication origin
cgtttttcaagtggcaaatgtgtggctctagaggacagagtaaccaccttgcagccaagaagccctgatgtcaactcccagctctgctgcagcacccagaaatcaccggacctttctgcatctttctgggtgactctgtcatgaggatttcataatgtaattccctagcacataagaatttctcaaccaatatggctttcttttttccttctcactagtctttgagcttcttaaagggaagacatgtcctattcatctctacaccccccacaccagtctgcattcagtaagtgctcaatcaatgtctgctgaatcacatcttcccactcaactgcatggcctcggatgatccaattctgtgggactcagggtctccctgattctgaagatctccatttcagccaccccatcctggtgctttttctggagagactgggaaaaaggtgagcagaagagaatagaaccaggagagggagtgaaagaggggttgaaagggggttgggggaaggaaggggagggaagggaaatgctatagtttgaatgtgtcccctccaaaattcagatgatgccaatgtgatagtaggaagaggtggtgcctgtaagaggtgatgaggctgtgaggtttccttctttgttaatgggattaaaggtcttataaaataggctttgcgcagcattgcactagcttgctctcttgccttatgccatgtgaggttgcagcaagacgcccctcatgagatgccagcaccttgatcttggactttccagcctccatagctatgagaaataaatttctgttctttattaattacccaatctcaggtattctatgataactattctgttatagcagcacaaaacagactaaaacaggaagggaagggaggaagacaaaacagaagataggagagaaagggaaaagaagggaggcaagacaaaaggagaaggg

SEQ ID NO: 8627 - DNA, 1499 bp, Artificial sequence
  DNA replication origin
agatgatgccaatgtgatagtaggaagaggtggtgcctgtaagaggtgatgaggctgtgaggtttccttctttgttaatgggattaaaggtcttataaaataggctttgcgcagcattgcactagcttgctctcttgccttatgccatgtgaggttgcagcaagacgcccctcatgagatgccagcaccttgatcttggactttccagcctccatagctatgagaaataaatttctgttctttattaattacccaatctcaggtattctatgataactattctgttatagcagcacaaaacagactaaaacaggaagggaagggaggaagacaaaacagaagataggagagaaagggaaaagaagggaggcaagacaaaaggagaagggggaaggagagggaggggaggggaggagaaggcagagaagaggaggggatcttgaggggaggggagagaatgtaagaggggagggaaggagaaggaagggggaggagggggacaggagagggaggggaggggaagagaagaaagcggggaggagaggggacaggagagggaaaggaaggaaaagtaggatagggaagggaaggagagaaaagatgaaaggagaggagaggggaggggaagagaggagagggaaggggaggagagaggaagcatacgtcctggggaaggagctcattgatggggcttgggtccatgcccatccctgaaccagtcactgtgcactatcactaagtcccgtgtccacccctgcaaccatgaaagtaaacacagtgtcaagggtggtcccccaaagaaaggagaagtaacgggtcccaggcaagcagaaaccacagatgtcttctctgccaatcccgcatctgtctttgaattttgtaattagaaatgagtttttttttctgatcaggcccatcatttaactcaagcctggttgggggtcctgggaagggcaaagtctgtgttccagtgtggtccatgcatacaaggaagagaaaagaagagaaaaggagggtagaggaggagaggggacaggaaaaagaaggagaagggagagggaaaagaggggaagggagggaaggagagggaggggggaagggagggaagtggaaaagagaggaaagatttggtggcaatcatttgagccccgtgtttagctgtgcctactttagatttttcagttatttgagccaataattacctttttccttaaatgagtttaattctttttaagagtacgtggagctcaaagagatccttactaatctatctgggccccttagagtaattccagggtccatttatcaaggaaagcaacatggagcacaggcagagtcccccacttgaggccatctgcaggtatcctccttgcttgggcactgtgtggccctggaaccaggcctgtgtcagggtgaagggctggagaaggtggaaatgggtatagaggtatcaccaggacatttatccaaagtgtgtcatcaggctgggtgcggtggct

SEQ ID NO: 8628 - DNA, 1601 bp, Artificial sequence
  DNA replication origin
gcggccagcatgctgctcggctgcggctcggcctcccacacccgcggctccctagtcctcgccagcagcggcggcggcagagcagcgagcggcgcccgcgtctgcagcggcgccgggtccgagcgcgcggcgcggcggtgggggtcggggcccgggcggggagcggggaccgggcatggcgctgcggagaggcggctgcggagcgctcgggctgctgctgctgctgctgggcgccgcgtgcctgataccgcggagcgcgcaggtgaggcggctggcgcgctgccccgccacttgcagctgtaccaaggagtctatcatctgcgtgggctcttcctgggtgcccaggatcgtgccgggcgacatcagctccctgtgagtgggacccctccagcccccatcccgtcccgccccaccctgcgtccgccgccgcgagggagttgcctctggcgccgggccagcgcgaccctgacccactccccaggccccttctttgcctttgtgtgggggacgtgggtggagtgttggcccccggggaggacggtgaggacctgagccccagaatctgggaacccagacaggttcctgtggcagcgtttctcagagtgtggcccacgggccacctgcatcagactcacctggggaagcttgtgccaatgcagaatccagctgctctgaagcagtctttggagtggagtcctggagtgtgcgtttgacgtccccgggagactcaagggtgcattaaagtttgagagggcgtgtgcgtgtgtgtgtgtgtgtttgcgggttggagttgtgtgtgtaggggcgtgcataggagcagctgaacacgacctgactgagtgcaaactgggcagggtgaggcctcactgccccacatcaggtctggggcgaatgttcaccccgtggcctcctcccgacttctccacattgcaggttgcaaaaagtcgaggtcaaggcatgcaggctctgggaggggaggggccgccccccgtggcctagaagaggggtaacagaaggctgggcagaggtttggggcatgttgggcgcctagcccagtggccaagtgctttgaagtcagccttcttgccctgaggtcaggagggcttcttgccccctttctccatcacacagttgtgttggctgctttttcagcaggaggaactgacaggaaagggcttcacattaggtatccacctgccgagaggtgctttcatcctgccctcacctggccactcaagccaaatgaccagctctcacaagggcggtggaaggggctgttgggctgtatctttactgctaggacatgtttcctgctaagaccactctcttgttccaggccaagatgcctgggtgcccagtcagtggtggaggcagggaatccccggggtgacgttgcttgtgctcaagatactttcttgtgtccagtgcttcccagcctcccacccaaggcaaattgtaggggcctggacccaggagtgagggggttcccatttgcatttatagaaagtcagaagagtttggctggtgggaacagaggacctttttgattcttaatattgctaagtcgggtgacatggaggattccagaaattagagttccc

SEQ ID NO: 8629 - DNA, 1874 bp, Artificial sequence
  DNA replication origin
ggtatcaggcacgcggcgcccagcagcagcagcagcagcccgagcgctccgcagccgcctctccgcagcgccatgcccggtccccgctccccgcccgggccccgacccccaccgccgcgccgcgcgctcggacccggcgccgctgcagacgcgggcgccgctcgctgctctgccgccgccgctgctggcgaggactagggagccgcgggtgtgggaggccgagccgcagccgagcagcatgctggccgccacccccactcggcgcccccccacccgagcccgggctgctgggcggccgccgccgctgcgcccgccgcactcgcgcctgcctgacatcagcactcgcgcccgcagcccggctctggccaatgaataatgcatggcggggcccgccccgcgggggagggggccagcgccggccccgtggcgccccacccggcccccacctcgccaccccctctcgccccgggccgggcgcggggacagagggaaaagttgggtgaccttgggggaggggccaagcctggcggagacccccgtcggggcctgactgagcggtggaggatccgatgcctgcaatacctccaggggtataatctggggagggcactgggttcctttcaggcaaatcaataaagtcggagcggggagtgtggagaaccggcttgattactggggagggaggcagccctgggtgctttgaagaggagagactttggagcagcctttattaattttgaagtgcatgctgccggtagggtcagcgaggatggctttgcttgtcttctgcggtggggcagtgaggtctggctctcgctcccacagcaccaggggttactgaagccagccagtcctcccatgggaggaacgtggggaagcaaagccgctgcagcctgcacgcccggcgctctgggccctgcctgctgcctgctaaagagctggaaagcccgggaaagtttcccctcgctcagctgcccacgggtcaccccacccgccccagtcagaggagggtttgtagagattgagggtgtgatacattctagccactgtacttttaatcttctaaccttttgaggcaggtcctacttatatccttaatttattgatgaggctgctgacgcccagaaagcatcctgactggctgatggtccagcagctcctggctgggcaggatggggctcggagccttgaagggctaccttaactgggccctcctgagcccctcttcaactccttaagtttgaagcaatgagcggaaatcttaacacaggtaatgtgcggctgaggaaatcaaagaaaatgaccaaagcggaaacaaagtaatggctaataacctgaactgctgggagaagggaatcacagcacgactgtcgagctgcaaaccaaggaaaagcatgccagatgctaaaacctactcagaaaagtcagtatcgaatgcaaaagtaggaatcatactattgcttcttcagcaattattgttggtgatccattgacaagatccatgaggacggtatcaggctggctgctgtgggagggaacaaaggaacagctcctgtcctcagggagctaaaagtctagctggacagacaaccctaaaagagcaactccactggctacaagggggtcacagactgaccaaaagaggttcaggaattgaaagagagctttgcgtaggcaacttcatggagggagttagacattccctgctggtgactatgtaaaaagcacctggcatcagtacaaaccagcctgcatttatcatcatttaattcttgcatctgtcctgagaaatgggtcctcccattttatggatgggaacattgagctcagagaagtttttatcttgtccaagatcacacaggacatggccaggg

SEQ ID NO: 8630 - DNA, 920 bp, Artificial sequence
  DNA replication origin
tctctttcttttccccacatttcccccttatctattcgacaaaaccgccatcgtcatcatggcctgttctcagtgagctgttgggtacacctcccagacagggtggcggccaggcagaggggctcatcacttcccagacggggtggccgggcagaggcgcccctccaccccccggacagggcggctggccgggcgggggctgccccccgcctcccggatggggcggctggccgggcgggggctgccccccgcctcccggacggggtggctgccgggcggaggggctcctcacttcccagatggggcggctgccgggcggaggggctcctcacttcccagatggggcggctgctgggcggaggggctcctcacttctcagatgtggcggccggtcagagacactcctcacctcccagatggggtggcggcagggcagacactcctgggttcccagacggggtggcggccgggcagaggcactcttcacatctcagacggggcggcggggcagaggccctccccacatcccagacgatgggcggccaggcagagacgctcctcacttcctagacggggtggcggtcgggcagagactgcaatctcggcactttgggaggccaaggcaagtggctgggaggtggaggttgtagtgagccgagatcacgccactgcactccagcctgggcaacactgagcactgagtgagcgagactccgtttgcaatcccggcacctcgggaggccgaggctggcagatcactcacggtcaggaactggagaccagcccggccaacacggcgaaaccccgtctccaccaaaaaatacgaaaaccagtcaggcgtggcagcgcgcgcctgcaatcccaggcacttggcaggctgaggcgggagaatcaggcagggaggttgcagtgagccgaga

SEQ ID NO: 8631 - DNA, 1084 bp, Artificial sequence
  DNA replication origin
gcaggagcccccggctctccacgaggagccccgaccgcgcctgtacctgcaagagtccccaccggcagactaacacggccccagtggcctctcccctccctctgccggccgcgcgccacagcctccaggccgccccgccccgccgctgtcgcgcgctccaggcacttccggcgtcgggactgcctcgcgagaggaggaggaggggcggggcgcgcaccggtcttgggggtgctgagagccagaaggggcggacagggacggggcgcggtgggcggggcagggaggagcgaggggcggatcgaggtgggggtaggatggggcccgtgggcggggcagggagcagcgatggggcagagctaggaagggtggggcacgcgggcggggcagggagccccgaggggcgcggagagggagggagccgcgcgccggacccaggtgctggtgggatcgctgggcgccgggacctgaaagggcccgagaagggcggggcaggcccctgcggccacacgcaggtcttttgggaacccgtgtgtgcacgtgtgtgggcatgcttgcatacctttcccgttttcccggaaattctctgctgtgggcaaagggacggtaggggtttatggggtaggcttcagcgacaacggggagatgaaaaagaatatgaactttaggtcctgatcagctggcgcctcctctaacagttactaagcgagtagttctcatgtcagtcctggtgggtcagtatagaattttaaaagtccccctgtccaagcagcaccccaaaccaattagaagaaaattaaccctggatgggcccagtatttactaaaactctttgggtgattccaatttggagagaagaggcgcgtgccctaaaacctccctaacaggcaaataatactgtgacatctcatcccatttaaccctcacaacttattggtagttgcagcaccgtcataacgaataaagagtgtgggctcagggccgggcgcggtggctcacgcctgtaatcccagcactttgggaggccgtggcggacggatcacaaggacaggagatagagcccatcctggctaacatggtgaaaccc

SEQ ID NO: 8632 - DNA, 1191 bp, Artificial sequence
  DNA replication origin
atccgccgggacatccgatgacttccggtctagcgcagggctggacaaagtcatagcgctgtgaacggcgaacatggagcgcttctgtgaggtggtcccaggtctcaacaacacggccgagaccctgctgcgcaccatcgagcttggtctgaaggtgtcgccctccacgctcttcgccgtggccagcatcctggagggctgtgccttcctctgggtccccacagaacactctggtgcccggagcccttgggctcgcgtggcagcgccaggtttacgtgggcagagatgacttcaagtcaggccagaccaaagtcaagtccgtgctcgtggacttcctcatcggctatggcctcaagaccaagtcgattgtgaattataaccacctggggaacaacgaccggcagaacctgttggcgccatcgctgttccctctgaggcggtgtccaagagcaacgtagtggacgacatggcgcaaagacacccagtgctctacgcgcctggcgaggagcctgaccgctgcgtggtcatcaagtacatgccgtacgcgggtgaccccaagcgtgcgctggatgagtctaccttggagctgatgctgggcgtaaccaacacgctggtactgcacaacacgtgcgaggactcgctgctggccgcccccatcatcctggacctggcgctggtgaccgagctgtgccactgcgtgagcttctgcaccaatgacaacaccgagccacagaccttccaccccatgccgtccctgcttagcatctcttcaaggcgccgctggtgccgccgggcagcccggtggtcagtgcgcttttccgccagctcagctgcatcgagaacatccacagggcctgtgtggggcttccgccacagaaccacgtggtcctggtgcacaagatggagctcccagtgcctggcctcaggtgagtcggacccgtggctgccgcctgccctgtgtcgaacaagaaaggaccggtacccgctgccaccaatggctgtaccagtgataccaatggacacccacaagtggaggaaccccagatgcacaccacctgaggccctggtcacacagcttcccggcctttccttgctgccccccaggacccaacctttccaggcccccacaaagacagtaaagccggtgccactctcaaaaaaaaaaaaaaaaattagctcttcgcggtcggg

SEQ ID NO: 8633 - DNA, 880 bp, Artificial sequence
  DNA replication origin
cggcagcagcagcagcaacccccgccgctcgcggtcggcccccgggccgcagccatggtcccgagtggcggcgtcccccagggcctcggcggccgctctgcctgcgcgctgctcctgctctgctacctggtgagcgccggaccctgcccgggtcttcccctccgcgcggggccccggggacgcgggtgggggcggccggggacacccgccacgcggggcggggacgccgctgctagttttctctcttcctcgtcgctgcgccccgggcgttcccggcacctgggataggtaccccgggcgtggagaggggcgcttggaccggacttgccaagctgctctctcgctcgtgctcattcctttccctcctggactctctctagacccgggtcgggttaccctcgagaccccttcttgtcctcgactccacccgggagcctcgccgcccggagttcgctccccgccccgccgcgcgcagtctccagcaccccccaaccccccacccctcctgggcttccctctcaatcttctcgcagctcctttccttcccgtgcccaacttcgcctcttactctcggcgcccgccacccgcgtcgaccctccttttagtttccaccgggtcctcccggcccggacagttttctgccaacgcacctcgcatctccagcgctcttcaactcctccttggtcactccagccaagttgcggatgccggaaagaaatctagttctctgtaacacgcttaccgccagagtggtgactttagctgcgtcttgaacattgtcatttcagagaatatgtttggctcatgcatgtcagtttgcaatttgcacacttcttggcttctgttttagtcatcaactaaagggcagtaacctattttt

SEQ ID NO: 8634 - DNA, 1258 bp, Artificial sequence
  DNA replication origin
ccctccaggtaattctgaagtttgagaaccggtggaataaggccagggaactcacacaaggccacagctcttaggtgacctaaaaaaaagtggacgacagctgaggagccaccatgcctggtgtggccaggcctgtactgaagcagctgagggcgcgtccacgcccgtcaaaccatcccgggcaccccgtctcaccaccagcctctccccgacgtctgttgtgacttgacctatgctcgtggcacagggaaagggctgtggcctctcaggctcccaggctattattagttccaatccgcacaaatctaccagtgctaaagggaagcttctgcgaactttggaaggtggattaactgtttcagagcagcagctgcgggcccagatagttgtcggagccgctagacacagccaagcgcttccctgaaagccaaggccggcggcgagctggtggtcccgccggccggaggcccctccccgccaggccgcagaacccgggtcggagagcagccagtctcaacctgcgtccccaaggccgaggatgtgtcctggttttttaaaaagctgtttgcgcacttccagggcctcacccctttcatttggggctccagtattactgtattgacctaattaattcatttttttctcagtccaaagtggaagccggagcacagggatgcaaatcaaatacaaacccgtcctgggtgccaatactctggacaattaaaacaaagagcgcagtggtggcggtggcggcggcaccacacaaaaccctcgggaaacatccagaacgtgccgcgaaccagccggcagggtggggcgcagcccggctgcaaacatgccagcaaggaggcagtcccaaccccgcaggtggacaggtggaggttggcaggggtcaaaatccatcctgaaggcctgggagccgggcagctgcgcggcacaactccagggggcacactcgccctgcgccctgcgggaatggcgccccggccaaaaaagcaaccagacaaaaacccattgcacgggcgggaactggtctgtgcgacccgcaaaaggggtgggtgggagaggaagaatgcggaagcgaggaagaggatgggaagggagaaagaggaaagggaggaaaaggagaaagtgaaaaagagagggggtttgggagcgcgaggggagaaggaagagggagccggagggagaggagggggatcgcagagagcaggagcgcggaaggggggcgggggaggagcagagagaaagggaaagg

SEQ ID NO: 8635 - DNA, 2581 bp, Artificial sequence
  DNA replication origin
tgagagagcaaagacacataaacagaaatcattggttggaacttctgggaaaacttatgaaaggagccaagccaagactgaaggacacataatcttgcccttcacctctcctccttcctgctgctaggaatgtcattgtgatagagctgccgcagtcatcttgcagccatgaggtgatattaaagggagaagccaatgttagaaatggtggagcagaaagaggaaaggatcctgggtcattggtgatacgacgtagccaccataccaaccctgaatggcctattccagacacgttcagagaatgaattaactatctcttttaagcaaaccattaattgggattgctgttacatgtaactgaatctagtcctaactgataaatcacctgaccccatcttggggatccagggacaatttcctgcagatcatgaaagataattaggaaataggtcaggtaaagggtagtaggagcattagaggctccagagtacaggttttatttaaagagcagcagagagccactgatggggtttaaggagaatttcagtattggattttagtactgggaaacaacaaatataattatctcattggtagctatactgaagagagggaaagactgaagtcaagaaaactaggccaagaggtgatgtgacaatttatgccaggaataagatcctgaaataatgctgcataacagtactgaacgccaagggctgtgccatcagcaagacccgggggcctatctgggctttgtcactcattagccatatgaacctgagcaagtgacttaacttctcgatgcctctgttccttcctatttccatgatatttctaaaagaattgaatgaggccgtgtgtgcacaatgcttaggacagtacatgtaaggactcactaaattattgctgttattattgttgctgggcctgtggcagtgaaagacaggttctaagcaataagaagaaatcaagagaatgctgagaccagttggatggagagaggggtggatgagacagaaaggaagtagaaatgtctctcgaatttctgtagaagaaacaatttggggagaaagataatgagtccagttttggacctgtggagttggcagtgtctctgggccatccgcatggagatgatgggtgttcacctgcactggcagatacagagggagtgaggatctgagttggagatagactggagagtcctgggggtggatgagatcacaggcctaaggtgagtgtggagaatgaaaagaagacggcaaagagggagccctgtgggtggtagggatggatcagaaggagccagcaaggaaccagaggacgacaggacagaaaatcctaagaaaagccttgggagtggccccaggaacttcaaaggagacagaaattaaagaagtgttaattgcactaaatggagacctatggctcacgcctataatcccagtgctttgggaggctgaggcaggagggtcacttgtgctcaggattttgggaccagcctgggcaacatggtgaatggtgaatccccatatctacaaaaaaaaaaaaaaaaaaaaagctgggcatggtggtgctcacctgtagtcccagctactcaggagattgaggtgggaggatggcttgagccctggagggagacagaggttgcagtgagccaagatcgcaccactgccctccagcctgggcaacagagagaaaccctgtcttaaaaaaaaaaaaatgcacgaaatgctgcagaaccgtccaaaaaaaatctgtgatgtgaacattgggctgaagggcaaagaggtcattggggaccttggcccctgccagctggaggttatgatggggctggaaggcagagtctggttggggacagggggcagcggtgggggaaagtaattagaaccagggatcaggaagaaagcttgtgtgaaggtgggagagagttccgcagtagccagagttaataaggagaggaaaacgaaaggaaagtaaggcggaagaaaatggaaggcaagaaacctaggaagacaagagcaggcttgatgtccatgacaggaacccaagctgtccccgggtccttgccatgtgcccagagtgtagaaaatcgccccccgtggtttgggaaagcctggctgcccagcagggataggcggaaaattggtggggaaagtctccaacctgagcatgcatggacagagctcagagaattcaatgaggccagaaggaaagagaatcatggctcccattttctgagcactcaacatagccaggcacctggtgccaagatgtggcaacctacgaggtcctacctatttcaccagtgagcacctgaggctccatgaggttaaggaaccggccagcgcgggcggaaccagggccttcaaccctgtctgagcccacagaggtaatccttagtcaccaagcgccgctgtgtaagggacaaagaccgcacaaacggccggagaagacgcgagagatgtggcccaaagagaggggacgggcctgggtgattttacacagagaggggacgggcctgggtgattttacatagagaggggacgggcctgggtgattttacatagagagggga

SEQ ID NO: 8636 - DNA, 1090 bp, Artificial sequence
  DNA replication origin
gtttaggaaatttcccacggccgtgttgtgtctgagccgagtagtggaaggcggtgggaaggaggtgtagcgtgagactggactgcccgcattgggtacatgcgcagtgccgctcgcgcgggccgcgccaatcctgcagcgccttcaacaggtttcgggcggcgaattccagttctccgggttttggggctccctgcgggaggcagtgctggatctgggaatctctaggaaaggaaagagcaaaggaggggaaagatggggggctgcaggtaggaggagggggcgggattcgggcccttcaccctgctgttccatgcccggtggggccaggtttgcccgggggcttccgggatcaggccgcctgaagcgcgattcgggcagccggcagcgtcctcggctgtgccaggccctcgggtggcccggttccctgtgcagtagtggtctcaacacacacctgggctcacacacggtggtggctgcgatggggtcttagagaggccatgcagcacgcgagcggcaagagctttgatcgggtcctctgggcagactcggaggtgggagaatgtggctctcaattccaaggcagttttcccttctggagagaactactccgcgctctggcgtgtgtctgcgaggtggccattaggggtgtctttgctagaggccttggcttgacctcatttcacacccaaggagaacgctaaggcgagagagctcaactgcaaaagttttccgcttgaggagctctggaagggcctcctcattagcatgggggggtgtaatgaatgaagacagtccccgacgtgtcacttgcccgaaccccagacatctctggcgctcctgcaccaaacgccgagattagcataaaggaggcgcccagggaacgtttgaatgaatgaaaatagctgggaacccagagtgagcgggaagccgcttggaaaacacccattgaggaggtgtttcatctaggcctgtgaaacgcagcccattttcccaggacccctcctcccttctcctcggccccgcctcctgacccctccattcctcgtccccgtagtaatcccctccggttttcctcagtctccacgta

SEQ ID NO: 8637 - DNA, 1122 bp, Artificial sequence
  DNA replication origin
aaagatcttagaagcagtattcatcgaccagaaactgcactcttcggtgctgtcctcatttcaaccccaatgatgggacagaagggttgtcacgcatctacagggcagcaaaaagcacataactgtaaactatctaatgattaagaaaaaataaaacatttatataaaattcccaagcggaatgcctctccttttccttatgaggcagaagttactgataaattctaaatccagatttctagaaaatgctgaaattctccgccccaacactcacaagtttttaacatggaaattcactcaactcctactcacacgccaaatgaatatccattgtggctatctgaaactattctcaaacactaacagaaaaacacatatatacatcttgagcctccttctaaccgtcctacgataccctccaatcatcctcaggcagcctagattgcaaagcttcgacagacagctgcccttggcctacgccgtcaggaaccaggaggggggcgggggccggggggcgcaagaaccaccaagagaccagatctttttccaaggctactgtttccaagcaaaacaacccacggcactaaaaagacggcgatgaaaattggagacgctttaatcccgagagaaaggggtggcgataggggggcgggagggtacaagaaatcccgagaaaaagaggtgcggaggagaaaactaagtatcccatgcatctttcagacccacaaaacaacaaaccgtagagtcttgtgtgcacttagaagcagcagatggagtccccggggctgagacagttcagcagacgtacaccgtgggttgtggataaatcaaccgatgacgggagaggaagggggtgccgagagaataagcccgtggatgggggagacaaagcctcggggggtgatccaggaccatacagaaaggtgagaggggacccacaggagaaagacaatggaagaacaattaaggcagaaatctggtgcccgggctgtggcaggtcactgggctaacgacaagagtgtggcacaacaaaggggcacgggaggaaggacagcggaggggaggagatggagaggggatgcgggacgccacgggtcggacaaagcgcccaaggcggcgaaa

SEQ ID NO: 8638 - DNA, 1253 bp, Artificial sequence
  DNA replication origin
tcattcatgaagccttgcattcagcacatcttcattgagagtcaatcatttgccaggcacttttctagcatgtcagcaaataatgagcagaattatttcaggtagtaagtactacaaagggagtaaagcagggagatgtgatgtatacaaacagattaggggctgattttttggggggcggggacagggtcttgctctgttccccaggctgcagtggagtggcgcgatcatggctcactgcagccttgctccctggctcaagcaatcctcctaccttagcctcctgagtagctgggactacaggcacacaccactaagcccagctgatttttttagttttagaagagaggaggtctcgctatgttgcccaggctggtctcaagctcctgagctcaagcaatcctcctgccttggcctcccagtgttggcattacaggcgtgagccactgcacctggcctggggctgctgatttagaaggggtagtcaggagaggtctcttaaggaggggactgtgatctgagactgaaccacaagaaggacaaagtcttgtgaagatcccaagacagcttctcccaggcaaaaggaggagcacttttagcagaggtaacagcaagtgcaaaggccctgaggtgggaatgagtgtggccccattgaggtacaaatagatagaagtaggagtgagtgagaggcaaacagcaggacgtgagatcagagaggggggccatctcagggtcctgggtgttccatgaagctctgtggtgctggaaagcccttcaacctccattgcacagattatgtcctcagttcagaccctttggaaagcagacgacaatggctgtgaaacctgcgtttctgacgccctgcttggctgtgctgagacttggtccatttgctagatacccgtggggctccttgtgtactgacaatgcttccactggcagagctgcatgctacatcttgctgagtctctgccagacacagaggaactaacgcatttttactgtcagtgtggggctggaaagacagtggtgcctcttttctttgaaaccatgaagaccacatggtttggggcatttagtcacagaaacaagaaggggaagggacactggagaagctgtggatgttattgggaggacaggctttggcatcagacagacttgggatcaaatcctggcttcactggttacctgctaggaaatactgggcaaattagtttccttccttccttccttccttccttccttccttcctt

SEQ ID NO: 8639 - DNA, 890 bp, Artificial sequence
  DNA replication origin
gccgccccgtctgggatgtgaggagcgcctctgcccggccgcaaccctgtctgggaggtgaggagcgtctctgcccggccgccccctctgagaagtgaggagacctccgcccggcagccgccccttctgagaagtgaggagcccctccgcccggcagccaccccatctgggaagtgaggagcatctccgcccggcagccaccccgtccgggagggaggtgggggtcagcccccaccaggccagccgccccatccgggagggaggtggggggtcagcccccgcccagccagccgccccgtccgggagggaggtggtgggtcagcacccgtccggccagctgccccatccgggaggtggggggcgcctctgcccggctgcccctactgggaagtgaggagcccctctgcccgcccaccaccccgtctgggaggtgtacccaacagctcattgagaacgggccatgatgacaatggcggttttgtggaatagaaaagggggaaaggtggggaaaagattgagaaatcggatggttgctgtgtctgtgtagaaagaagtagacatgggagacttttcattttgttctgtactaagaaaaattctgccttgggatcctgttgatctatgactgtacccccaaccctgtgctctctgaaacatgtgctgtgtccactcagggttaaatggattaagggcggtgcaagatgtgctttgttaaacagatgcttgaaggcagcatgctggttaagagtcatcaccactccctaatctcaagtacccagggacacaaacactgcggaaggcccgcagggtcctctgcctaggaaaaccagagacctttgttcacttgtttatctgctgaccttccctccactattgtcctatgaccctgc

SEQ ID NO: 8640 - DNA, 1248 bp, Artificial sequence
  DNA replication origin
ggttgggggtacagtcatagatcaacaggatcccaaggcagaatttttcttagtacagaacaaaatgaaaagtctcccatgtctacttctttctacacagacacagcaaccatccgatttctcaatcttttccccacctttcccccttttctattccacaaaaccgccattgtcatcatggcccgttctcaatgagctgttgggtacacctcccagacggggtggtgggcgggcagaggggctcctcacttcccagtaggggcagccgggcagaggcgccccccacctcccggatggggcagctggccggacgggtgctgacccaccacctccctcccggacggggcggctggctgggcgggggctgaccccccacctccctcccggatggggcggctggcctggtgggggctgacccccacctccctcccggacggggtggctgccgggcggagatgctcctcacttcccagatggggtggctgccgggcggaggggctcctcacttctcagaaggggcggctgccgggcggaggtctcctcacttctcagagggggcggccgggcagagacgctcctcacctcccagacagggttgcggccgggcagaggcgctcctcacatcccagacggggcggcggggcagaggcgctccccacatctcagatgatgggcggccgggcagagacgctcctcacttcctagatggcagggcggccgggaagaggcgctcgtcacttcctagatgggatggcggctgggcagagacgctcctcactttccagactgggcagccaggcagaggggctcctcacatcccagacgatgggcggccaggcagagacgctcttcacttcccagacagggtggcggccgggcagaggctgcaatctcggcactttgggaggccaaggcaggcagctgggaggtggaggttgtagcgagccgagatcaggccacactgcactccagcctgggcaccattgatcactgagtgaacgagactccgtctgcaatcccggcacctccggaggctgaggctggcaggtcactcgcggttaggagctggagaccagccctgccaacacagcgaaaccccgtctccaccaaaaaaataggaaaaccaatcaggcatggcggcgcgtgcctgcaatcgcaggcactcggcaggctgaggcaggagaatcaggcagggaggttgcagtgagccgagatggcagcagtacagtccagcttcggctcagcatc

SEQ ID NO: 8641 - DNA, 794 bp, Artificial sequence
  DNA replication origin
cgcgccccgctcaagtgtgcgcctggagagtgcgcgccagagccgcgagcaaatgctttgaagatgcggagaggcttattcaagtttatggtctggagagggaagagggagtgcacaacgtttctgcccaagcggctgcctgaagtttgcaaaatcttagtaaggcgatgaggggagtgagtgcactgcaccatattgccgcgcatcggaatgcacggcgcaaggccgcggagtggagacggcttctcccatttgcctccaacctgggaaaaaggggaaccagggtcggaggtttggagagaggcaggcgttccgataaacccgggttcttgccaaatgtaagagggatttggctttactgccacttagccggccgcgaaggcgctgcggagcccacccccgcccccggctcgagactgcggcggtgcgcactgagcctgcgcgcggggcttttctcgctgatgctgcagatacagagctgagaggttcgggtgccagcagcgggagggttagcgggaaggccgggttccctgccctggcctcggaggaggagccaccacccctggggtgatgctactttcacagactggaaaatactcgccagctccctgacacacacttagacacacttccatccaacgggcatctacgatcccctgtagggagagcttggaaatctctgccgcctctccctcctcattcctgttcctgcgcccgcccaaacaaccgcgcgctacatctgctcgttgactttattggtgtttgtcttgtttaaatcattctgcctcgtcacc

SEQ ID NO: 8642 - DNA, 1077 bp, Artificial sequence
  DNA replication origin
ccgtgccagggcacttccgaggccacaaccgactgacactttttctccccttggcaaactggatttttttttttaagctacttggcagctgtctctgactccacctccccctccacccccgcccgaaagcctttggcttttcttcggaaatccagacagaattgggcatctttgttaattgccgttggggacgcccggccgtgcgctttcgccggctaacgtcgcctgtgctccgagcctggtttgctcacctttgaactgcaaagggatcaagttcagcttgagttccctgcattgggaaggagagagagcgtgcaagagagcgagtgggagagggggaaaggggaaaggagaggagggaggagagagaggagggaggagagagaaagggagggagggaggggagggatcgagagagagcggggagagagaggctgcaatctcctccctgaatcgcgcacagcgctgcagatcccactgctccgacatgcgggccgaatgcaggtgagaaaaggcacggactctgcggctgcgaacccaaacttgggcaccgcacggtgcgcactgctcagccttcgcccccgtgggcgaaaggctgctgcggtttcaggcggctgcttcgtgactaatgaccttgcgcagagttgttaagaaaaaagagaaacccgcgctctccggggtgagaagggactgactctgggcgtctctgaagatggctcgggcttctctttggcgcgccggggggaccctgacactgaccgctctgtgacgcgagtagtctcccctgcaccgtgcccgaagcgacgtgccgggggatttttcattctcgatctgttgactggctcccccgctgcatgagcagagtcggagttgagactggcttgttgctggccccagcgcctggtgcaggaagcgactcacgtttgtctgggtggccggagccggagcagagcctgggtttggagtgagtgcctggaacgtgaattggactcaactcgagtagcagcaaagaccagcgggctggcaggcgggggaggctgcaggctcattccccacctcttcccagccccactgccc

SEQ ID NO: 8643 - DNA, 851 bp, Artificial sequence
  DNA replication origin
gatgactctgggttgggggagcgccgaacccgcggcgcgcagtgtcccgtgaactgtgagtactgcgactgaacggcggcaggcgagcgggcgattagcacccattgcatgaattatgaaacaataactttcggaagaagcaggaggaaaaaaagaagcatctatcgctgccctcccacccccattcccggccaactctccacgccgcttttgccccctccctcccctccctctcgctccttcctttccgggagaggggagaggactcgggggagggcaggcggccggccccggaggaggggggcgccgagggggctgtggttagaaggagcagtagcagcagcagcaggagaagatgctgaggatgcggaccgcgggatgggcgcgcggctggtgcttgggctgctgcctcctcctgccgctctcgctcagcctggcggccgccaagcagctcctccggtaccggctggccgaggagggccccgccgacgtccgcatcggcaacgtggcttcagacctgggcatcgtgaccggatcgggtgaggtgactttcagcctggagtccggttccgagtacctgaagatcgacaacctcactggcgagctgagcacgagcgagcggcgcatcgaccgcgagaagctgccccagtgtcagatgatcttcgacgagaacgagtgcttcctggacttcgaggtgtcggtgatcgggccctcgcagagctgggtggacctgtttgagggtcaggtcatcgtgcttgacatcaacgacaacacgcccaccttcccgtcgcccgtgctcacgctcacggtggaggagaatcggccggtgggcacactttacctgctgccca

SEQ ID NO: 8644 - DNA, 1982 bp, Artificial sequence
  DNA replication origin
tcgcagagctgggtggacctgtttgagggtcaggtcatcgtgcttgacatcaacgacaacacgcccaccttcccgtcgcccgtgctcacgctcacggtggaggagaatcggccggtgggcacactttacctgctgcccacagccaccgaccgcgacttcggccgcaacggcatcgagcgctacgagctgctccaggagcccggaggcggcggcagcggcggcgagagccggcgcgccggggcggccgacagcgccccctaccccgggggcggcgggaacggcgcgagcggcggcggctcgggaggctccaagcggcggctggacgcatcagagggcggcggcggcaccaaccccggcggccgcagcagcgtgttcgagctgcaggtggcggacaccccggacggcgagaagcagccgcagctgatcgtgaagggggcgctggaccgcgagcagcgcgactcctacgagctgaccctgcgagtgcgcgacggcggcgacccgcctcgctcctcgcaggccatcctacgggtcctcatcaccgacgtgaacgacaacagcccccgcttcgagaagagcgtgtacgaggccgacttggctgagaacagcgccccggggacccccatcctgcaactgcgcgcagccgacttggacgtgggggtcaacgggcagatcgaatacgtgttcggggcggccaccgagtcggtgaggcggctgctgcgccttgacgagacgtccggctggctcagcgtcctgcaccggatcgaccgcgaggaggtgaaccagctgcgcttcacggtcatggcccgcgaccgcgggcagccccccaagaccgacaaggccaccgtggtccttaacatcaaagacgagaacgacaacgtgccgtccattgaaatccgcaagattgggcgcatccccctcaaggacggggtggccaacgtggccgaggacgttctggtcgacacccccatcgctctggtgcaggtgtccgaccgagaccaaggcgagaacggggtggtcacctgcaccgtggtgggcgacgtgcccttccagctcaagccagccagcgacaccgagggcgaccagaacaagaaaaagtacttcttgcacacctcgacccctctggactatgaggccacccgggagttcaacgtggtcatcgtggcggtggactcaggcagccccagcctctcgagcaacaactccctgattgtcaaggtgggagacaccaacgacaacccgcccatgttcggccagtcggtggtggaggtttacttccctgagaacaacatcccgggcgagagggtggccacggtgctggcgacagacgcagacagcggtaagaacgccgagatcgcctactcgctggactcctctgtgatggggatctttgccatcgatcccgattctggggacatcctggtcaataccgtgctggaccgcgagcagactgacaggtatgagtttaaagttaacgccaaagacaaaggcatccccgtgctgcagggcagcactacggtgattgtgcaggtggctgataaaaatgacaatgaccctaagtttatgcaggacgtcttcaccttttatgtgaaagaaaacttgcagcccaacagccctgtggggatggtcaccgtgatggatgctgacaaggggcggaatgcagagatgagcctgtacatagaggagaacaataacattttttctattgaaaatgacacggggaccatttactccacaatgtcttttgaccgggaacatcagaccacatacactttcagagtcaaggctgtggatgggggagatcctcccagatctgccacagctacagtctcgctttttgtgatggatgaaaatgacaatgctcccacagttacccttcccaaaaacatttcctacactttactgccaccttcgagtaatgtcaggacagtagtagctacagtgttggcaacagacagtgatgatggcatcaatgcagacctgaa

SEQ ID NO: 8645 - DNA, 1080 bp, Artificial sequence
  DNA replication origin
ggcagcacttgaggagcccttcagcccatcgctgcactgtgggagctcctttctgggctggccaaggccggagccggctccctcagcttgcagggaggtgtggagggagaggcgcgagcgggaaccggggctgcgtgcggcgcttgcgggccagctggagttccgggtgggcgtgggcttggcgggcccctcactcggagcagccggccagccctgccggcgccgggcaatgaggggcttagcacccaggccagcggctgcggagtgtgtactgggtcccccagcagtgccagcccaccggcgctgcgctcgatttctcgcccggccttagctgccttcccgcggggcagggctcgggacctgcagcccgccatgcctgagcctcccaccccctccgtgggctcctgtgcggcccgagcctccccgatgagcaccgccccctgctccagggcgcccagtcctatcgaccacccaagggctgaggagtgcgggtgcacggcgcgggactggtaggcagctccacctgcagccccggtgcaggagccactgggtgaaaccagctgggctcctgagtctagtggggacgtggacaacttttgtgtctagctcagggattgtaaacgcaccaatcagcgccctgtcaaaacagatcactcggctctaccaatcagcaggatgtgagtggggccagataagagaataaaagcaggctgcccgagccagcagaggcaacccgctcgggtccccttccaccctgtggaggctttgttctttcgctctttgcaataaatcttgctactgctcactctgggtccacactgcctttatgagctgtaacactcactgcgaaggtctgcagcttcactcttgagccagcgagaccacgaacccaccagaaggaagaaactccaaacacatttgaacatcagaaggaacaaactccggacacgccgcctttaagaactgtaacactcaccgcgagggtccacagcttcattcttgaagtcaatgagaccaagaacccaccaattccggacacaagcagagtcctgaggaactgtaacagtgaaacagcaaaag

SEQ ID NO: 8646 - DNA, 1150 bp, Artificial sequence
  DNA replication origin
gaggtgagagggcagggccgtgaggttcccagagaaagccgcccgccggagcgcagagtctcggggacagggcagcttggtgcccgcgccggccggccacatcgccctctgggaggaacagccactgccgccgccgccacctcctgctcctcgggttcctgcccgcagctccacggaacggctcagcaggcggtcgatctcagcaggcggcgcggctcagagccgctccgagcccgaagcgcctttggcgagctccgtggcgcacagcacccgccggcgaggagaagccatacggaccctcgggctcctgtcgcggcggtctcctgcccttctgggcctccgccttcgcccgctgctagggctccgagcagcagccagctggagcgggaggtcagcgtggcggcggctacgcgcgcagcgcccgtttgcgccgggaagcgccggcggccatctccccgcccgcgcccgccgtgggaggagggggccgccaggcggcagggaccgtgcgagcgaggagagcagatgaaactttatgtaccagaaggcgtcccgactttatccgagcccgcctctctcgggcgcagaaataacttgcggcttagaggacggccggggcttgggcgcgggggcctcgggggtgcgcaggagcctcctggactcctctgtggacagccgagggctcctgtctgcctccgtggtggaggacaagaaatcaattagcctgagatttctactacgccccctccaactctcctaaaggtcacacaagccctgagaattttcgggaatccacacgctcgggcgtctgtgcgtctctgcccaagtgcagggaatccagcctcaaagttcgacgcacacaaccccaagccagacccggagagtttaaagcatcaagtctccagattgtctctggcgtcctggagggacgatcgcttcatccctatctctcctggcgcaggtggcagcgtcctgccgctccggttgctccccacgcgcgcttgagcggggtttttatagccaagctgcgccgttcacgtgctcctcgccgcgtggtcccggaacctttctgggagcggatctccgcgggtagttcctccgaggcctccaaggttcctaggggcctttctgctcccatcaaggcgcactcacc

SEQ ID NO: 8647 - DNA, 1620 bp, Artificial sequence
  DNA replication origin
ggctcctgcgcacccccgaggcccccgcgcccaagccccggccgtcctctaagccgcaagttatttctgcgcccgagagaggcgggctcggataaagtcgggacgccttctggtacataaagtttcatctgctctcctcgctcgcacggtccctgccgcctggcggccccctcctcccacggcgggcgcgggcggggagatggccgccggcgcttcccggcgcaaacgggcgctgcgcgcgtagccgccgccacgctgacctcccgctccagctggctgctgctcggagccctagcagcgggcgaaggcggaggcccagaagggcaggagaccgccgcgacaggagcccgagggtccgtatggcttctcctcgccggcgggtgctgtgcgccacggagctcgccaaaggcgcttcgggctcggagcggctctgagccgcgccgcctgctgagatcgaccgcctgctgagccgttccgtggagctgcgggcaggaacccgaggagcaggaggtggcggcggcggcagtggctgttcctcccagagggcgatgtggccggccggcgcgggcaccaagctgccctgtccccgagactctgcgctccggcgggcggctttctctgggaacctcacggccctgccctctcacctcgtgcccgccggccgcagcgtccgggtcttcatcagcgccaaccctgaaggtacgtccctcgctcgggtttgcccgtccgtccttctgtccgtcagcgctgcgggagctggagagtgtgtgtccgccccacagcccggtgcgccctgcgctcccttcctccagctaaagccgtggccgccctgagcgcgtgggaatttaatttgaatcactttttttctcccctcgctggccggttttgcctgcacacttctattaggacacccattctccaccccgggttattcccctgggtcaatccaagaaacatccaaggcattagccggcccttctggaagctccattctgccgccgccgccaccaccacctcctgtcccccgcccttttttttttttttaaagcggtttcttctccgagatgaccgcaaacacaaacagtagctctcctccccgaggcgggttcctgagtgcggggctacctccttggccactttttccagctgaggcgaggtgagttccttgagactctcctcctgcaggtgcgatggtgccctttgcagaggccaagcagacttttgtgaaccggaggtcgagggggacaccctctgtgggtcccggaacaggcttcgcggtggggcgcgcaggatgggctcatctcagttgggtcacagggcttggtcttctgtatctaaaacttggcctactcagtcatgttcctgcttaaggcacctggtaggcactccatgaaaacttgttgatttcttgttgcattcacaaccacagaggttgaacgctgggcggtcaaatcctggctcatcactaccttccagtccttagtcctcaacgttagatttcattcccagtaattggggagttggggaaggaaagatgtatttgactggggcaggataaaactgcaggaattgctcttttctaggaaaaaaaatgtttggctatgagtccatgggagactg

SEQ ID NO: 8648 - DNA, 1529 bp, Artificial sequence
  DNA replication origin
ctttacaaacgccttggtctttggttttgggaatctgtaaaagtccgcctccccccacccgagttttgccccttttagagcccctttgttgaattacgtgacttttcccgaagtcatcaaactttgaattgcgtctctaattttttttttcagggcaaaagcaaatcaagaaattaaacttaaaagtaggcgactcggagagaagtgggggaaagctcgccccaaagccaagttccgcaggactaaagccctctttgcgcgcgcggggcgggggattgtccctacctggggccagacggcggcggcggcggcggcggcggggtcccggcgcccatggcttcgccggcctcgggcagccgcgccgggagacgctagcggctccgcgctgccctgagcccgccgagctcgcagcggccgccccagcgctgtcattgggcccgcgcgtcacgtggcccgggctgcgggtgagccttcccgacacgcgtaaccctttacctgcacgccccgaggatgcggcggggctagggctcgaaaccctggagtacgatgtccgacatccccggggccggggtggcagtcccgggcgcactgaagcagaaaatccacgcgcttgttggcctctgagcacaaacgaccgcgccaaccgcctgccatcacgggaaactccggggtgcttactccaatgttgcgctggagagaagggagcttcctatgatcaagggactggagtacggggatacacaaaacaaatgcacccgctggcaaatagttgtgtactcccaaaccccgagaacttggcatttttcagtttcctccttatttctggcattcgccgcctagacctgctgtgagttccatggccagccctgtatgagctacatggacctagaaacagcgggggcgccaccaccacgataaaaaccagggaagttgcacacactcgcctgcaccctaaaggccccagggggagttcaatgaactcctggttccccgtcccctcctcacccactccccctccatccctttcttttcctgaggtcttagggcattggccacaagactgcatccaatctactgagttccacattcgtagctgttacaatccatatacctaaggcgggtggagaactgactctgcttaaggactggacattcttttcacctgtgctccaaagcaaatgctgagcttgccaaaaaaagtgttaagcaactgcgccacctagcttaccctcttctctcttcttttcaactcatccagcaagagaataaaataggatattggagaggcatctggacagagtattatctaaggatggacatagtgtccttgggttttcaatgtatctactttaatgatgccagccccattcacatgatatttgccaggcttttgagaatttgaacactccattttttgaatccttctaattttgcagtgctgggattgcacgctgtaaagtgttagatttttgcaggaagttatatgtggttttacatcctttgtcacaatgaacggcactcatgtccaa

SEQ ID NO: 8649 - DNA, 917 bp, Artificial sequence
  DNA replication origin
cataggaagctcccttctctccagcgcaacattggagtaagcaccccggagtttcccgtgatggcaggcggttggcgcggtcgtttgtgctcagaggccaacaagcgcgtggattttctgcttcagtgcgcccgggactgccaccccggccccggggatgtcggacatcgtactccagggtttcgagccctagccccgccgcatcctcggggcgtgcaggtaaagggttacgcgtgtcgggaaggctcacccgcagcccgggccacgtgacgcgcgggcccaatgacagcgctggggcggccgctgcgagctcggcgggctcagggcagcgcggagccgctagcgtctcccggcgcggctgcccgaggccggcgaagccatgggcgccgggaccccgccgccgccgccgccgccgccgtctggccccaggtagggacaatcccccgccccgcgcgcgcaaagagggctttagtcctgcggaacttggctttggggcgagctttcccccacttctctccgagtcgcctacttttaagtttaatttcttgatttgcttttgccctgaaaaaaaaaattagagacgcaattcaaagtttgatgacttcgggaaaagtcacgtaattcaacaaaggggctctaaaaggggcaaaactcgggtggggggaggcggacttttacagattcccaaaaccaaagaccaaggcgtttgtaaagcttggcgtttaattggttgtgtgaaacatttttgcttttaaatccctaactaatgaactttcaacggtgcatgcgaacttgaaaaaactgcaagagattttaccttagatctgtgccctcctcccccattttaagtatgttttttaataaaaaggaaatggaatgtgacctctgctgtttctttgaaatgcccttgggtcccg

SEQ ID NO: 8650 - DNA, 773 bp, Artificial sequence
  DNA replication origin
aatttttcttagtacagaacaaaatggagtctcctatgtctacttctttctacacagacacagcaacaatctgatttctctatctcttccccacatttcccccttttctattagacaaaactgccatcgtcatcatggcccattctcaatgagctgttgggtacacctcccagacggggtggcggccaggcagaggggctcctcacttcccagaaggggtggccaggcagaggcgccccccacctcccagacagggcggctgctgggcggaggggctcctcacttctcagacagggcggccgggcagagacgctgctcacctcccacatggggtcacggcagggcagaggcgttcctcacatcccagacggggcggcagggcagagatgctccccacatctcagacaatgggcggctgggcagagacgctcctcacttcctagacgggatggcagccgggaagaggcgctcctcacttcccagatgatgggtggccaggcagagatgatcctcacttcccagacggggtggcggccgggcagaggctgcaatctcggcactttgggaggccaaagcaggcggctgggaggtggaggttgtagcgagccgagatcacgccaccgcactccagcctgggcaacattgagcactgagtgaacgagactccatctgcaatcccagcacttcgcgaggccgaggctggcagatcactcgtggttaggagctgaagaccagcccggccaacacagcgaaaccccgtctccaccaaaaaa

SEQ ID NO: 8651 - DNA, 1468 bp, Artificial sequence
  DNA replication origin
cagccccccaagctggaagagggaaggaacagattcacccctggagcctctggaaagagtgtggccccggtgacaccttgatccctgatacccacccctggatcaagcccactgataccaatttcagacttctggtctctagaactgggagagaataaacttccattgttttgttttgttttgtttgtttttttgagacagagcctcactctgttgcccaggctggagtgcaatggcacaatctcggctcgctgcaacctctgcctccctggttcaagtgattctcctgcctcagcctccccagtagctgggattacaggtgcctgccaacacgcccagctaacttttatatttttagtagagatgaggtttcaccatgctggccaggctggtcttgaactcctgacctcaggtgatccatccaccttggcctctgaaagtgctgggattacaggcgtgagccaccatgcccggctgcttccatttttttaaacctctaagttcgtagtaatttgctgcagcagcacagaaaactagtaacatccccaaatcacttcatgcttgaggaccaaaccccttgtccttccaactcttcctgggaggactcatggaatgtagaagagtccctcggaccagccgtgcatctcttgccaccctctttccttaccgtgctccacccttcttcaagtctaattctcagcacttaggacagcacctggtacagagcaggcagtcaataaatgtggaatgaatgaatgatttaatggctatggattaaaaacgagagcactatcagtgaacctgttgtgtgtctgcaaccaatcaagacatttccagtttgtgccagccgtgtcgcccaggtgttatgagggtgggctcaggagacagaaaaccctgctactgtgggactttgggcctcagtcacttggcctgtagatggggataataatattcctactatatagtgttgctgggggtcatatgagcaaacattcataataaacatagaccaggggtgtcttaaccaccccatttggatacagcatattaaaacacaccccccaaaaagaaaaagatggaggtctagtatccaagaaagatataatctagttgccagaacctatgcatacaaacaagagtattaacaatgtcaagtaggacttgtttctggaataagggctacatggtatatttctatcaactgtgacaccaattgaaagatagaaaaccccaagtacaacaacagtcccgtagacagaaaaatcgcttttgctatggaactgtgtacacatgtgtaacattgtacctttcagaatactcttaaactaccccatttctaaagcccaggattttattcccagcctctactcctcctttactttccttttctgctgataattcatagatgagctggataaataggacaggcgagaagaagcacgtgcacctcctcccctccctcaacacc

SEQ ID NO: 8652 - DNA, 1196 bp, Artificial sequence
  DNA replication origin
ggccgggcagaggcgcccctcacctcccggacggggtggctggccgggtggggggctgacccccccacctccctcccggacggggcggctggccgggccggggactgacccccccacctccctcccggagggagcggctggccaggcagaggggctcctcacttcccagtagaggcggccgggcagaggctcccctcacctcccggatggggcggctggccgggcggggggctgacccccacctccctcccggacggggcggctggccaggcagggggctgacccccccccccacctccctcccggacggggcggctggccgggcagaggggctcctcacttcccagtaggggcggccgggcagaggcgcccctcacctcccagacggggcggctggccaggcggggggctgacccccccacctccctcccggacggggcggctggccaggcggggggctgacccccccacctctctcctggatggggcggctggccgggcagaggggctcctcacctctcagacagggcggttgccaggcagagggtctcctcacttctcagacggggcggccgggcagagacgctcctcacatcccggacgaggcgacagggcagaggcgctccccacatctcagacgatgggcggccggggagagacgctcctcacttcctagatggggtggcggccgggaagaggcgctcctcacttcctagatgggatggcggccgggcagagatgctcctcactttccagactgggcagccaggcagaggggctcctcacatcccagacgatgggcggccaggcagagacgctcctcacttcccagacggggtggcggccgggcagaggctgcaatctcgccactttgggaggccaaggcaggctgctgggaggtggatgttgtagcgagccgagatcacgccactgcactccagcctgggcaccattgagcactgagtgaaggagactccgtctgcaatcccggcacctcgggaggccgaggctggcggatcactcgcggttaggagctggagaccagcctggccaacacagcgaaaccccgtctccacccaaaaaatacgaaaaccagtcaggcgtggcggcgcgggcctacaatcgcaggcactcggcaggctgaggcaggagaatcaggcagggaggttgcagtgagccgacatggcagcagtaca

SEQ ID NO: 8653 - DNA, 944 bp, Artificial sequence
  DNA replication origin
ccccgtccgggagggaggtgggggggtcagccccccgcctggccagccgccccgtctgggaggtgaggggcgcctctgcccggccgcccctactgggaagtgaggagcccctctgcccggccagccgccccgtccgggagggaggtgggggggggggtcagccccctgcctggccagccgccccgtccgggagggaggtgggggtcagccccccgcccggccagccgccccatccgggaggtgaggggagcctctgcccggccgcctctactgggaagtgaggagcccctctgcctggccagccgctccctccgggagggaggtgggggggtcagtccccggcccggccagccgccccgtccgggagggaggtgggggggtcagccccccacccggccagccaccccgtccgggaggtgaggggcgcctctgcccggccacccctactgggaagtgaggagcccctctgcccggccaccaccctgtctgggaggtgtacccaacagctcattgagaacgggccatgatgacaatggcagttttgtggaatagaaaggggggaaaggtggggaaaagatggagaaatcggatggttgccgtgtctgtgtagaaagaggtagacatgggagacttttcattttgttctgtacgaagaaaaattcttctaccttgggatcctgttgatctgtgaccttacccccaacccaaccctgtgctctctgcaacatgtgctgtgtccactcagggttaaatggattaagggcggtgcaagatgtgctttgttaaacagacgcttgaaggcagcatgctcgttaagagtcatcaccactccctaatctcaagtacccagggacacaaacaatgcggaaggccgcagggtcctctgcctaggaaaaccagagacctttgttcacttgtttatctgctgaccttccctccactat

SEQ ID NO: 8654 - DNA, 816 bp, Artificial sequence
  DNA replication origin
gagtatgcgcaaggtgcaatacaagcacacgattaaaaaaaaaaggcaagttgttcctgaaaatgcatagaggtattttccccaataggagcagcttaaatgcaaacaaacagaggaagaaatttaagttatcttttctgctaatttccaaacaacagaacgtgacatccagcacagcatcactccctagatctgcaaccgaggggaatgctagtggatagacatgccaacagcgaaaaaagcctgtgctcactccagtgctggccgcttctgactgtccagtgcttctcggggcgcgctccctctttctcttcccacgcccgcctagtcccagcgaccgagggaggttgcacccgggcgaccctccccccgccccgggctcccgcgtaatcccggcccggcttggaaaggaagcgggcctggcaagtagaggcacggccgggccacggtgggcagggcgcaagggcggggctatagcctaactgcgccgccaaggctgctgctgggtttggaaaggaagcgggagaggaggggtcgggctgagctgtgggtggggaaaagggcggggccatggatgggccacgtgccttcttaggtggagtccggggctcggtagggagaggcggggccaagctgaggtgggtggagaaagagggcgtgtccatggcctagctacgccgctgaggctgctgcggggtttggaaaggaagcgggaatggcagggagaggcgggatcaggctgaggtgggcggggagtcgggggcggagccatgagtggacctcgtgccggcttaggtggagcccggggcgcgcggg

SEQ ID NO: 8655 - DNA, 1245 bp, Artificial sequence
  DNA replication origin
cagggttgggttgggggtaaggtcacagatcaacaggatcccaaggcagaagaatttttcttagtacagaacaaaatggagtctcctatgtctacttctttctacacagacacagcaacaatctgatttctctatcttttccccacatttcccccttttctattcgacaaaaccgccatcgtcatcatggcccgttctcaatgagctgttgggtacacctcccagacggggtggtggcagggcagaggggctcctcacttcccagtaggggcggctgggcagaggtgcccccacctcccggacggggcggcagctgggcgggggctgcccccccgcctccctccctcccggacggggcggctggtcggggggggggggggctgccccccacctccaggacggggcggctgcctggcggagacctcctcacttcccgggcgggggcggctgctgggcagaggggctcctcacttctcagatggggcggctgccgggcggaggggctcctcacttctcagacggggcggctgccgggcggaggggctcctcacttctcagggtggcggggcagaggcgctctccacatctcagatgatgggcagccgggcagagacgctgctcacttcctagacgggatggcggctgggaagaggcgctcctcacttcccagactgggcagccgggcagaggggctcctcacatcccagacaatgggcggccaggcagagatgctcctcacttcccagacggggtggcggccgggcagaggctgcaatctcggcactttgggaggccaagacaggcggctgggaggtggaggttgtagcgagtcgagatcatgccactgcactccagcctgggcaccattgagcactgagtgaaggagactctgtctgcaatcctggcacctcgggaggccgaggctggcagatcactcgcggttaggagctggagaccagcccggccaacacagcgaaaccctgtctccaccaaaaaaatacgaaaaccagtcaggcgtggtggcacgcacctgcaatcgcaggcactcggcaggctgaggcaggagaatcaggcagggaggttgcagtgagcggagatggcagcagtacagtccagcttcggctcggcatcagagggagaccgtggaaagagagggagagggagactgtggggagagggagagggagagggagagggcctaaatcttaattttataatttttttgcagtttgcttgaatcaggcg

SEQ ID NO: 8656 - DNA, 819 bp, Artificial sequence
  DNA replication origin
ccatcccgtctaggaagtgagcagcgtctctgcccggctgcccatcatctgagatgtggagagcgcctctgccccgccaccctgagaagtgaggagcccctccgcccggcagccgccccgtctgagaagtgaggagcccctccgcccggcagccgccccatctgagaagtgaggagcccctctgcccagcagccgcccccgcccgggaagtgaggaggtctccgccaggcagccgccccgtcctggaggtggggggcagccccccccccccccgaccagccgccccgtccgggagggagggaggcgggggggcagcccccgcccagctgccgccccgtccgggaggtgggggcacctctgcccagccgcccctactgggaagtgaggagcccctctgccctgccaccaccccgtctgggaggtgtacccaacagctcattgagaacgggccatgatgacgatggcggttttgtcgaatagaaaagggggaaatgtggggaaaagatagagaaatcagattgttgctgtgtctgtgtagaaagaagtagacataggagactccattttgttctgtactaagaaaaattcttctgccttgggatcctgttgatctgtgaccttacccccaacccaaccctgtgctctctgaaacatgtgctgtgtccactcagggataaatggattaagggcggtgcaagatgtgctttgttaaacagatgcttgaaggcagcatgctcgttaagagtcatcaccactccctaatctcaagtacccagggacacaaacactgcggaaggccgcagggtcctctgcctagga

SEQ ID NO: 8657 - DNA, 947 bp, Artificial sequence
  DNA replication origin
ggatggctggtttcgtccggggacaagccttcccggcctaactctgaacgtgccgcatgccggccaggtcgaaggaagcctagcagcggccgtacgctcctgggtcttcccgggggagaagcgggatgcactgggcgggaaggcagctcaggcagagcaagcagcgccgcgcctggagagggcagagcacccggccccgctccaggcgctccccgcctgctggtgcccctcaccttgtcccagcgcagccactgggcggtctcctggtccagccgggcgtcctcgcctagaccgctgccttctggagccgccatcgctgagcttgtgctaccgctgcagagggaagcaggcggtgagatctgccttccggcccggccccaagacgtggaggcggaggcgggggcggggagagccgcggcggagccagtcggtccgggggaaagtgacgcgcgccgcggcgggcacgcctccttgccgtttgcgggtgcgctgcagggggtgggagtgagcgaggaggaattgcggggctagggtgggttgctggaacctggcacgtgtgagaagggtttgccatcgtctctgatgcatccaggctacagccagccgtgagttcctgctgcgcgccaggcacatgtcagatgctgggataccaggaagtgcacccagataggggcctgaagactatgtagaaactcagagggtcaagaacagccagaaaaaaatcttgaaaaagaaaagcaaagtaggaagaccagtggaacataagatagagaccagaaacaaaaatacacgtgtatggacaatttatttcagaggcggggctgcagagcacaggaaggaactatttttggttaatggtgctcggtcaaagggatatccacgtagggaaaagaaaaaagggaacttggccccctacctcccatcacacacagctctgaactccagat

SEQ ID NO: 8658 - DNA, 1792 bp, Artificial sequence
  DNA replication origin
tccacccagctgaggacacagcaggtcccgcggcggcggcagcaacaggcaccggcggacggtggcggcaccaggagcagcagccgaagaggaggaggaggaggaggaggaagaagaggaggagaaggaggaggtgtctgcgcgcggctctggtttcctcctcccagcctgggcgagcgcgctggaggcgaggggaagacaggagccgggatctccccactcggtccccggggagctgggagggggactcggtgtcctcctcctccccactgcgccgtgtgactgtgcctgggcagcacggcccggacgggcgagtcacacgcgagcaacagctgctgcactgcgggtccgccgcggcctccctcccctccttgccaccccccgcccccaagcccgcgggccatcctcagccagtgtctgtggggggaataggggggaagtactcgggccgccgccccatccagacccctgcgcaggatctgggcacagcgtttccctggggagccgggggcgcggggccccgcgcgtgatgcaggccctcgtggcgggatgtacagtcgcacaccctgtccttggcggcctatttatagcaggtggcactgcccgccgcttgctcggcctgagtggctctcagcaggtggcactgcctgcccgctctccgcgctcccgaaggcgcctcgcctcatctgcaccctcctcttctccctccgaaacagacgtggtggaaactgcacacaacatggggggcgggggccgggggcgaccaagccaccttgctctcccccgccttaccccttctccccgtccttggaggatggcaagaggtgaactgaggcacggatgccctatggggcgctggcatgcgaggcaggaaaatcagggactctgggaaacaacgaaggcgaagtgccctcccgggattaaacaccaggaaactccatttctaaccaattgcgggagtgacgcagagcctggattaggcgctttttcctgccccgcgagcccggcacacgcgcaggaacacacaccacacgcacacgcacaccccagtgtgcatgccccgatcaggtctggggacattcccagcggtgatgtagagtgcaaggaaagacgcggagatgtgaaaagcgggacagagctcgctccctaagactaggggatggcagtgtgcaaaaaacaggcgaagctcccagatccctatcccaccaggcacagaggcgcaacgtcactcgcagggtggggagagggatctgagaaaagtaagaagcatcacatcctctccagagaagagtccgcagggaggggagagccgggtgctcggaggaggcagttccagacccccaggtggcatctttctggatttttttacttaatgtagctgggggtggactttagggaagtggctgagcgtttgagctgtacggttggacttgaatccaaatcccagcaggtgtggtttaggcaaggtgctggacctctggtcttcattgtcttacctgctaaatgggaccaatacacaccttacaggatctttgtgaggacaaagcaggaaagtgtaagtaaagtggccagtgcagtgacacagacgtacatggtcctcaactaaaagcagcagctattatcaatattactgtggcccaggaggcaaatagagggccaggtttcctcatcgtaccaagagcagtgtcttccttgaagcccactgagcttcttgtaggcttttagattagggctgtcttatggcattccctgatttccctggatgcttacatccaggggaggtatttttaag

SEQ ID NO: 8659 - DNA, 869 bp, Artificial sequence
  DNA replication origin
aagtttggtttactaggtctcccttagagttaggcccttcatccctattacttgtttaagggagatttcaagtgcattcagagggaaagggagatgattgtggaactcctactataagctaagtgctcttatgttagctccttaggcttgacataaaaacttcattcagggaacaagcccgatctcctgtggggagtggggagggagccctctcaggaaggctgaggcctgcctgtctgtccttcccagtactggtggcggtgtgggacgcaccactgggaaagctaagaggcctagactatctaggtaagaagaggcggccttggatcccccagggagcaatcagctggctgcacagagtggggagggccttgagctggtctttgaagaattagggggatttagataagccggaaggggagggggcattccattgccggttgcccagcatcagggccaaaaatgaacaaaggcctgggggtgggcagggcagccggcatgaagggcacttgttggagcagggggcagctcgtgggtaacggggtgccaagcatgggtgcctgagcccactgtcagacccggggagtgcacgggagggaaggttgtgagctggagaaggatgggatgagaagagatctgtgaaaaacgtgggtggcaaggggtgagggctggactggagaggctgagggagaccagtggtggaaaagctgcagcaatgcaggtgggaggcgctgagggcctggcccccaaggcaggaggggagagcaaaggaggtgaggaaggcttcagagatggcctctaggtttccatggtgaaggaccagaaaataaggccaatgggaggcggggagggggcagccttagaggcag

SEQ ID NO: 8660 - DNA, 1972 bp, Artificial sequence
  DNA replication origin
tatacatccatattccattttaggcattaggcatatgcttacaaagatacataaacatatatattgtgagcatgtttaagactatataggccagattggtggctcacatctgtaatctcagcactttgggaggctgacgcaggcggatcacttgagatcaggagcttgagaccagcctggccaacatggggaaaccccatctctactaaaaacacaaaaaaattagccgtatatggtggcgggcacttggagtctcagctatttgggaggctgaggcacaagaattgcttgaacctgggaagcagaggttgcagtgagccaagattgcaccactgcactccagactgaatgacagaacaagactctgtcaaaaaaaaaaaaagactatataaacacatacatacagaatgccttatagatgtttatgcccctttgagtggaacactggtggttgtggggaggaaggcacacatggaagaagtaaaaatagccatagggttccccaggggacgatattctcaagaaatttggaagttcagcagggcacagctcagaaagggaggtgatggtggtggtggtggtagtggtgttgatgatggtgatggtggtggtgatggtgatggtggtggtgatgatggtggtggtaatggtgggatggtggtgttggtggtgatggtggtggaggctgtggtgttagtggtgatggtggtggtactggtggtagtggtgatggtggtggaggcagtggtggcggtggtggtgatggtggtggtggtgatgatcatggttgttggggtggtagtggaggtggtgatggtggtagtgttggtggtggtagtgttggtggtggtggtgttagtggtagtgatggtgttggtggtgatggcgatgatggtggtggaggtggcgatcattgtggttgtgttggtagcagaggtggtgatggtggtggtggtgatggtggtggtggtggtgttggtgttggtgttggtgttggtgatggtgatggtgatggtgttggtggtgatggtgatgatggtggtggtggtcatcgtggtggttttggtggtagtggaggtggtgatggtggcagtggtggtgatagtgatggtgctggtcgtggtggtgatggtgttgatggtggtggtggtgatggtgttgatggtggtagtggtgatggtcctggtggtgatggtgatgatggtggtggtggtagtggtgatcctggtggttgtggtggtagcggtgatggtgttggtggtgttggtggtgttgatgatgttgttgttggtggcaatggtggtggtagtggtgttggtggtggtgatggtgttggtggtgatggtgataatgatggtggtggtggtgaccatggtggttgtggtggtaatggaggtggtgatggtggtagtggtggtgatagtgatggtgctggtggtgttgttggtagtggtgatggtattggtggtggcagtggtgatggtcctggtggtaatggtgatgatggtggtggtggtagtggtgatcatggtagttgtggtggtagtggtgatggtagtggtgatggtggtggtggcagtggtagtgatggtgatgatggtagtgctggtggtggtggtgatggtggcctggtggtggtggtggagctggtggtgatggtggtggtggcagtggtgatggtggtggtagaggtggtggtgatggtggtggaggtggtggtgctggtaatcgtggtggtggtggcggtgatggcagtggtggcggtggtagtagaggtggtggtggtggtagaggtagtggtgatggtgatggtggtagatgtggtggtggtggtggtatatctacatgatgcagcaggctagtagaagatcccaaaaagttgatttcaagagtagctggtggttgtggtagaaccagctttgccattcttttgccaggaaaaacttgtgcttggcatcactacttgtggcac

SEQ ID NO: 8661 - DNA, 1354 bp, Artificial sequence
  DNA replication origin
tctattccacaaaaccgccattgtcatcatggcccgttctcaatgagctgttgggtacacctcccagacgaggaggtggccaggcagaggggctcctcacttcccagtaggagcagccgggcagaggcgcccctcacctcccggaccgggcggctggccgggtggggggctgactcccccacctccctcctggacggggcggctggccgggtggggggctgacccccccatctccctcccggacggggcggctggccgggcagaggggctcctcacttcccagtaggggcggctgggcagaggcgcccctcacctcccggaccgggtggctggccaggtcgggggctgactcccccacctccctcctggacggggcggctggccgggcgggggactgacccccccacctccctcccggatggggtggctggcctggcgggggctgtcccccacctccctcccggacggggtggctgccgggcggagacactcctcacttcccagacggggtggctgcctggcggaggggctcctcacttctcagacagggcagttgccaggcagagggtctcctcacttctcagacggcgcggccgggcagagacgctcctcacctcccagacggggtcgcggccgggtagaggcgctcctcacatcccagatggggtggcagggcagaggcgctccccacatctcagacgatgggcggccgggcagaggcgctcctcacatcccagacggggcggcggggcagaggtgctccccacatctcagacgatgggcggccgggcagagacgctcctcacttcctagatgggatggcggccgggaagaggcgctcctcacttcctagatgggatggcggccaggcagagatgctcctcactttccagactgggcagccaggcagaggggctcctcacgtcccagacgatgggcggccaggcagagacgctcctcacttcccagacggggtggcggccgggcagaggctgcaatctcggcactttgggaggccaaggcaggcagctgggaggtggaggttgcagcgagccgagatcacgccactgcactccagcctgggcaacattgagcactgagtgaaccagactccgtctgcaatcccggcacctcaggaggccgaggctggcggatcactcgcggttaggagctggaaaccagcccagccaacacagcgaaaccccgtctccaccaaaaaaatacaaaaaccagtcaggcgtggcggcgtgcgcctgcaatggcaggcactccgcaggctgaggcagagaatcaggcagggaggttgcagtgagccgagatggcagcagtacagtccagcttcggctcggcatca

SEQ ID NO: 8662 - DNA, 955 bp, Artificial sequence
  DNA replication origin
cccggccgcgccgtctgagaagtgaggagaccctctgcctggcaactgccctgtctgagaagtgaggagcccctccgccaggcagccaccccgtctgggaagtgaggagtgtctccgcccggcagccaccccgtccgggagggaggtgggggacagcccccgccaggccagccaccccatccgggagggaggtgggggggtcagtcccccgcccggccagccgccccgtccaggagggaggtgggggagtcagcccccgacctggccagccacccggtccgggaggtgaggggcgcctctgcccagccgcccctactgggaagtgaggagcccctctgcccggccagccgccccgtccgggagggagatgggggggtcagccccccacccggccagccgccccgtccaggagggaggtgggggagtcagccccccacccggccagccgcccggtccgggaggtgaggggcgcctctgcccggctgctcctactgggaagtgaggagcccctctgcctggccacctcctcgtctgggaggtgtacccaacagctcattgagaacgggccatgatgacaatggcggttttgtggaatagaaagggaggaaaggtggggaaaagattgagaaatcggatggttgccatgtgtgtgcagaaagaggtaggcatgggagacttttcattttgttctgtactaagaaaaattcttctgccttgggatcctgttgatctgtgaccttacccccaacccaaccctgtgctctctgcaacatgtgctgtgtccactcagggttaaatggattaagggcggtgcaagatgtgctttgttaaacagatgcttgaaggcagcatgctcattaagagtcatcaccaatccctaatctcaagtacccagggacacaaacactgcagaaggctgcagggtcctctgcctaggaaaaccagagacctttgt

SEQ ID NO: 8663 - DNA, 1348 bp, Artificial sequence
  DNA replication origin
ctctagacacccagtgtctaatgttacctttcattctgaatttttccttaatctgccccactgcttccaatgaaataactgctacctcttctatgtttttggcactttgcacagatttctattccatgtatttatggagtatttacttctgccattctgtcctccaagactgtgaccaacagcacctaggttggtttctgtccctcagatatttactgaattgaaatacattgtgtttgatattaataaaagagaaaccatgtttgatgtaagcctggtcaaataaacaaagacaagtttacttttatggtctgaatcgctcagattcaagaaagccccctccaaccctcaaattccttctgcactgtctcacttgtgcctcaaatccatccctaacgtctcattccttcacttaaaggttacaatgtaagaagtttatcagattctttcccaagctcaggcttgatggaagaaaggagggcggggacgcaggcctatgggtggggtagggaaggagccactaggctgcagagagggcaaaaagaggctctgaggatagagcctgtctcattctcagttgtcacaggttggctgaggtcacagggagttcagagcacactgatttaagaagccacctgcctgtgtccttcaagatgtttaggatgggaaatgatgggatcagtagggcataggtaatgctctcacagcccatagagagatgtcttcctacttaagaaaaggcagtgacgttcaggcgcctggtctgaggtgcctggaaatactcaccggatggcagaggcgagggctagccgactgggtggagggggcctggggatctgcggtagggagtgggacccatcccgggggctgcgagtggaggcggtgcctgcttagagtgttggctggactggaagagcaggcagggcgtgggtcggctgttgggggaggagtaaggcgaggggagcggggaggtcaaggcctgagctccctgtgccaaggccgagggcaggcgcaccctgggacgaggcctctgtcttacagggacctgctcccttcgtgcccgggctgggggaccctgcagcccacctctgacttggccccgagccattgggggcacttttccagacttgcttggtgccaggactggatactttgggagatccaggcaggctccgcggaggttcacgcaggccgagggggcagaccctgagtgtgggcgtgtgggtgtgtgcatgagcgtggacccggagcgacacacactcacacacacacactcacacgcccgcacccacgcaggtccctcggccgcgccgccccagaccctcaccccagagccgggtcctccctg

SEQ ID NO: 8664 - DNA, 1014 bp, Artificial sequence
  DNA replication origin
tgagagtcgcgtgggggcgggaagcgggccctgcccgaggcggccccctccccgatgccgagaaggaagtcgcacttaccgcgtcgggctccggaggcggccgtgggtcacggcgggccggggcggccaggcgggaggagcgggggaggcgggggccggggccggcgagctgagtgggatgctcggcccctcgcgcgcccctagaccctgtccgggcagcctcatccccggcgccggccggcccggagcgagccactcccgctccgtcaggcggcgccaggccggggggtcagagtccccgggtggccccggagggggcgggcgagtaggtgggggtaggggaccggttagcccgtcagtcccggcgcggcgcagtcggctgcccgccccgccccctcccgccaggccccgccccctcgccgggtcgcgcgcccggagaggccgcggccgccactgccccgccgggggtttctttgctctcctgcgcggcgtggggacggcccgagccggggaagggggtgggggaacgggagcgtctgtggcaagaggagctagtgggggaaggggacgtcaggctgggcggggctctggcgaggagggggcgtggcgtagaggacctgacaaagattctggttgttccccgccccttgaaactggggttaggggaattcctgggggtggaagttaggaagaggtccctctgcagggctggaaggccgtgagagaggcggcctctgttgtctcagagcttaaagggaactcactaagactcgcctcccttctccagcctcagtaaccattccccttgcaataatctgataattagtgtgctctaggtggtgggtttgtggcatcgaaattatgatcctcagcactgtgaccataatcattgttttccagtggtggaataataagaatcagaaaaagtaggttctttattcattcctctacccaacattgaactcctatatgctaggtcgtgagaataacaactaatttatttggcgccttatg

SEQ ID NO: 8665 - DNA, 984 bp, Artificial sequence
  DNA replication origin
cttttcaaagttactatagggaagtgcattgtccagacgtgtaaccgggaggtacttgggtaccccgcctgccaaggaaaccaatatcggatccccctactttagcgcccccgccaaaaaccgagctcacaccaaagcaccgtggttcctctcgatgtcagcggcccgcctgccctcggggcagcacctgggcaggcgtcgcacctcccgcctctgggcgggacggaagcaaagctcgcgcctcctgacgtcatcaccgcgcgccactgtcttcgccttcttgcacttcgcgggagaagttgttggcgcgaatggatcctgagcctcgataacagattcctcaaccggcccacccgccagccagccagcgccttcatcctggggctgcgatggtgagccgctgggggaggccgtgcggctcggggtctgggggggctttgcaggcctggtgtggaccgggcactcctggtatgcagggtgggggaggatggcggtgggtggttccggaggctagcaaaggcagagaaggggccgcacaccgggcactggacgcaaaactttcattgcatcgcgggctctggctctgggcggcagccagcgcgcagggattttgttgctacgtgtacttgcactttccccccgccccccactcttgggggaagggagaaaggaagagaggaaggatggtggttttgggacgcattggtaaagttattttcttgttcggcgttgcccgaacctcagtttgagtactgcctaaagcgtggatttcaagctttgggtcacgagggagaagaatgtaacaaacttttctttcttagggaatatgttgtgtagggccttaaacttttatcattaacagctcagctcgtctcatctccgctcgtcattaacgatcacctgagcggtgttgagaccgagggcatggagaggatattttattttgtttagatgagttcataggagtcaaaaggataacatggc

SEQ ID NO: 8666 - DNA, 1140 bp, Artificial sequence
  DNA replication origin
cgcccagcgccgctcgcggtaggggcggagccgctgagctggccaaagcggatttgcccagctaggccaggggcggggcaggccctcccagccaggaccagccccagtctccccgcccctgagccgtgaaggaaatagggacctggccctgggccttgtgtagcgggagggggagctaggaagcagctgagggcagaatccaggagggcctggctgcgggggaatgaagcctccgccttcgcaggcaaaagcctttaaatacgggctcaggcccgggactcagagtgtaacgcgtggcagcctgagggaggggcgtgcgccgagagggagctcagatcgagcggggcgcgggtggagaagctgcggcggcgcggcccgtaggaaggtgctgtccgaacgatcgggataggagcggtccctgcgcttgctgctgggaagtgggtaagcgccgctcccaggctggccccgccgcccgggcgggatgctcccaggtctgggcgggatgtggagggagcggggctggggtgtgcgcgctgctcccggtcgctcgctgcgctgggtcccgggcttcccgtctcacgaccttcgtctctttggggcttagggcgggaaccgcattttggaactgctgtcctggggatgtggtcgtctgggcttcttattcaagactcgtgagtcttccagccccttctctttctgcctttacccactttcctgacttggatgagatttccctgccgcctccaaagccgaacgcccaccacaggaagcggttctctcgttggggacctcattttggccgcagagtcgtagtcttttgtttgtgtttaagagtctgctcacctgaggggctcctgcttttctcatgccgcccctcttaagaaaccaaagagaaacgaagccagaaagccctcttgagagcaaaatactaagactgccgtgatatctgtccgggatgtcctggaatccattgttggccccctacaccacagaattgctctgtttgatgtcggggaaggcctttcctgggtgcctcgggagaccatgtttgtgtgagatcttgaaaaattatacgtcctataaatatataggaagataacttagtagggttaggaattctagtatagagaaaagaggggt

SEQ ID NO: 8667 - DNA, 1391 bp, Artificial sequence
  DNA replication origin
tactataaatgttgcagaacaaaaacgactgcagtagattttctggggctacaccaactgaaaatgggccggaccgagatccgggagagcgttttcctgcgctagacacggcgttcagcctccgggttccgggtctagctgagtcagggcggcgttccagccgagtgcggcgtcggaaacccgttcggttgcgcccgaaccttcggtcagaggccagcgctggaagcccagaccacagcacccgggtttaaacaggagcggaggcgccgggaagggccgggggggccggctagggccggccagcttggaagccgcaccctcgcggccccagacgccggcagggcggagccacgcggccgcagccccagccgagacgcgagctcgtggctcgggcgtatgggggctccaacgggagcggctgcgccgcccggccgggtcaacgtcgtgcgcatgcgccgacccggcgccattttggtggccgggcgcggaggtgattccacactgaggcgagcgcggcggccggggtggtagtggcagtgttcgtgtgctcaggtctgaatcgccgagggaggaggcggtggaggaagaggtggcggcggtggcggtggtcgtagcggtggcggaggaggcgggtacgaatcagctgcgggcggagacatggccaacatcgcggtgcagcgaatcaagcgggagttcaaggaggtgctgaagagcgaggaggtcagaaatgaactcccggatatcccccacctctgcctggggcgggagggtcctcccagctgcgaccccgatatccccggtagtccctgggtggtcctccttgcggccgcccttctgcctgtgaggaagcagcagtgttcccctcctccttccgccgccttcccctcccctcccagagcgctaggatggacggtctcgcgggcgggtggtctggggtggaacatggtttggggaggtgatggacagggggcaactcctcggagggatggaagctcacaagagaacccgaggcggtggccgcagctggaaatgtggctgtggggtggggagggagcaggccgagcctgagaaaacccgggaagtgggttgggggaaggggaaaggtggtaactggatcccaagagcagtgctgctcgaaggcccacacttttgagggtattcggggttattgcctgtcaggccttcactgttcttttcttggggaaggagcagtgagtccttaggtattgattaaaaaggaaggacattcagagttagtccttcttagttgggtgttaggagtcaaagggagacataatagaatactgtcttatttggtggcaggggtaagggaattttcacctgagttagcaagttaattccaaataagataattatctcttttccactta

SEQ ID NO: 8668 - DNA, 1278 bp, Artificial sequence
  DNA replication origin
ctgctgttgactccgggaggccgggccagcgtgggggccacctcgggcctggtggaagcagcagcggcggccatggttgcccggggggcggggggcagccagggacccctgcctgggagcttctcaggtggaaaccccttaaagaacatcaagtgcaccaagtgcccggaagtgttccagggcgtggagaagctggtcttccacatgcggcagcagcacttcatcttcatgtgccctcgctgtggcaaggagttcaaccacagcaacaacctcaaccaccacaggaacgtgcatcgtggtgtcaagtcacactcgtgcggcatctgcggcaagtgcttcacacagaagtccaccctgcacgaccacctcaacctgcactcgggagcgcagccctaccgctgctcctactgcgacatgcgcttcgcccacaagcctgccattaggcggcatctcaaggagcaacacggcaagaccaccgccgagaacgtgctggagaccagtgtggccgagattaatgtcctcatccgctagccgcgcaggcgtggaggcccggaggctggggtccctgggctaggtggggaaagggctctttggcccaggagaattggtgggtggggggtctggggcagaaaggtaagagtgggaggctgagcagatgcacacatcctgagagagggaagatgattccttggagagaagactgttgttgctcttgagagtgcaagaagctggagcgggggacagggttcttggagtaggccaggggaatacggggtcccagagaaagatttccttctcttagaggcgcatgtgtatgtggagggagggaaaagggtcctatagaacgagggaagacaaaaatgttttattcctggctaagcctgcccaggggaaggttctgacatttctcgagataagaagggtgggggggtgggtgggaacagggagggaatttggcaggaggacatgctcctgcttataataggcctggggtgagggagtggtaaggggaaaagattattgagtcccagaaaaggaagggggagacagttcttgcatgctggcgaaatgagactgcaagtatgaggcttgctgaaatttgagggagaaaaaagtaagacgccaggtaagagaacatggggtgcacatcctggatagatattgggaagtgggggcacaatagcaagaacaatggatagtcatgggggtgggggggtaaggcacttagaaaagaacacaagaagggctgttgggagggagggagaggagtagagacat

SEQ ID NO: 8669 - DNA, 842 bp, Artificial sequence
  DNA replication origin
cctcctccctccagccaggaccccaaagccagccccgaagcccccaccccccacctcctctatcccctccactcctgcggccagtgaagctggagttcccactggatgaggacttggagctgaaagccgaggaagaggatgaggatgaggacgtatctgacatctgcatcgtcaaggtggagtcggccctggacatcgcacaccggctcaagccccctggaggcctgggagggggcctgggcattggaggctccgtgggtggccaccttggggagctggcccagagcagcgtgccccccagcactgtggccccaccgcagggtgtggtgaaggcctgctatagcctgtcggagaacgcagaaggggagagcctgctgttgactccgggaggccgggccagcgtgggggccacctcgggcctggtggaagcagcagcggcggccatggttgcccggggggcggggggcagccagggacccctgcctgggagcttctcaggtggaaaccccttaaagaacatcaagtgcaccaagtgcccggaagtgttccagggcgtggagaagctggtcttccacatgcggcagcagcacttcatcttcatgtgccctcgctgtggcaaggagttcaaccacagcaacaacctcaaccaccacaggaacgtgcatcgtggtgtcaagtcacactcgtgcggcatctgcggcaagtgcttcacacagaagtccaccctgcacgaccacctcaacctgcactcgggagcgcagccctaccgctgctcctactgcgacatgcgcttcgcccacaagcctgccattaggcggcatctcaaggagcaacacggcaag

SEQ ID NO: 8670 - DNA, 855 bp, Artificial sequence
  DNA replication origin
cgtgcactgtgcatcagggagacctgcagctccgagctggggttaagcaggaactggtcccgcaggaacggtgagcaggcggctaagatgaccttgtggcctcgaaacttgaggctgtcggccacaatggtcacgtcgcagaaccactcctctgcccggagcttgttcatgttccgtagcgtagcggcctagtggccgggcagctggaagcgcaggacttcaccccagaggccattgtggcgggggtgggcaaccctggcccggttccgcgcgctgtttttttttaatcccctattttccccacccccgcggggccggaagcgccccccacacacgggcagagccagggcagcatgtaggcgcagggcgggagggtgtatagggcgcgctcgcgctggcggggccggctccacgtgggcgtaaaggggtaggggcgggagcggctcgtgcggtgtgttccaggcctcgcgcgcgcggcgacggcgtcggctaggactcaaaccctggagtttctgattcagtagctctgggatagagaaaacttcccaagggatgctgatgctgctggttggatgaacaacactgagatcattgctttaagacatccattgttggttgttggcaataacttaactttttggctaggggtggaggtgtaggagacagtctggctgtctccctcaggctggagtgcggtggcgccatctggactcactataaccttcgcctcccaggttcgagcgattcctgcctcagcccctcaagtaactgggattacaagcatgtgccaccacatctggctaatttttgtatttttggcagacagtgtttcgccatgttgcccaggctggtctc

SEQ ID NO: 8671 - DNA, 1034 bp, Artificial sequence
  DNA replication origin
ctcagccgaagttgaaggaacaaaatgtgaagtgcggaggcgcgtcagccgcttcctggcgtggggctgagggtggagggcggcttgttttcccctcccgcgggggtgagggagcggaacaggggaggggtggcagcgcggcggggactaccccgggtccgaggctcggctgggcaagggcgttttgttcccggcagccgccgctgcgcgtgggtccgctgggtccctagttttgcggcctaagccgagccctataggcctcgggtctggtttcccggaggggactggccgggcgggactgggtgcttccccaccgccgagcgggggccttggggtccttgccggcctcccggggccgccaaacttcggaccctggtgctcgggggtggatttcattgtgaaaggcggaatgggaaactcctggcgctgttcggcggccacggcggctggtgcggaggagccccgtgagcctggggctggcagggccgggttggcggggccggcggggttcgatccctgggaaagagcgggtggcgaggccgctgccgggtccccggcctctggggagacagggccttttccagattagagagatttgaaatgaaaaaagaggttacaaagtcgcccctttcccgctgaactttggttttctgaccgatagaggccggtagaggactgtgaaccaaaagttgtcccccaggatggacttcaccgcgcagcccaagcctgccactgccctctgtggcgtcgtgagtgccgacgggaagatcgcttaccctccgggggtaaaagagatcaccgacaagatcaccacggacgagatgatcaaacgcctgaaggtaagtgtctggacggattttgatgtctttggtagaaggcgctttctcctgtgatactgctaccctgctcagtctggcctttaaagttccaagttttttagatctcttaccccctctgaaaggtactgttgtatctcagataacatctttgagtgagttttgtagggatataaccattgtgggaaatttaaaagg

SEQ ID NO: 8672 - DNA, 849 bp, Artificial sequence
  DNA replication origin
gcccgcccgcccgggagcggcgctggggctggcggtgccgaggaggagcagccgccgcggggggagacgcggggcgagtgagcgctgggcggggagacagtgccgctctccgtctggccgaggaagagcagcctcgaaggctcctccgggagtgtgtgcgcttgtgtccgtccgggacccccgcggcccgcccgcacgcacctcgcgccggcccggaccgccgactcggacccggacgcccctcgcagaggcgcgcgcccggccgtccgtgccccgggagccggggcctcgcgcacacaccggccggtcacgcgagcggcgcgagagcacgcgagagcagcgcgcgctcctcgctccctccccttcctccgccggccgtgcatccgcctccctcgggcccgaggcggccgcgcgcagggcggacagcgccgccacccggttggcgccaatacctgccgcgcggggcgcctcccggaggacccgaccggagagggcgagaggaggaggagcccgggtggcgggaagcgagcccaggttcccgcggccttgcgagggcacgcagggcaaacagtgctttatctttcgcagcggcgatgagctggtgacttttgggggtcatcctgagggacatagacgaaactggttgggaggtagttaattgctcggtgaaaatgaactgatttcctcctcagggagagatctgcaaagtcaaggaaagttgtgcaatggggcgcagcgtgagcggctcactctcgggtcttctgacagccacccgagttgcccaccctccttagatttctgaagttaatattttgaaagctgcaaaacatgaaaatagcattgggtcga

SEQ ID NO: 8673 - DNA, 916 bp, Artificial sequence
  DNA replication origin
gtggtccccacttttcttatcagggggtccctggaggagcaagcccttcttcgagtgtcgggttctgcttggggggaaggcgggagctgtttggcgctggggaacattgcaacaggcccggaatttttgccaaaataagcggcgcggtaaaccacagctgtttctagccctcggcactctcccgagccccaaaaaacaaaacaaacacaaggtcggcctcgcgaggtgaggggagaaaggaaagcagagctgggacgagccctgacgcgcgcggggtccaggctgcaagttgggagggacggcgaggcgagcgaccggcctcggcattgcctgactagggccgtggccgctgcggcgggcacgggaacccgccttctcgcgcgcggccctcccgcggggggcttccgggcgcgcggcctcggagccccacggggagacaaaggggtaggcgactgccacggggtggagggaggctgcccagccccatcggccctgccagcgtgcggtctgagctcggggaatgtgtgcgccttagccggtggaaccgcagccgctggcctttgcccccagttcgagcttgagttttcggatgccaagaaaaagcaaagacgtgctcttccctcttgcgaccgctgtagtatgagtccgtccccaagcctgcaccattttttttctctcaactctgctttccctggtttatttgttctgggttctgatgtgaaatgtttagtgttttcagggtacgcaaatttttcacctttgctttctggttggtggtggtggtggtgatggtagtggtggtggttttgcctgttttttacttcctccgtcccctccctttgcggttacttttcattccacttgcagtggtttttcccagaatagagaagcgaaataacctcatgacaaagtgtcc

SEQ ID NO: 8674 - DNA, 1206 bp, Artificial sequence
  DNA replication origin
gcggctgctcttccccggccggacggagagcggcagtgtctccccgccgggcgcgctcgccgtgtctcccccgcggccgcagctgcttgctagccttgcgcggcgcgggagagcgcagtggcgccggcgggaaagggctgcggacctgcggcgccgcgttgtgcgttcgacgacgcggcaccggcttcgacgccctctgcccgctccagaagcaggtaaaggcggcgggtgggaggcagggaggcgggtccaaggtgagggccctggaggttaggggtcccggggctccgagccgaagcggagggcctgaagcagcggcgggcggcgcggcgaatgaacccccaagccctgaatgtggggcccggcgcgggccgcctccgatctgacccgcgggcccggctgcccggacggaagggaagtgaggcgtcggcgagaggcgggccctggcgctcagcccgaggccgggcgaaggcgggggccgcggccgcttccttggcctccgagtgcctggcgggcctccaggccccagacacacccctctcgaccccccgaggtttcctcccagatctgttcccgccgggacctgaccttgcgcccctccaggcgccttaggtgtttgccaggcggagccttctgggaacttcaggccaccttcctgagcacatagtcctagcagagccgtttatttactcagttcaagtccagacacacagccactcacacgttcggattttggagactgcggggagactttcccctccccggcatttgtgtgtctttggccctcgtcccgcctcccctgcccccatctgcaactttgtccctcaatgggacccttctagagcccctctctcatcgggactctctctaagccgtccgtttggaaattcatcctcaatagagtgagtcatcttagcgggggcacagtttatctctcatgcgcttttggttaaaatagttttttttttccctccgaaagagagctagagtaatagaatgtagatgacaggtcagtgtcagtgttggcttcaaaggctcttcctttcggcggcagtctttgtaactaggatctgatatttgtggcacggacaggtttgtacacattctcgccatgcagtggttgtaatgtctccatggcacagttctggcttgaaggcaggattggctgctttttctactcgacatctttgagccaatcagcaaggg

SEQ ID NO: 8675 - DNA, 781 bp, Artificial sequence
  DNA replication origin
ctgcccagtctggaaagtgaggagcgtctctgcccggctgccatcccatctaagaagtgaggagcgcctcttcccggccgccatcccatctaggaagtgaggagcgcctctgcccggccgcccatcgtctgagatgtggggagcgcctctgccccgccgccccgtctgggatgtgaggagcgcctctacccggccgcgaccccgtctgggaggtgaggagcgtctctgcccggctgccccgtctgagaagtgaggagaccctccgcccggaagccgccccgtctgacaagtgaggagcgtcaccgcccggcagccaccccgtccaggaaggaggtgggggtcacccaccgccaggccagccgccccgtccaggagggaggtgggggggtcagccccccgccaggccagccgccccctccgggaggtgaggggcgcctctgcccggctgcccctactgggaggtgaggagcccctctgcccggccaccactccatctgggaggtgtgcccggcagctcattgagaacgggccatgatgacaatggcggttttgtggagtagaaagtggggagaggtggggaaaagagtgagaaatcggatggttgccgtgtttgtgtagtaggaggtagacatgggagacttttcattttgttctgtactaagaaaaattcttctgccttgggatcctgttgatctatgaccttacccccaaccctgtgctctctgcaacatgtgctgtgtccactcagggttaaatggattaagggcggtgcaagatgtgc

SEQ ID NO: 8676 - DNA, 1167 bp, Artificial sequence
  DNA replication origin
cccaaggcagaagaatttttcttagtacagaacaaaatgaaaagtctcccatgtctacctcctactacacaaacacggcaaccatccgatttctcactcttttccccacctctccccactttctactccacaaaaccgccattgtcatcatggcccgttctcaatgagctgccgggcacacctcccagatggagtggtggccgggcagaggggctcctcacctcccagtaggggcagccgggcagaggcgcccctcacctcccggagggggcggctggcctggcggggggctgacccccccacctccctcctggacggggcggctggcctggcggtgggtgacccccacctccttcctggacggggtggctgccgggcggtgacgctcctcacttgtcagacggggcggcttccgggcggagggtctcctcacttctcagacggggcagccgggcagagacgctcctcacctcccagacggggtcgcggccgggtagaggcgctcctcacatcccagacggggcggcggggcagaggcgctccccacatctcagacgatgggcggccgggcagaggcgctcctcacttcctagatgggatggcggccgggaagaggcgctcctcacttcttagatgggatggcagccgggcagagacgctcctcactttccagactgggcagccaggcagaggggctcctcacgtcccagatgatgggcggccaggcagagacgctcctcacttcccagacggggtggcggccgggcagaggctgcaatctccggcactttgggaggccagggcaggcggctgggaggtggaggttgtagcgagccgagatcacgccactgcactccagcctgggcaacattgagcactgagtgaaccagactccatctgcaatcccggcacctcgggaggccgaggctggcggatcactcgcggttaggagctggagaccagcccggccaacacagcgaaaccccgtctccaccaaaaaaataggaaaaccagtcaggcgtggtggcgcgtgcctgcaatggcaggcactcggcaagctgaggcaggagaatcaggcagggaggttgcagtgagccgagatggcagcaggacagtccagcttcggctcggtatcagagggagaccgtggaaagagagggagaggga

SEQ ID NO: 8677 - DNA, 1117 bp, Artificial sequence
  DNA replication origin
gggcaggcggctgggaggtggaggttgtagcgagccgagatcacgccactgcactccagcctgggcaacattgagcactgagtgaaccagactccatctgcaatcccggcacctcgggaggccgaggctggcggatcactcgcggttaggagctggagaccagcccggccaacacagcgaaaccccgtctccaccaaaaaaataggaaaaccagtcaggcgtggtggcgcgtgcctgcaatggcaggcactcggcaagctgaggcaggagaatcaggcagggaggttgcagtgagccgagatggcagcaggacagtccagcttcggctcggtatcagagggagaccgtggaaagagagggagagggagaccgtggggagagggagagggagaccatagggagagggggagggggagggagagggagagggagagggcagcgtgtaaccttggtaacttcacttcagcctctgcacttattctcttaaattatcatctgtagtttcaaaactcagaccaccaatgaacagttttttcaactgctctggttcctttggatcatggccctcctctctctggcggtggtggcgacggctggagttgggctgggggtgactgggtggtggttttacctccattttgagactgaactcgcctcttccaactcggagttcagtatccctaattgtattttgataattttagagaactcttcaacatctcccgagagtggttaaagaaagggtaaccttagcggcataaaaaagttaatgatagtcgataaatgcctgacttacaaggtagacgctggggagaatctatttcctgaggagagagatgaaaatatacgacagcccagttttcatgtgcgttttgtgaaggtgtaaggcatgagttttttttttaactttctgtgtgtgttacttattgtttaatatcttatagccaaagaaattaaaagagactgaagaaacaccaagtgaactgtctttccaggactttgagtacccagactatgatgactacagagcagaggctttccttcaccaacagaagaggatggagtgctacagcaaggccaaagaagcttatcggatagggaaaaaaaatgtcgccac

SEQ ID NO: 8678 - DNA, 850 bp, Artificial sequence
  DNA replication origin
accccgtctgggaggtgaggagcgtctctgcctggctgccccgtctgagaagtgaggagcccctccgcccagcagccgccccatctgagaagtgagaagcccctccgcccggcagccaccccgtctgggaagtgagggccagccgccccgtctgggagggaggtggggggtcagcccccacccggccagccgccccgtctgggagggaggtggggggtcagcccccgcccggccagccgccccgtccgggagggaggtgggggggtcagcccccacccggccagccgccatgtccgggagggaggtggggggcgcctctgcccggccagccgccccgtccgggaggtggggggcgcctctgcccggccgccccttctgggaagtgaggagcccctctgcccggccaccaccccgtctgggaggtgtacccaacagctcattgagaacgtgccatgatgacaatggcggttttgtggaatagaaaaggggaaaaggtgggggaaaagattgagaaatcggatggtcgctgtgtctgtgtagaaagaagtagacgtgggagacttttcattttgttctgtactaagaaaaattcttctgccttgggatcctgttgatctatgaccttacccccaaccctgtgctctctgaaacatgtgctgtgtccactcagggttaaatggattaagggcggtgcaagatgtgctttgttaaacagatgcttgaaggcagcatgctcgttaagagtcatcaccaatccctaatctcaagtacccagggacacaaacactgcggaaggccgcagggtcctctgcctaggaaaaccagagacctttgttcacttgtttatctg

SEQ ID NO: 8679 - DNA, 1216 bp, Artificial sequence
  DNA replication origin
gcagaagaatttttcttagtacagaacaaaatgaaaagtctcccacgtctacttctttctacacagacacagcgaccatccgatttctcaatcttttcccccaccttttccccttttctattccacaaaaccgccattgtcatcatggcacgttctcaatgagctgttgggtacacctcccagacggggtggtggccgggcagaggggctcctcacttcccagaaggggcggccgggcagaggcgccccccacctcccggacggggcggctggccgggcagaggcgccccccacctccctcccggacatggcggctggccgggtgggggctgacccccccacctccctcccggacggggcggctggccgggcgggggctgaccccccacctccctcccagacggggcggctggccgggtgggggctgaccccccacctccctcccagacggggcggctggccctcacttcccagacggggtggctgccgggcggaggggcttctcacttctcagatggggcggctgctgggcggaggggctcctcacttctcagacggggcagccaggcagagacgctcctcacctcccagacggggtcgcggccaggcagaggcgctcctcacatcccagacggggcggcggggcagaggcgctccccacatttcagacgatgggcggccgggcagagacgctcctcacttcctagatgggatggcagccgggaagaggcgctcctcacttcccagactgggcagccaggcagaggggctcctcacatcccagacggggtggcggccgggcagaggctgcaatctccggcactttgggaggccagggcaggcggctgggaggtggaggttgtagcgagccgagatcacgccactgcattccagcctgggcaccaatgagcactgagtgaacgagactccgtctgcaatcccggcacctcgggaggccgaggctggcagatcactcgcggttaggagctggagagcagcctggccaatacagcgaaaccctgtctccaccaaaaaaataagaaaaccagtcacgcatggcggcgcgcgcctgcaatcgcaggcactgggcaggcggaggcaggagaatcaggcagggaggttgcagtgagccgagatggcagcagtacagtccagcttcggctcggcatcagagggagaccgtggaaagagagggagagggagactgtggggagag

SEQ ID NO: 8680 - DNA, 3057 bp, Artificial sequence
  DNA replication origin
gcctggccaacatggtgaaaccccatctctactaaaaatacaaaattagctaggcatgatggcaggtgcctgtaatcccagctacttgggaggctgaggcaggagaattgcttgaacccatgaggcagaggttgcagtgagttgagatcacaccactgcactccagcctgggcaacaagagcaaaactcacctaaaaaaaaaaatgtatgcagctgtggttaattttgtctgtccacttggctaggccatggtacccagatatttggtcaaacagcagtttggatgttgctgtgaaggtattttttagataagattgacatttaaatgtgtggactttgagtaaagcagattaccctctgtaatgtgagtgggtctcattcgatcagttgaagtccttaagagaaaaaagactgactcccttgagaaagagggaattctgtctgcgaactgccttcagacttgcactgaaacattaactcttcctgtgtttctagcctgctcccaagctttggatttgccagactccctaaaatgtgagccaattctttaaaattaatatggatcaattgataggtagatgatagagagatgggaatagatgacagatggagatggaggtggaggtggagatggagacagagagggagatagaaatggaggtggaggtggcgagagacggagatggagatggaggtggagatggaggcagagatggagatggagatggagtcagagatggggatggagatggaagcagagacggagatggagatggaggcagaaatggagacggagatggtggtagagatggagatggagatggaggcagagatggagatggagatggaggtggagatggaggcagagatggagatggaggtggagatggagatggaggcggagatggagatggaggcagagatggagatggagatggaggcagagatggaggtggagctggaggcagagatggaggtggagacgtaggcagagatggaggtggagatggaggcagagatggagatggagatggaagcagagatggagatggaggcagaaatggagatggagatggaggcagagatggagatggaggtggagatggaaatggaggcagagatggagatggaggcacagatggagatggagatggaggcagaaatggagatggagatggaggcagagatggaaatggaggcagagatggagatggaggcagagatggagattgaggcagagatggagatggagatggaggtagagatggagatggagatggagatgtaggcagagatggagatggagatggaggcagagatggagatgtaggcagagatggagatggaggcagagatggagatggaggtggagatggagatggaggcagagatggagatggaggcagagatggagatggaggtggagatggaaatggaggcagagatggagatggaggcacagatggagatggagatggaggcagaaatggagatggagatggaggcagagatggagatggagatggaggcagagatggagatgaagatggaggcagagatggagatggagatggaggtggagatggaggcagagatggagatggagatggaggtggagatggaggcagagatagaggtggagatggaggcacagatggagatggagatagaggcagagatggagatggaggcagaaatggagatggagatggaggcagagatggagatggagatggaggcagagatggagatggagatggaggcagagatggagatggagattgaggcagagatgtagacggaggcagagatggagatggaggcagagatggaaatggagatggaggtggagatggagactgaggtggagatggaggcagagatggaaatggagatggaggcagagatggagatggagatagaggcagagatggaaatggagatggaagtggaggtggagatggagatggaggtgggggtggagatagagagggagatggaaatggaggtggaggtggagatggagacagatagagatggagatggagatggaaatagaggtggggatagagatggaggtggagatgaagatggaggcagagatggaaatggagatggaagtggagatggagatggagatggaggcagagatggaagtggaagtgaagatggaggtgaaggtggagggagatagagatagagatggagatggagatggagatggaggtgggggtgggggtgggagtggaaatggagagggagagggatagagatagaaatggaggtggagatggagatagagagagagagagagaggtggagatagaggtggagatggaggtggagatggagatagatcctattggttctgtttttctggtgagctctaatgcagtggcctgccccattgtccagttagctggggatagagtagagggaggaataaagtgctgatctgtaatggtttactaattcaacctcctcacacttcctccccaaacaatgggctcaaaaggtggagcaggccatgctcttaattggcagtcctctgataacatcaccatccagcatcaccacgcccagctaatttttgtatttttagtagagacaaggtttcaccatgttggccaggctagtcttgaactactgaccttaagtgatccacctgcctctgcctcccaaagtgctgggattacaggcgtgagccactgtgccggccaacctttaaatacattccagttataatgcttaacattcagagatctctgtgcactggattcaatctctattcctggtccctccttttacaattggtagattgattactgtgccccagtgttcactgtgtccccctaagaagattgtgcattcacatcctttgccctgttacttgcaggccccacgtgggagaattagacattcctactccattgacgtagagcttgtccacacaacttgctttgcccaataaaatgtaatcagacgtgacttacaccgatcctagcataaactttaaatggttgtgtggcttgactgaacaaagggcaggtgtcctct

SEQ ID NO: 8681 - DNA, 1584 bp, Artificial sequence
  DNA replication origin
cctttgacattatgaccgcagaggattccaccgcagccatgagcagtgactcggccgccgggtcctccgccaaggtgcccgagggcgtggcgggcgcgcccaacgaggcagcactgctggcgctgatggagcgcacgggctacagcatggtgcaagagaacgggcagcgcaagtacggcggcccaccgcccggctgggagggcccgcacccgcagcgtggctgcgaggtcttcgtgggcaagatcccgcgcgacgtgtacgaggacgagctggtgcccgtgttcgaggccgtgggccgcatctacgagctgcgcctcatgatggactttgacggcaagaaccgcggctacgccttcgtcatgtactgccacaagcacgaggccaagcgcgcagtgcgtgagctcaacaactacgagatccgcccgggccgcctgctcggcgtgtgctgcagcgtggacaactgccgcctcttcatcggcgggatccccaagatgaagaagcgcgaggaaatcctggaggagattgccaaggtcaccgagggcgtgctggacgtgatcgtctacgccagcgcggccgacaagatgaagaaccgcggcttcgccttcgtggagtacgagagccaccgcgcggctgccatggctcgccgcaagctcatgcctggccgcatccagctgtggggccaccagatcgccgtggactgggccgaacctgagatcgacgtggacgaggacgtgatggagaccgtgaagatcctctacgtgcgcaacctcatgatcgagaccaccgaggacaccatcaagaagagcttcggccagttcaaccccggctgcgtggagcgcgtcaagaagatccgcgactacgccttcgtgcacttcaccagccgcgaggatgccgtgcatgccatgaacaacctcaacggcactgagctggagggctcgtgcctggaggtcacgctggccaagcccgtggacaaggagcagtactcgcgctaccagaaggcagccaggggcggcggcgcggctgaggcagcgcagcagcccagctacgtgtactcctgcgacccctacacactggcctactacggctacccctacaacgcgctcattgggcccaacagggactactttgtgaaaggttagtgggggctcttctcctgggtggggcccccaagaacgttgcctcctaggcagggggcaccagggataccgtggctggcatttgctgagctggtaggtgctgaaggccctcccacccccgttttgggtttgcattctgggtctaattctttcctggcaccgaaggccgtcacttatgcagcactgatagaaatacagatcgttctggggtgagcggtaaaatcacaggaatatgcaagtgctggaattcttccttgccgaggtccaccgggttaggggctagtccaccattctcttggtgcttacgttaaaacctgcttgtgatattaaatcttaagatgttggtggagtccgtgatttttaattttgttttttgttatcactgattaggatataatgacacccagcataacctggaaaataagatacataggttctgggtcctgtt

SEQ ID NO: 8682 - DNA, 1026 bp, Artificial sequence
  DNA replication origin
tctgatttctgtatcttttccccacatttcccccttttctattagacaaaaccgccatcgtcatcatggcccgttctcaatgagctgttgggtacacctcccagacggggtggtggccgggcagaggggctcctcacttaccagaaggggcggttgggcagaggcgccccccacctccctcccggacggggcggctggccgggcgggggctggcccccacctccctcccggacggggcggctggccgggcgggggctgccccccacctccctcgcggaggggttggctggccgggcggggctgtcccccatctccttcccggaggggagggctggctgggcgggggctgaccccccacctcccggacggggcggctgccggtcggagacgctcctcacttctccgacggggcggctgccgggcagaggggctcctcacttctccgacggggcggccgggcagagacgctcctcacctcccagacggggtcgcggctgggcagaggcgctcctcacatcccagacggggcggcggggcagaggcgctccccacatctcagacgatgggcggccgggcagaggggctcctcacatctcagacgatgggcggccaggcagagacgctcctcacttcccagacggggtggcggccgggcagaggctgcaatctcggcactttgggaggccaaggcaggctgctgggaggtggatgttgtagctagccgagatcacgccactgcactccagcctgggtaacattgagcactgagtgaacgagactccgtctgcaatcccggcaccgaggctggtagatcactcacggttaggagctggagaccagcccggccaacacagcgaaaccctgtctccaccaaaaaaatacgaaaactagtccggcgtggcagcgcgcgcctgcaatcgcaggcactctgcaggctgaggcaggagaatcaggcagggaggttgcagtgagccgagttggcagcagtacagtccagcttccgctcggcatcagagggagaccgtg

SEQ ID NO: 8683 - DNA, 867 bp, Artificial sequence
  DNA replication origin
ggagcccctctgcccggccgcccatcgtctgagatgtggggagcgcctctgccccgccgccccgtctgggatgtgaggagcgcctctgcccagccgcgaccccgtctgggaggtgaggagcgtctctgcccggccgccccgtcggagaagtgaggagcccctctgcccggcagccgccccgtcggagaagtgaggagcgtctccgaccggcagccgccccgtccgggaggtggggggtcagcccccgcccagccagccctcccctccgggaaggagatgggggacagccccgcccggccagccaacccctccgcgagggaggtggggggcagcccccgcccggccagccgccccgtccgggagggaggtgggggccagcccccgcccggccagccgccccgtccgggagggaggtggggggcgcctctgcccaaccgccccttctggtaagtgaggagcccctctgcccggccaccaccccgtctgggaggtgtacccaacagctcattgagaacgggccatgatgacgatggcggttttgtctaatagaaaagggggaaatgtggggaaaagatacagaaatcagattgttgctgtgtctgtgtagagagaagtagacatgggagactccattttgttctgtactaagaaaaattcttctgccttgggatgccttacccccaacccggtgctctctgaaacatgtgctatgtccactcagggttaaatggattaagggtggtgcaagatgtgctttgttaaacagatgcttgaaggcagcatgctcgttaagagtcatcaccactccctaatctcaagtacccagggacacaaacactgcggaaggccacagggtcctctgcctag

SEQ ID NO: 8684 - DNA, 967 bp, Artificial sequence
  DNA replication origin
ctttgccccggattccggggcagcacgagagtgctggggaaacacccgggtagcggcagcagcgtgcggcgagcggctgcgggttcccccggcggcttctcctctgctcccggccccggggctccgcggccactgctgcccgctcagccgcagccacacctgcagcagctgccgcggcatctgcagcggggcgcctgctgcggagtcccgtgcgccctgcgcccgcgccgcagggccagtggcacggcgactgcgggctcactctccttgacttccatccctcccgcttcccggcgccctctttccctcagcagccccggcttggcagggcctggggcgggggagaccgggttggaggcggtgcgcccgggtggggactgcagaggggaaaagtgagggtgggcgcctgcgggaagagcgcacacccccttgtcctggcaccggcctccgctgtgccgctcggctgtctctcctgggcggcagcgcgctcctgccggggagttggagccggggttggcttctccacgaggggttcagaggccagcccatgagacatgaaaggggggaaaagttccttttccccctcggtggcagagagagcgtttaactagaaaatggctgtgcataggggaccgactccaggaaactggccactgggacccgaaagcccctgcgctgcccaccgggcggaatggagggtggtacgctagaaatgacatttgtgcggcgagaacagagctggacggagggaaggatgctgagacccatagaaacaatgaaaggtggtcttcacgtcggtgaagtggtgtagactacgggttcggggcaaacagccgagggagcatgggactagaattcaaaaaaataaattaatttggataaatcatatgtggagttgtcaccgaccgttctgtagtcaagttctgcgcggttttagagccacgactgtcacagacgtttttggatg

SEQ ID NO: 8685 - DNA, 920 bp, Artificial sequence
  DNA replication origin
gccgccgggggaacccgcagccgctcgccgcacgctgctgccgctacccgggtgtttccccagcactctcgtgctgccccggaatccggggcaaaggcaaggaagaaagctgggctcaccagtggtgcgcgcggcgctcgcctcggctccggcgcccagcggctctgctccagtctcgcccttcccggagcgcccagatcagatgcggttacagcgcactagcttcctacttgagaccagaacgggctccggcaactgagcatgctcagtgccgttccgcgagtcccgcgcagggagcggcgctgacgagattccacttctccaggctttggcagcggctgcgcgagggaaggctggagggacccggcggggagggggccgaatgggagaaaggcggggccggggggtgggggccgggcagaaggaggcgggccgcgctcccagggcgacccctgcaggtggaggcggcagggcctgcgggaggcaccctccccaatcgcctgggaacacgcagggaggcaatgggtcccccagtaagacccaaaggcaggacgtgcagtgcagcccgggtatcccctccgtgtggctggtgtctgtctgcaccaaaaggcagttgggttaccttagccctggcttttctcccacacgccagcattcccttgcaataggaaaatgtccccacaggagagctgcccacacccacccaggctaactgcaagttgtaggcgacaccttctccttccttctacctcctatccccacccccaggcatatgccgcacacacactcttctttgatccggaaatcacaagataatatcaggggagagatacaactgccggagaggaaaaggaggttttcctttccattgccaataatattatctataactctaattgtaagcgtgcaaacaaagccct

SEQ ID NO: 8686 - DNA, 1119 bp, Artificial sequence
  DNA replication origin
ccccccccccgccgccgcggactccaccgcgggttttcctctccgtcgggaagagaccgacctgggaggggcaggctccgctcacctaccccggacccccgagagagagcggggtggccaggccgggttccggggatctgaggggagctgtgaggtccgggaatagagtgccttggaaagaggacccgtctgcaaggttggaggctggtcgatctccgctcctgacgggaatggtggtcttgggctggtttccttgcctctttggccttgaagatcacagactaagaaccacaggctctccagttcagagagcctgtattttccccaagaggtctactgtggccctcgactgtccttggtccacggacgtgttaggtggatcttggggtgcagagactcagtcccaagagtaaacacttttcatgaatttatagggatttctctgtgacagtattgtttttatgttgtaggaaggagggacatgattgctggcctccagctcggtctgagggagataattgttaattggagaggttattggagtgcaaaagtcagaaaccaccttccacaaggcagcccccctcccatcccttcgtaacaacctcactgagtctgcatgagggtccctctatacactctattcgcaccttgtgcatttccctcccagcactctacctgtttgaaataaccgttttgagtgattatttgataggtgtctgtcacccggccggactataaattccatgaaagcaggggcctgggcttttaaattcaccactatcctcaggcctagtacaagacctcgtggatccttaataaactcatgtaggaaagaataaagtaatgcccaccccactgcatagagtcctcataggaagaatcacgtgagtttttaattcgagatccttggtaggactgtgtgtgtgtgtgtgtatgggtagggttctctaaagtgtatagtcctcacaccagcagcatcagcatcccatgggaacttgttagatatacagatgcttgggccccaccacatatctacccattcagagacacagattgggactcagggatttgtacttcagcaaaccctccaggcgattctgatccaggctccagtttgac

SEQ ID NO: 8687 - DNA, 1364 bp, Artificial sequence
  DNA replication origin
cggccaggcgcacggggacacgcgggtcgcgggcacctgccagggggcggggccaggaggcgcgcgccctccgcgcccgcacccgagcctgggaggagccccagtcccgccctgccacccccacccgggccggcgcaatgacacagcacaaagcgcggcccacacgtggcgcccgcgaagcccgtgcagccgagtctgtgctgcccgcgccacgccctcgggagctccgcctggcgctcgctcgccacggggcgcagccccctccgtctccccgtgaccggtttcgtagagtcacccgctaaatgcaggggcccaggaaaggcgcccagcccacgccccagcccggccgtctccggtgctcgcagcgggcggcttggtccctgccagcagccggaaccggtgggcgcccccgcctcggcgctcgcgggggagggggccagagacggcgcgagacgccactcactttgttcagcatctgaaaggcaaatgcaaagaaaaaggcaaaaccgaaccgatcagcgactcggctccccctccctcggcctcgcgctctccgggtagcggtgcacctggcgctcacctcggggttgatctccatcggcttgagctgcatcttcgcggagcgcccggcagaaatagcctagggaagacgaaaaacagctagcggagccgcccaggctgcagctataaagcgccggccagacgcactgtgaggcctgtgcagggggagcaggggcagaaccaagcgagggggaaacggacggtcgcggccagatgggtacgaaccccccgtgcgcagcgcggagtggtacggccgggcccccaaaccttgcagtctcactcgccggtgagataatctggtggttgtggagacgggatttgttggtgggtgttccttgagtgtatggagcagtccttttgatggagtctttaattttgggcgaagtttctggaaacccatcctttcaccatcccaattactctaaagctcgagtctctgaagcatttgagaaaaagcacaaattcaacaggtatatatttaatacgaatgaatgtaaatgtgtgccccccgccccaaatctctcagcagtttgcgtttaaccttagacaattcctcctccatgttaagtcagaccagtaccgaggttcgtttttaagtgactacctagaataaaacagaatctggtagataacagatactgcattaggaatgctgatgtaatgtgactcccgcggaagaaatggttggtcctgggagagcagtagaaagctgggggatgtgagggtaatacaagacacaaagaaggcaggcgattggagacttgagaaaacagatccagggaaaagatgggtatgattttgag

SEQ ID NO: 8688 - DNA, 1379 bp, Artificial sequence
  DNA replication origin
tcttacagagctggaataaggactgagttagtcaattatttgtaatgcacttagaacagtgcctggcacagtataagtgccacgtaagtgttttcaaagcaaataaactaaagcctgtctgactccaaagctggtaatggtggaatttgaggcctgctttttgttccattcccctattatagcagcagaattggacaaagattaaactcggattctggatggggaacagagatttagaggctgaggcacccagggacctccagccaccgtcagaaacctcttgttagcagccattctgaagaggggaatccattagcttgaggttaggccaagaatactgagctcctccggacccagcgctgggctcacgtaggtcagagctccctggtggcctaccagggtatacccaggcaacaatctaaaaggtagtgtgtgccccctcacccgcaggcgggacctggcctgcctctcccatgctatcattcccgcctggtgctctccacaccagctccagtcttgctggcccgctgtgggctcctccacggggaagctcattcctaccttaaggccttggcatccatctggaattcttcccccaaattgttacacagttaaatctccctcactcatgtcacctcttcaggacatttccttacagacaccttccttgatcgtcacttgggctgtagtgcaaaacagaaggcatgctcaagtgggagtggccaaggagagtttaaaggaagggttagaaagaagtgagccggatcgggagaccattatgggatggggaagcctttaccatacctaggcctgggaggttgagtgggacaagaggagatgaggaaccttctggaaaccccctaaccacctgcaggaagggacgagataaataaatgcacgtctctcttcagctcactgaccatctgcctacctcccgttaatggaaccgcgactcacaggtcagcctcccagccaaaaggggggaaggctatcggaaattaccccgcgctttttctttccatgtcattatcttctcctcttttatcttaacaacacccgccacaattatcttcttttgatttacatgtttattgtctgtcccggcccccaattccctctacaatgtagatacctcgagggcaaggacttccaggtagggtgtgtgtgggtagggtgtgtagggtgtgtgtgtgtgtgtgtgtgtgtgtgtgtgtttccatctctgcgtccccagcgcctggcccagtgcctgacgcatagtaggtgcacagtgactgttggttgactgcatcgacagactaggacacaggtagccttcctggagaagaaaagctcatcagggtcgtttttctttttcttcttacaaaaagatcaggtgg

SEQ ID NO: 8689 - DNA, 1630 bp, Artificial sequence
  DNA replication origin
ccctccccgggggcggagcggccctcgaaggtggggaggagaagaagctcccggcgcctccgcgctcgctcccgcgggtcactcacggcgcgttggagcccgggcggcgccgggaacagctgccgcggcgtcctctagcagcgcgcggctctcccgggacctgcgccggccgggggcggggagaggcggggaggggaggccggcgggcgggaaggggcggggagcgcgctcctgcggcggcgacggcggcggccgtcctcatcccggcgcttgagaggacgcggggctgcgcaaatggcttgtcccgctctcggtctggaagctcttcagcccctgcagcccgagccgccccccgagcccgccttctccgaggcgcagaagtggattgaggtaggtgcgggtggctggcgggcggccttgcactggcgccctgagccacggacccgcgcacgctccgaccgcaggtccagccttgcctccccccaaccgcccccactttcttttgccagctgctccaggtcacccccccgggcctcggcgagccgcgaaaccttagcgctttggcattggaatcccgggcgagggtgggcgtgaaaggggacactgcagtctagctgcgcgcgtgagggcaggaagggatcccctgcgcgtccatccttcctgcccgctggcctcgcaaatctcagctagcgccgcttccaggcgctgccaagggaagcgcagtgctagcaaagcgttgcaaaggcgcaggaagcgcgagcccccagagacttcaccggtgctcgcatttcggggtatcttgcttctggtcccacatttcgccccttgtccccctaccccgcacccttccggagcagagttggcagtgtcttcacggaggcgcatacccaccggagcctcttgctgtattcctggcaccgggtcaggtgtgaggctggcacagtgcgcagggcgggggtagcttgcaagacccacctgcgagcacgcatccgcatagacgctgcccagcctttggcaacccccgcccctctccatcccaaggactgcagggtcggttccgaagtacgggctacccggtctggttggcatatttcacttcttaaataactcgttggcaggccagggaaatcactggagctctcggctctcagtcccggaagcgctcactgggtgatcctgattcacgatgtctatcagtagatgcagcttggtagccccgagctcccgaaatgaactgtctgcggggttcaggacgcttgaagggcatgaaggggaaaggtgaccccctatgattagtgcaaggagcctcagcttcaatgggtggcctttctggaggcttagtggaaggtatgaatttggccttgtttccctcagtgacaagcagccctctttgcctggtagttcagaggaggaagtgtatcgctaaatcatgacccagcaatgttgaagcttccagaattccgcctgtcacttagtgactccccactccgttcagcattgtggttcccaagaagctgctagagtaacaagagctccacgtacagatttaaacctgctgagcttcctgcagaaaccaccctcacttaatgctgctctcctgctccagccagagacctgtaccctacagggt

SEQ ID NO: 8690 - DNA, 885 bp, Artificial sequence
  DNA replication origin
aggcgcttgtgccagaaaggactccgccaagcccgaagtttgagcccaggtttccgcagataacaaatttcctcggtttcttcccgcagcttctctcggcaactctctcgcgcgggtgtaggtagcggctgccgtatgacctgaccttggagtcctcacattctagctccacggccggcgagctgccggctgatttgctcactttctgtctcctctgtcatactctagttccttacaaactcttcacggaccacggcggcctcaacgagaagcgcaagcagcggcgcatccgcaccactttcaccagtgcccagctcaaagagctggaaagggtcttcgcggagactcactaccccgacatctacactcgggaggagctggccctgaagatcgacctcacagaggcgcgagtccaggtacgcgcgcctggaaaccgaccccgctccgccgcactggtccggggaggtgtggggtgaggggcggctggtgaaattcgaagtcctggagcctcgagtgagaaggacctagggccccatggccgatcagaaatactggatttggtgtggctgtgcgttcgagagaggcttagagcgcacgctcttggcattttatttacagttgcgaagtgtttcccacccgagcagagacatggggggccttgggacgtggatgagcgatgcaatttcggggacaggaagtgcctgtggtggaaggtgtgcagactttgctcccgtattataagtttttccttctcccctcccgccccccaaaaaaatgcctcctaactcaagtgcttttaacctggccccatggcatataggttcattttcccggaaactgtgacttgcatcagatttgcaaagggtctgtgacttcatgaaggtc

SEQ ID NO: 8691 - DNA, 1324 bp, Artificial sequence
  DNA replication origin
aacccggggcgggtgagcgcgacccttgcagcgaccccttgccgagccctgcccgcgcgattactaaggagacgcggcctccggcactgccgtccccgcgccgtttgaaaacggatccatcagcgggtaccgggcgtttaaagggatctttctgaagggacttgtgggaaaggacaaaagcaggcggccccattcagctgaccagtcaaaggcgctaaatggggacatcaaaaggcgccctaactgggaatacggatccaatcgcaagagaaaagaacctggtttcttttcttggcctcaacaaggctgaaaagccgtaaagcaaataggcaaagaatgcggagaggggcagaaaggaaaaataaagaaacaatctcatgaatgcatttttctgaggctttaaatgagaggagtgacaacttcctaggcgccgttgggggccggggtgcggggtccgccgctgcgcggaccccctcaccgagggaacctctcccgctcgggcgcccttgctgtttccacgcgctcctaggcaaggttctttttgtgggtgtaatctttgttcttatttaaatgcctaggaagggaagggaagggaatggaggataaggtagagaagggaaggaaagggaagggagatgggaatggaatgggaaagtaggaaaagcgggacgcggcgcgaagcccaggtttcccatcagcttttctgcggtcagattacgctcactaacacccgagcttgttatctgacctggccatccccgtcacattctttctacaagttatcttttctccaaccagggtatttggagattattcgcactgaattttctgcccgccaagaacgaataggattgccaagccacaccactttttggagcccgcttattcgcgcctatccaccctctcctgtgccccaggttccctgagcacgggaatcctttccgggcatggccaagtttgttcggtggctcagagcgggaagggaagtgcagttcgacacctgtccagctgctccgcttggagatcaaaggccggctatgggctgagcgacagatttacgggacggtggtacagattaaggcgagaaccctgccggtcctggactcgagttcgcacccaaggaaagcgtacaggtccctggaagcgggtggatgtcggagaggccgaggcagcctgcgctgtggccaggcaggcttggtgggctttagtctcagtatgtgttctttaaagtcttgacaggttattagtaaaggaaggggcaccccagggtcatgaagatgcttctcgctctggcccaagcatgctgaggctcgcttattcctcg

SEQ ID NO: 8692 - DNA, 1479 bp, Artificial sequence
  DNA replication origin
taatgttaaatatgattaatatcttgaattccttgaaatatgacatgcatgagttacaatgaaacctcttttatttccccatgaaatgcttttgcataatgagaaagaaaatgtcctctatgccctaatcagccctgacagttcctggactcccaaatacttatatttatggcattatttatttcatctctaataaatggattgggggggggacacagcaccatctgaggaagctgcaggagagagggagacaatctaggggggaataatacagaagctgaaccagcaaggcagagagaaaaagcttccaaagggaaggagaccagggaaagagaggccaaaagatgtgaacccccagaagaaaatgggtcaccttcctaagaataaaaggaaggctctgaaaaggaaacaaacttcagagtgcagagatgagggtcctacatcaaggagcatccagaactctgacctggagaacgaaaaaggaaggctgaaaagcaaacctggggcagggtatgctggttggcctagaagaggggtgatttgggatagggagcaatggaccctctgccccaaaaagtggctgggagagaccaggacatctgcatcccatggaggatcttcctcccaacgactgagatctctcattcaaacggctactgaaattgggcaccctccagaccctcgccggatggcgccagttgcagtgagtaaaacaatgcaaggagtgagttctcgtgtttccctgggcttgcaagtacatatacatatattaaaaatgacactgttgaaagtaatcatcacctcaaagggaggtatcaggacatttccccactcaattgcacagaggctactggctatgggaagtgaggagttgacttcaaataacctggatgcgtcagtgcaacacagccgcacactcccgagtgtctgactttgggcaattcccttcaacctctcagagcctcggttttctcatctttataatgggggggaaatcatggtgtcatgcacgttctcggggcccctacgggaaacaaatgaaaacgtgaaaaagttctacgccttgcgagcttttatgttccgcatgagctcagaggccgcgatgctcggggaaagcaggaccccaaagccccgtaaacaccgcgcgaccacccgggccaagatcttcaagaggttcttttcagaaggatcggagagcaattcccgattggtagaagaacttgctgtaatacacacgtactctgacgaccccgccccaacgactagcccctcctctgtgcaaccccgagagtttggggtcatgcagggggcgccacgagctcgtttcggaagccggaccccgcccgcagccgcagaagcctcgagtccacatctgggtctctaaagtctcgccgtagccagatcccggatccccaccttcttcaccagttcccgggcgtcctccaggtcctcgctttcccccttcccccgctccccgtc

SEQ ID NO: 8693 - DNA, 1123 bp, Artificial sequence
  DNA replication origin
cttgcgacgtgtccctggggaggcggaatcgctgtgcgccctgagcccgggctcagcccttcgctttccagctgcgtcctgctcccggccgcccagggagcccagtggcgatgagggcactgctggcgctttgccttctccttggctggctgcgctggggcccggcgggcgcccagcagtccggagagtactgccacggctgggtggacgtgcagggcaactaccacgagggcttccagtgcccagaggacttcgacacgctggacgctaccatctgctgcggctcctgcgcgctccgctactgttgcgccgcggccgacgccaggctggagcagggcggctgcaccaacgaccgccgcgaactggagcacccaggcatcactgcgcgtaagtgcggggccctcggggacatatccccgcccgcctaacggcggcggctgcatgtgtgcgcgggaggatgcacagacccaggcaggtctatgcgccttcctgggtctgtgcgccagggggacgcggccgggtgggggaatcaagggatgagtgggtggtcgcgtttcagatcatggtcctctattcatttgcagtcccgcttcccgccacttgcggtctctgcgggtcggcccgcagggaaagtttgccagggacagtgaggagcgcggggcttgtgcctggtagccggggggaagacagctggagctcccgggagaagggtagtgcgggtaaagccagggtagacttgggttttggtggaggggccgagggtgtcccattgctcgcccttgtcacttcgggagcttcgggaagtgccgaatgcagggaatcgcgactcttgtcgcgcgctcatttgcagcccttcagggctaagaaaccccagtcactttttttttctgtcttaatgatagcgtttctaagccacggccccgttctgcagacttcctttcaattctctgcatcgaattaccctctccggcccaccccctattgtcacgcctttcagaaatgcccaggtcttcgaggtggagatttagaaacaagggtcgaaggggcttccccgccccctattctcacttcggaaaacacgggtcaaatttccgctgacttcagagcggaataaatcacgacc

SEQ ID NO: 8694 - DNA, 1235 bp, Artificial sequence
  DNA replication origin
gaagaggtaggatgcggtctcttccaggataaacacacacgctcacacacacactcgcttcccgaccccgggctagccccgagcctcggcggccccttaccttcggcgcgcgagcggatctccgacacggtcctccgcatggtgggcatcgcggcggcggctgcaggtgggtcctcagcccggactctgcacctgtcacggcgtggtacacgcgggagacccggctgcgccgcgcagagcgctcagctgcagcctgggccgcgccgccgcccacctagggcagagctgccgccgggcgcggcccccgcacgccgacaggaggaggagaaaggcagcggtggcggcgaaggtggcggcgcccgcagagctgggcgagctcttgctgcagccgcggaggggcggctcggcgaggggcggagctcgggcgccggcgccgggggaggggcctgcggggctcgcgctccccctcccgcggccgctcagcaaggaaggcgggtgaggggcggggagagccagggggagcctccttcgccccgccccgccccgcttcggaccgtatcacgactcaaaggggggatcaactcttagcctccttagtcctccagcgttttcgctccgccctgtggagttggttgacccggttcctcctccaggccactcggactctctcacatcttgctcagaaaggaaagactgctctggctgctgcattctcacgaatcccctcccgctacccctggcttttgatcgcagtggagccgcccgtcgtccggaaagagctgttgggtctgagccggcaggcgaaggcgaaagggtctgggactacaaggtttagctcccagccagagcaggaaaggaacgactgactgttcgccatctgggtgtaattctaacctctctgcacgcccagcccgactcgtggcctgagccgcacttgtcctcctgcctcgcccactagcaacaggctgccaggtcgggaggcccctggtgcccatggtgctcttgtccatggggcttgggtgcatctgggccccgcctgcaagtgggcccggtgcatctccctagttcaggctctgcagcctgacaaggcactgaaatagcaattaagccaactaagtattggcccaggtggttcacaaaagactttttttttttcttttagttaaatctgcataaagttggatgcagtcgttttatctgcaaaggggagaggagtctttgtataaaatccataa

SEQ ID NO: 8695 - DNA, 1208 bp, Artificial sequence
  DNA replication origin
gcatctgtttaacaaagcacatcttgcacggcccttaatccatttaaccctgagtggacacagcacatgtttcagagagcagggggttgggggtaaggttatagattaacagcatcccaaggcagaagaatttttcttagtacagaacaaaatggagtctcctatgtctacttctttctacacagacacagtaacaatctgatctctctttcttttccccacatttcccccttttctattggacaaaaccgccatcgtcatcatggcccattctcaatgagctgctgggtacacctcccagacagggtggcggcagggcagaggggctcctcacttcccatacgaggcggccgggcggaggtgccccccacctcccggaccgggcggctggccgggcgggggctgccccccacctccctcccagagggggtggctgccaggcggagacgctcctcacttcccagacggggcggctgccgggcggaggggctcctcacttctcagacggggcggccaggcagagatgctcctcacctcccagacggggtggcggtcgggcagagacactcctcagatcccagacggggtcgcagccaggcagagacgctcctcacttcccagacggggtggcggccgggcagaggctgcaatcttggcactttgggaggccaaggcaggcggctgggaggtggaggttgtagcgagccgagatcacgccactgcactccagcctgggcaagattgagcactgagtgagtgagactctgtctgcaatccaggcacctcgggaggcccaggcaggcagatcactcgcggtcaggagctggagaccagcccggccaacacggtgaaaccccatctccaccaaaaaatacaaaaaccagtcaggcgtggcagcgcgcgcctgcaatcgcaggcactcagcaggctgaggcaggagaatcaggcagggaggttgcagtgagctgagatggcggcagtacagtccagcctccgctcggcatcagagggagaccgtggaaagtgggagacggagacgaggaagaggggagaggggagagggagggcaagggcaagagccagggacacaattttctaacgtgtgcatgttttcctttatctcccactaactaaagatgaggatttgccagcacagtccttacctatttggtgacataaaatagagtttgtagatacaatccctacca

SEQ ID NO: 8696 - DNA, 1060 bp, Artificial sequence
  DNA replication origin
ggccggccaggcggaggcgcccccccacctccctctcggacggggcggctggccgggcgggggctgaccccccaccttcctcccggacggggcggctgtcgggcggaggggctcctcacttctcagacggggtggctgccaggcagaggggctcctcacttctcagacagggcagctgccaggcggaggggctcctcacttctcagatggggcggctgccgggcggaggggctcctcacttctcagagggggcggctgccgggtggaggggctcctcacttctcagatggggcggctgccaggcggaggggctcctcacatcccagacggggtcgcggccgggcagaggcgctccccacatctcagacgatgggcagccgggcagagacgctcctcacttcctagatgggatggcggccgggaagaggctctcctcacttcccagactgggcagccgggcagaggggctcctggcatcccagacaatgggcggccaggcagagagggtcctcacttcccagacggggtggcggccggggcagaggctgcaatctcggcactttgggaggccaaggcaggcggctgggaggtggaggttgtagctagccgagatcacgccactgcactccagcctgggcaacattgagcactgagtgaaggagactccgtctgcaatcccggcgcctcggggggccgaggctggcagatcactcgcggttaggagctggagaccagcccagccaacacagcgaaaccccgtctccaccaaaaaaatacgaaaaccagtcaggcgtggtggtgcgcgcctgcaatcgcaggcactcggcaggctgaggcaggagaaccaggcagggaggttgcagtaagcagagatggcagcagcagagtccagcctcggctcggcatcagagggagacggtggaaagagagggagagggagaccgtggaaagagagggagagggagaccgtggaaagagagggagagggagaccgtggaaagagagggagagggagaccatggggagagggagagggagagggagagggatctagtaggtt

SEQ ID NO: 8697 - DNA, 860 bp, Artificial sequence
  DNA replication origin
ccatcgtctgagatgtggggagcgcctctgcccggccgcgaccccgtctgggatgtgaggagcccctccgcctggcagccgccccatctgagaagtgaggagcccctccacccggcagccgccccctctgagaagtgaggagcccctccgcccggcagccgccccatctgagaagtgaggagcccctccgcctggcagctgccctgtctgagaagtgaggagcccctctgcctggcagccaccccgtctgagaagtgaggagcccctccgcccgacagccgccccgtccgggaggaaggtggggggtcagcccccgcccggccagccgccccgtccgagagggaggtgggggggcgcctccgcctggccggccgacccgtccgggaggtggggggcacctctgcccggccgccccttctgggaagtgaggagcccctctgcccggccaccaccccatctgggcagtgtacccaacagctcattgagaacgggccatgatgaagatggcggttttgtggaatagaaaagggggaaaggtggggaaaagatagagaaatcaggttgttgctgtgtctgtgtagaaagaagtagacatgggagacttcactttgttctgtactaagaaaaattcttctgccttgggattccgttgatctatgaccttacccccaaccatgcactctctgaaacatgtgctgtgtccactcagggttaaatggattaagggcggtgcaagatgtgctttgttaaacagatgcttgaaggcagcatgctcgttaagagtcatcagcactccctaatctcaagtaaccagggacacaaacactgcggaaggccacagggtcctctgcctaggaaaa

SEQ ID NO: 8698 - DNA, 1045 bp, Artificial sequence
  DNA replication origin
tctcgacggtggcctccagaggccccatcttgatagtcctggtgggggtcctatttggggactgcctctatgctagtaggctgggcaggggcctggtgatgaatggtatcaacatgtgcctgagctagggtccacttacagtctcagtcttctatggtgtggatggaagagaggattatgtagaggtcatgccaggttagttcataagacttggtaaggtactgaaattccctaatttaaaaggtaaggtcttctggaaatgaaccgagtcttttgttaatttgagagagatcagtgagggagaaggaaacatgactgctaacaataccttcagctcctgctacttcccaaaggggacattctggcactggccctgaagtaagggtgggtcatggggccaaagatggcacctgagcgagtatgggtgggagagaaggagaaacctggaagtggttcctgctgcaggtttgaagggggaagtgggttgagttaacaggcagtggagaatacataggggtgtaaggtggcaggatgggtttacaagcctcaggagagggcagtgtgggaggagaatgggtacaggcaatactagaattgtcctgaggaggggacagtgtaggaaaagaagtggatacagttgactgggaagatggcagctgagaagatggtggctgggaaaatggcagctgggaaggtggcggctgagaagatggtatctgggaagatggtggctgatacgataaagaggaggctttggggggttaaagaagatggttgagagggagaggtaagtgctgggaggggtgggcaacagtctgctggatctaacgaggaaaaggaggtagggtccggaggagaaagagaggagaaaggatcagggcagtaagaatggaggagaagaatttgaacaggtgagcaagaattgcagaggtcaggttgtgatctgagtgcaaaaaggcctcgacataaggaatttctccccatttcttcagtcttcggcaataattgcttaaatcagttaaaattgtaaagtcgaatgttccat

SEQ ID NO: 8699 - DNA, 1289 bp, Artificial sequence
  DNA replication origin
cggctggccgggtgggggggctgaaccccccacctccctcccggacggggcggctggccgggcggggggctgacccccccacctccctcctggatggggcggctggccgggcagaggggctcctcacttcccagtaggggcggccgggcagaggcgcccctcacctcctggacggggcggctagctgggcggggggctgacccccccacctccctcccggacggggcagctggccgggcagaggggctcctcacttcccagtaggggcggccgggcagaggcgcccctcacttcccggacggggcggctggccgggcggggggctgaccccccccacctccctcccggacggggaggctggccgggcagaggggctcctcacttcccagtaggggcggccgggcagaggcgcccctcacctcctggaccgggcggctagccgggcggggggctgaccccccacctccctgccggacgaggtggctgccgggcagagacgcccctcacttcccagacggggtggctgctgggcggaggggctcctcacttctcagacggggcggttgctgggcggaggggctcctcacttctcagacggggcggttgccaggcagagggtctcctcacttctcagacggggcggctgggcagagacgctcctcacatcccggacggggcggcagggcagaggtgctccccacatctcagacgatgggcggctgggcagagacgctcctcacttcccagatgggatggcggccgggaagaggcgctcctcacttcctagatgggatggcggccgggcagagatgctcctcactttccagactgggcagccaggaagaggggctcctcacatcccagacgatgggcggccgggcagagacgctcctcacttcccagacggggtggcggccgggcagaggctgcaatctcggcactttgggaggccaaggcaggctgctgggaggtgaaggttgtagcgagccgagatcacgccactgcactccagcctgggcaccattgagcacggaatgaatgagactccgtctgcaatcccggcacctcaggatgccgaggctggtggatcacttgcggttaggagctggagatcagcccagccaacacagcgaaaccccgtctccaccaaaaaaataggaaaaccagtcaggcgcgcgcctgcaatcgcaggcagtcggcaggctgaggcaggagaatcaggcagcagtaccgtccagcttcagctcggcatcagagggagaccgtggagagagggagagggagaccgt

SEQ ID NO: 8700 - DNA, 965 bp, Artificial sequence
  DNA replication origin
aggggcgcctctgcccggccgcccctactgggaagtgaggagcccctctgcccggccagcctccccgtccgggagggaggtggggggggtcagccccccgcccggccagccgccccgtccgggaagtgaggggcgcctctgcccggccgcccctactgggaagtgaggagcccctctgcccggccagctgccccgtccgggagggaggtgggggggtcagccccccgcccagctagccgccccgtccaggaggtgaggggcgcctctgcccggccgcccctactgggaagtgaggagcccctctgcccggccagccgccccatccaggagggaggtgggggggtcagccccccgcccggccagccgccccgtccgggagggaggtggggggttcagcccccccacccggccagccgccccatcagggaggtgaggggcgcctctgcccggccgcccctactgggaagtgaggagcccctctgcccggccaccaccccgtctgggaggtgtacccaacagctcattgagaacgggccatgatgacaatggcggttttgtggaatggaaaggggggaagggtggggaaaagactgagaaatcggatggttgccgtgtctgtgtagaaagaggtagacgtgggagacttttcattttgttctgtactaagaaaaattcttctgccttgggatcctgttgatctgtgaccttacccccaaccctgtgctatctgaaacatgtgctgtatccactcagggttgaatggattaagggcggtgcaagatgtgctttgttaaacagatgcttgaaggcagcatgctcgttaagagtcatcaccactccctaatctcaagtacccagggacacaaacactgcggaaggccacagggtcctctgcctaggaaaaccagagacctttgttcacttgtttatctgctgaccttccctccactattgtcctgtgaccc

SEQ ID NO: 8701 - DNA, 1986 bp, Artificial sequence
  DNA replication origin
acccaggcgcccgacgccgcccgggtctgcgccgctgctagtgccaggcgggcgacggtcagttaccagggatcgagggatcgaggcaggggagtgtgtgtgtgtgggggggggggaggggggggagggggggccctgccttcccgggaacctccttagccctcctacccggcctgactcctcctcctccaggcgcggggctcgtgcccgccaccgccggcgcgcaccgcgcctccgcccgcgtccccccaatttccccccccggccccagctcctgtcatcgttttccccctcctcctcttcctcctcctcctcttcctcctcctccgcccatcaccgccactacgaacgccttcgcctccttctacacctcgcgccgccgccgcggctcctagcgctcctctccggcttccaccagcccatcgctccacgctctcttggctgctgcagtctcggtctctctctctctctctctctctctctctctctctctctctctctctctctctctctctcccaagtttcctatctcgtcaagatcagggcaaaaggaagaaaacaccgaattctgcttgccgtttcaggtagggtcgcacacgttggtcccgatagagacactttcctgtttgtctttgcctcgcgtgcatgcctcatctccccccaccccactttcagaggctccctggaaacggaggaggctcaattcccgcacctccctcctccccagcgcacttaaaaaataatttcgatacttatcaccagaagcatatttgcaactacaataaaatccaggacacctgctcggcagcacgttagcctggctcttttatagtcttcaactttgctcactgtgattaccgctgcctgcctggctggtgtttgctgccggagcctcacgcgccttctcttattgtgatcctcggctccagagcagctgtcaaacgcgtcgtttcgcagcacttgatcggaacccggctgcctctaagacttggtcttgggcaaccgtgggtgggcaggaagggaaattatttattttattttgttaaggggagtgaagaaaagaagacgtgaggaccgcagttcactgtaatgtagagtaattgcaaaagtgggctgcctgcccctagcttttcccgctgtggttgcggaggtggtcttggttgagggggttgtggcgtgaagtacccatctctcctctcctctcctttcctcccctcccctccaacccattccctttccagctgctatgccagtttaaagtccagggtgttattattacgtgtgcgcaaaacagtgtttgctgacgatgaggctgggggacgttcctggcagagagaagtctgattacttggtcatcttgctgttaaagaaagaaagaaagaaaaaaagaaagaaagaaacagaaaggaaaagggtgggggtgggggtccataaaaaagaaatcgtctctcaatcatcaagtcctacacagagtccaggaagtaatctccatagctttaacacgaatccctaactaaaaggatattctttggggttacttggatagtgaaactgaaggcaattttaagtgtattttgtttttcattccatggctttgtaaagagcggcggtgatgaagacaaaattgaacatctacaacatgcagttcctgctttttgttttcttggtgtgggaccctgccaggtgagatatttattgtatttgactattttaattcagggcaaagatgtgtttcttgtaggccattaatgcttttgaaaatcaagggtgttttaaagaattatttctcagaaaagggggtgtatggggaaagtgaactatgaagtaatagactgtaaaaacttcactgcttctcgttcttagtgataagatccaaaagcaaacagaaacactttccatgcagaacattcacagaagaaaagaaaatcctttcaatggcatattcctacaaggaattgaagtgattaattataggcacttataata

SEQ ID NO: 8702 - DNA, 1065 bp, Artificial sequence
  DNA replication origin
ggaggcgaaggcgttcgtagtggcggtgatgggcggaggaggaggaagaggaggaggaggaagaggaggagggggaaaacgatgacaggagctggggccggggggggaaattggggggacgcgggcggaggcgcggtgcgcgccggcggtggcgggcacgagccccgcgcctggaggaggaggagtcaggccgggtaggagggctaaggaggttcccgggaaggcagggccccccctcccccccctcccccccccccacacacacacactcccctgcctcgatccctcgatccctggtaactgaccgtcgcccgcctggcactagcagcggcgcagacccgggcggcgtcgggcgcctgggtgcgctcggagcgccgctcccctcgcccacacctcgccggaggagcggagcccacgcgcagcctcgggctgctccccgaggccgcttgctggggctcccgagaggccccaaggttcctgacagagctgctgttgggtgttggtgtaaagccgggaatgtagtgtggcggtgatgccctagatccctggggccgcgccctgccgcccgtcccccaacatcaccctactgtggagcgacgtggctgctaagaggtaaagaggttccgctcctgctggagggcaaggggactaatcacgcctttacttagtcatcaacgcatccacgcaggaccaagttcaaagcatgttgcgtgaaatcagacagcaggaagtttatttgattccttaaccctcctgatataccattcattccttcacactcccgcaataaagaccgatttcccctgaaagctctgagagctggagaattcccttgagccagtcagtaaagtccatttgcagattacacacacaccttgggaaacctcccgctcacttccagcaatccttttccaacctcttttcacaggcgccctccctagcaggtgatcaaactcaatcaacagctccaaaaagtttacattacccaggagcaaaaacggacctgctgtgtttctactacctctgcaactcattccccagtgggaggaaaggtaacaacgtttg

SEQ ID NO: 8703 - DNA, 966 bp, Artificial sequence
  DNA replication origin
gagatcaaaggacctgggccaaacctatgaatgggaccctagcaagtcatttgtcctcgttgaactggactgagaagctgtttgaggttaagaattgtatcttaatatttctgtggacctagtacctagcgcaaagcttgccacatagatttccattatatatgcaaaggaaatatgaatatgaaaaacagcaacagtgctgttaatggatgtacctctattaagtcctttatacttattttgttgaagaaagcaagctggaacatctctaactttaaagtcttaggaggaaagcaaatgacacatcaccaaaaaagaaagggaaaaaagaaaagcatcctgctgtagaagagaaaaggaaaggactgggttctctagcagagcaggcagcttcatgccccagatttatgtcccaggtagaacattggccaaggttttggcataggcatggacacgtgggaggatgagggacttcggttcagctgcctccaatgcaacctgctctgagcgaagtggccaggttcagggaaactattctcagcgaagagcgtccaggcagctgagcccagagttcccatttttgactcttcctctccaacctcccccacccagcagtcaggtcccgggaggtaattagtgtgggggagaggcaaagcttctgagggggcagggagatgggaaagtacgggtggaggcggtcttcttgtcataggtctcaccaagagaggagagatagaaagagagagagatttatttttgcacgtgaggcatacctaatgatattcccacagacagacagacaggaagaccaagagagggacagacaggacacacttgcgcgtttgaaatcgttcatacccccaaatccaggacgcagcctgttgtcataaccatcgagcaaactgtccaggatgcgggtgaaattttctgtgcacaatttctcctccttttggttctgtcctgggg

SEQ ID NO: 8704 - DNA, 1040 bp, Artificial sequence
  DNA replication origin
accgctaccacccgacgcccagcagtccccgtcacccgccctttctccacctccaaccttgactctgggtacaaacaggtcctcgcacaacctgatgacagaggagcttcattggttagatccaaatcccagcggaagggagggggccaggaggtaggaggacgaacactgctgtgggcggggagcccacttggggtcgggggctgcgaagccggaggaggggcgagagaccccgttcctcatccccggagttacagtcggaacaaacttgccgagtcttgcagcgcaagcgcgcggatacgaaccccagaaccttcagcgcgcgggcacgaaagggtgtggagcggtatacatagctctacatacacattgagcgctgagcgagaaaggagggggcgaggaaggcaggttccgcctcccctggccccgtgcacacacacgcccaccgcggctcgggctggctgagcgcgggcgagtgtgagcgcgagtgtgcgcacgccgcgggagcctctctgccctctcctcgcaccctgctcagggcatctgaagagcctggaaacgtgaacaggcttgaagtatggcatgttgcaaagatggtttctgccaagaaggtacccgcgatcgctctgtccgccggggtcagtttcgccctcctgcgcttcctgtgcctggcggtttggtgagttctctggggtgcgaggaggtgggcaacggaaagtggagaaatggctagctccgggacccctttggccactcgctcctccctgggtggactaggtcttcttatctcagctgtaagagcaggggccgaagccaggcttttctgtgaccgcatagatgcggagagcaccaagggcgcaggatccaagaggcgtgtgggcactgggggtcttgcggcggggcgcgcttttcctgaccatttctgtcttctgcatcccaacccccaacctcctctcctttagcttggggcaagcgactctttccctagaaaacaaacctgtttgcacctgttctctgatggattcttaaaataatctcct

SEQ ID NO: 8705 - DNA, 1139 bp, Artificial sequence
  DNA replication origin
atccccaggcaccaactgggggccggggaaccaagcgcgagcccgggctgtggagggaccgacacccaggcgctcgcagctggggaagggggcttacgtctggggcaggcaagactgctgcacagtccctccagccacccggcgcccgagacgccggcgcagacaggaagctgtagatccccgaggggctggctccgacagctccacctgcagcctcccctgccgccagtgtgcagccaagtccactagatgcttggagggcaccgtgcggaggagggactctgcaggaaaggtggcatcacccccggcatggagaccggggtctccggatcgagccgactcgaacactgaaggaaaccctgcccatgaccctgggagggtctcggacgccgggcgaccggggtggtggtcgggaccagggccgtgcgcctgggaactgggtgcagggcgctgagcgcggaactgtcagagcgggagctcaccggcggctggggaaggaggtggcatcgggcggaggagaggacgggggcgggaggggctgaccctgaattcaccgggactaagaggccatcacacctggctgcggtaggacagcgaatcatcgatcttaccggctttggggacccggctctgcggcagcgctcttccggagcgagggcaggagactgtttcatggataaaaagtctcgcttattcttctgtccacttttatcttggtcgcttttctctcctctacgtgtcccccggggaggcactacggatgattttctccaagctcaagagagacaaactgaactttaagcgccaggggccccatattttgtctgctctacagatcccacccgcgggccacaccctcccttcactcccgtctctgggtcccacccataataacccgtaatgacagatcctccgtgtccccacctctttgcattcaaagaagttattcttcaggggcatatggaaagtcagtttctgctggtctccctcaaaaacttacactccacgagggcagcagaaaaggacaggacgattaagtttaagttgtggaagactggttgggagcaaaagagttacttttctccaaatttgccatatcacatcgaaagcattttcttttaaccagagtgtagccaatc

SEQ ID NO: 8706 - DNA, 1235 bp, Artificial sequence
  DNA replication origin
atagattaacagcatcccaaggcagaagaatttttcttagtacagaacaaaatggagtctcccaggtctacttctttctacacagacacagtaacaatctgatctctctttcttttccccacatttcccccttttctattcgacaaaaacgccattgtcatcatggcccgttctcaatgagctgttgggtacacctcccagatggggtggcggccacgcagaggggctcctcacttcccagacggggcggccgggcagaggcgccccccacctcccagacggggcagtgggtgggcggaggcgccccccaacctccctcccagatggggcggctggcagggcgggggctgaccccccacctccctcccggacggggcggctgaccgggcgggggctgccccccacctcctggacggggcggctgccgggcggaggggctcctcacttcgcagacggggaggctgccaggcgcaggggctcctcacttcccagacggggcggctgctgggcagaggggctcctcacttctcagacggggcggccgggcggagacgctcctcacctcccagacagggtggcggtccggcagagacactcctcagttcccagacggggtcggccaggcagaggcgctcctcacatcccagacggggcggcggggcagaggcgctccccacatctcagacgatgggcggccaggcagagacactcctcacttcctagacgggatggcggccgggaagaggcgctcctcacttcccagactgggcggctggtcagaggggctcctcacatcccagacgatgggtggccaggcagagacgctcctcacttcccagacggggtggcggccaggcagaggctgcaatctcggcactttgggaggccaaggcaggcggctgggaggtggaggttgtaacgagccgagatcacgccactgcactccagcctgggcaacgttgagcacctagtgagcgagactccgtctgcaatcccggcacctcgggaggccgaggcaggcagatcactcacggtcaggagctggagaccagcccggccaacatggcgaaaccctgtctccaccaaaaaatgcaaaaaccagtcaggtgtggcggcgcgcgcctgcaatcccaggcactccgcaggctgaggcaggagaatctggcagggaggttgcagtgagccgagatggcggcagtacagtccagcctcggctttcacaactttggtggcat

SEQ ID NO: 8707 - DNA, 1360 bp, Artificial sequence
  DNA replication origin
aaggtcaaagatcaacaggatcccaaggcagaagaatttttcttagtacagaacaaaatggcgtctcccatgtctacttcttactacacagacatagcaacaatctgatttctctatcttttccccacatttccccctttactattcgacaagaccgtcatcgtcatcatggcccgttctcaatgagctgttgggtacacctaccagacggggtggcagccgggcagaggggctcctcacttcccagaaggggcggcagggcagaggcgccccccacctccctcctggacggagcggctggccgggcgggggctgcccccctacctccctcccggacggggcggctggcggggcgggggctgcccccccacctccctcccggtcgggtcggctggccgggcgggggctgccccccgcctccctcccagacagggcggctgccggatggagacgttcctcacttcccagacggggcagctgctgggcagaggggctcctcacttctcagacggggcggctgccgggcggaggggctcctcacttctcagatggggcggctgtcgggcagaggggctcctcacttcagacggggcggccgggcagagacgctcctcacctcccagatggggtctcggccgggcagaggcgctcctcacatcccagatggggcggcggggcagaggcactccccacatctcagacgattggcggccaggcagagatgatcctcacttcctagacatgatggccaggaagaggcactcctcacttcccaggctgggcagccgggcagaggggctcctcacatcccagacgatgggcggccaggcagagacgctcacttcccagaccgggtggcggccgggcagaggctacaatctcggcactttgggaggccaaggcaggcggctgggaggtggaggttgtagctagccgagatcaagccactgcactccagcctgggcaacattgagcactgagtgaacgagactccatctgcaatcccggcaccttgggaggccgaggctggcagatcactcgtggttaggagctggagaccagcccggccaacacagcgaaaccccgtttccaccaaaaaaaatatacgaaaaccagtcaggcgtggcggcgcgcgcctgcaatcacaggcactgggcaggctgaggcaggagaatcaggcagggaggttgcagtgagccgagatggcagcagtacagtccagtttcggctcggcatcagagggagactgtggaaagagagggagagggagactgtggggagagcaagagggagaccgtggggagagcaagagggagagggagagggagagggcatgtgtgtctttaattcctctagcgcc

SEQ ID NO: 8708 - DNA, 845 bp, Artificial sequence
  DNA replication origin
ccccgccgccccatctgggatgtgaggagcgcctctgcccggccgagaccccatctgggaggtgaggagcgtctctgcccggccgccccgtctgaagtgaggagcccctctgcccgacagccgccccatctgagaagtgaggagcccctccgcccggcagccgccccgtctgagaagtgaggagcccctctgcccagcagctgccccgtctgggaagtgaggaacgtctccatccggcagccgccctgtctgggagggaggcggggggcagcccccgcccggccagccgacccgaccgggagggaggtgggggggcagcccccgccccgccagccgccccgtccgggagggaggtaggggggcagcccccgcccggccagccgctccgtccaggagggaggtggggggcgcctctgccctgccgccccttctgggaagtgaggagcccctctgcccggctgccaccccgtctggtaggtgtacccaacagctcattgagaacgggccatgatgacgatgacggtcttgtcgaatagtaaagggggaaatgtggggaaaagatagagaaatcagattgttgctatgtctgtgtagtaagaagtagacatgggagacgccattttgttctgtactaagaaaaattcttctgccttgggatcctgttgatctttgaccttacccccaaccctgtgctctctgaaacatgtgctgtgtccactcagggttaaatggattaagggcggtgcaagatgtgctttgttaaacagatgcttgaaggcagcatgctcgttaagagtcatcaccactccctaatctcaagtacccagggacacaaacactgcgga

SEQ ID NO: 8709 - DNA, 1245 bp, Artificial sequence
  DNA replication origin
gcggcggaggcggcggcggcggcggggccgggatggaggacgttaactccaacgtgaacgcggaccaggaggtgcggaagctgcaggagctggtgaagaagctggagaagcagaacgaacagctgaggagccgctcgggggccgtgcagggcgccggctcccttgggcccggcagcccggttcgggccggcgcgtccattccctcctccggcgcggcgtctcctcggggcttccccttgggcctcagcgccaagtcgggcggcgggcccgggtcgggcccgaggcggacgagtagcgaagagctgcgggacgccacctccttgctagcggcgggcgagggcggcttgctggacgaggtggagccgctgcggcccgacgagctggagcgcctgtcaggctgggaggaggaggaggagagctggtgagcgcgaggcgccgggcaggagctgggcggggacgggcccgggggcggagagcgtcctctgagggtccctctggtcgggcgcctcgctttgtgtagccgggtccgctctcctgtggcgacttgtggttttcttgctttggcagagggaacgtcagctggagttgggggttcgaggcgtgcgcaagtaacagggttgtagctcgttgtcctttggattgtggaccttctgagtgctggaccctattggggtctgtgggttggggcagcttgagaagggctgttcgcctggggaggagtcggaggtgggaaactgctttgtaggcagggatcctgctttgtgtaagatactggctttcggatggtggccctgggcattctggatgtaggagaggggtctgcttgatgaggtatcaccaggtgtgggggtcaggggcagaccagagtcgtctacgtctatgcagcggttggtgtttgggacccatttctggcggggatggggagaccgtatgaatcagcactcccctttgggtagtggggtaaaccttgctttgtgtgaagagagggcagaggatggtgctgcttttttttttttttttttttttttgttactctgtgtgaagagtcaagggtggaacgagccctggctcttattttctaaaacaagaattgagtctggcgttttgcagagctctgaattgacagttatcacatccatctttcatttccacgtccttctaggggcagagaaaaagagtcctatttaaaaatttaaaccaaagctatattgtcataagccacttcttgatgaaattgtggccccc

SEQ ID NO: 8710 - DNA, 936 bp, Artificial sequence
  DNA replication origin
gtggggggggtcagccccccgcctggccagccgccccgtctgggaggtgaggggcgcctctgcccggccgcccctactgggaagtgaggagcccctctgcccggccagccgccccgtccgggagggaggtgggggggtcagccccccgcccggccagccgccctgtccgggagggaggtggggggttcagccctccgcccggccagccgccccgtctgggaggtgaggggcgcctctgcccggccgcccctactgggaagtgaggagcccctctgtccggccagccgccccgtccgggaggtaggtgggggtgtcagccccccgcccggccagccgccccgtccgggagggaggtgggggggggtcagcccccccgcccggccagccgccccgtccgggaggtgaggggcgcctctgcccggccgcccctactgggaagtgaggagcccctctgcccggccaccaccccgtctgggaggtgtgcccaacagctcattgagaacgggccaggatgacaatggcggctttgtggaatagaaaggcgggaaaggtggggaaaagattgagaaatcggatggttgccgtgtctgtgtagaaagaagtagacatgggagacttttcattttattctgcactaagaaaaattcctctgccttgggatcctgttgatctgtgaccttacccccaaccctgtgctctctgaaacatgtgctgtgtccactcagggttaaatggattaagggcggtgcaagatgtgctttgttaaacagatgcttgaaggcagcatgctcgttaagagtcatcaccaatccctaatctcaagtaatcagggacacaaacactgcggaaggccgcagggtcctctgcctaggaaaaccagagacctttgttcacttgtttatctgctgaccttccctccactattgtcccatgacc

SEQ ID NO: 8711 - DNA, 1337 bp, Artificial sequence
  DNA replication origin
cgcccctcacctcccagacggggcggctggccgggcggagggctgaaccccccacctccctcccggacagggcggctggccgggcggggggctgacccccccacctccctcccggacggggcggctggccgggcagaggggctcctcacttcccagtaggggcggccgggcagaggcgcccctcacctcccagacggggcggctggccaggcggggggctgaccccccccacctccctcccggacggggcggctggccgggtgggggggctgacccccgcatctccctcccggacggggtggctggccgggctgaggggctccttacttcccagtaggggcggccgggcagaggcgcccctcacctcccggacggcacggctggccaggcggggggctgacccccccacctccctcccggacggggcggctggccgggcagggggctgaccccccccacctccctcccggacggggtggctgctgggcggagacgctcctcacttcccagatggggtggctgccgggcggagaggctcctcacttctcagacggggcagctgccgggcggaggggctcctcacttctcagacggggtggttgccaggcagagggtctcctcacttctcagacggggcggccgggcagagacgctcctcacctcccagacggggtctcggccgggcagaggcgctcctcacatcccagatggggcggcggggcagaggcgctccccacatctcagacgatgggcggcggggcagagacgctcctcacttcctagatgtgatggcggctgggaagaggcgctcctcacttcctagatgggatggcggccgggtggagacgctcctcactttccagactgggcagccaggcagaggggctcctcacatcccagacgatgggcggccaggcagagacactcctcacttcccagacggggtggcggccgggcagaggctgcaatctcggcactttgggaggccaaggcaggcggctgggaggtgtaggttgtagcgagccgagatcacgccactgcactccagcctgggcaccattgagcactgagtgaacgagactccgtctgcaatcccggcacctcgggaggccgaggttggcggatcactcgcggttaggggctggagatcggcccggccaacacagcgaaaccctgtctccaccaaaaccagtcaggcgtggcggcgcgtgcctgcaatcgcaggcactccgcaggctgaggcaggagaatcaggcagggaggttgcagtgtgccgagatggcagcagtacagtccagcttcggctccgcatgagagggagaccgtggggagacgga

SEQ ID NO: 8712 - DNA, 1524 bp, Artificial sequence
  DNA replication origin
ggtcgtgggctccggggtcggagtggggccggggctgaagccgaagctcggacccggcccgaggctgagcccagggccggggccggcgctggaggcaggggcgagggcgaggtccgtgccggggcccaggctgctggcattgggcgccagggtgtagttgtcccgcagcagaggggcgaagagcagggtcacgttgtcgttgccgtccatggcgcggccggagctgcggattccggtcccctcccgccgcgtgcctctcgccgtcccgcggtcgccgcagtcgccgcccgtcgttctgcccgtcggtctccgagccccggctgcgcgccgctgacgtgctcggcggcgtcgggggcggcgggccggtctccgctcccaggtctgcagccgcccgcagcctggcactccgcgcagcgcggccccccgggtgaacccaatcgctgcgccggctccgcgccgcggccccgcgccccgcaggccccgccccgccctgccgcccggtcccctcctgtgaatcgccagtaagtggttctgttatcgagtgtagccaggggcggaacaaagacctgacaaaggaccagagcaggaaaaaaccgttcctggctgccgatcaagttctctgatgggctctgcctctttataatgaaatctggagacccagacacacaaagtggagggggcgggtggataacctcatcgatgcacgctcatggcagaaactgttcctatagcctgcagccctaagaggggtgcttgacttaatatgagcgattctctagtaagcaggacacgatatctggcttgaatttgcaaacaattttttgcatgattttcagtcttaaagtagaatgtaataataatatagcgggttttgtgcaagtgcgtgtgcattatttcattcgattcttacagcaaagccgtgagatagataccatttttacaagctcgatttttacaaacgaggaaactgaggaacgaggaattctcagtcttatcaaccgaacccacaagtacctggctgaatctgcacggcgatgtgtccctaaagagggcagagaagagcttggctaataacaatttccatgaaaaatgtgtgtttaagaagttattggcaggtggagagaggatatttcagtggccacagatttacgaagctttatgagtaaggccctggcattaggattaaaggactgaaaagaaataaagtgctgagattccctgcttgagacaggtttatcccaaaacaattcaaaagcagagctcttaggaatggagatgcaacaacttttaagtcagtcactagatggcatgtagaaaggaaaataatttcgctgcttaccaaccaggtggggcctgttaaggaggcatctagctccctgggggtgaccataaagtgatagtcagttgagttgtaaaaaccaacaggaatttctagaatgaaatcaaggctcagtcttagcccagggttgctttcacaaggagccaagatatagtgaattcttctatctgggaacttttccctaa

SEQ ID NO: 8713 - DNA, 816 bp, Artificial sequence
  DNA replication origin
acaacgtgaccctgctcttcgcccctctgctgcgggacaactacaccctggcgcccaatgccagcagcctgggccccggcacggacctcgccctcgcccctgcctccagcgccggccccggccctgggctcagcctcgggccgggtccgagcttcggcttcagccccggccccactccgaccccggagcccacgaccagcggcctcgcgggcggcgcggcgagccacggcccttccccgttccctcggccctgggcgccccacgcgctcccgttctgggacacgccgctgaaccacgggctgaacgtgttcgtgggcgccgccctgtgcatcaccatgctgggcctgggctgcacggtggacgtgaaccacttcggggcgcacgtccgtcggcccgtgggcgcgctgctggcagcgctctgccagttcggcctcctgccgctgctggccttcctgctggccctcgccttcaagctggacgaggtggccgccgtggcggtgctcctgtgtggctgctgtcccggcggcaatctctccaatcttatgtccctgctggttgacggcgacatgaacctcaggtacggatctgtctattccttgggcatctgtctcatcccagacgcgcgtttacggccgtgggctcacgacgaaggacagaggcagtggaggggttggaattaggcgtggaggaaggaggagaaaaggagaggaagttgatgacgccccggctttagaagtcaaggccgacctgcaggttgtgctgctaggggagcaagctagacggcgagggagctgctccaaggctgggattccatgc

SEQ ID NO: 8714 - DNA, 1091 bp, Artificial sequence
  DNA replication origin
gtcggcccgtgggcgcgctgctggcagcgctctgccagttcggcctcctgccgctgctggccttcctgctggccctcgccttcaagctggacgaggtggccgccgtggcggtgctcctgtgtggctgctgtcccggcggcaatctctccaatcttatgtccctgctggttgacggcgacatgaacctcaggtacggatctgtctattccttgggcatctgtctcatcccagacgcgcgtttacggccgtgggctcacgacgaaggacagaggcagtggaggggttggaattaggcgtggaggaaggaggagaaaaggagaggaagttgatgacgccccggctttagaagtcaaggccgacctgcaggttgtgctgctaggggagcaagctagacggcgagggagctgctccaaggctgggattccatgcgcagcgcggcccttcagcagggtccctcgccgtcctccccgagcgtcggggtggcagcgcaggtcgttgtccagtggaagacaaagagaagggggagtctgaactagaactcgccggcaacgtaaaagtaaaatagggctactggcccgtcagagaaagtaatctcacatagagtgcaggattgttgagtccgaccaacaagtagcagtcagcagctttaccatggcttaccttgcagggggcttgcaaggaagaacgttccttcccctcagaatcatccaggctcaatagactttataatgtcgagggcagcagtaccgagacagggggcttgtttttcctccctgccttgggttcataattccatcggtgttagacgtgctgctctcttggcactctcctcggatgtaggttctgcccagacttcaaccccgggacttgcagtctccccgttccacctctactcaacatacaagaaaaaggttagctggctgtttgactcaaagctcgttctgatttctgcacattcccttttctgcagcatcatcatgaccatctcctccacgcttctggccctcgtcttgatgcccctgtgcctgtggatctacagctgggcttggatcaacacccctatcgtgcagttactacccctagggaccgtg

SEQ ID NO: 8715 - DNA, 1043 bp, Artificial sequence
  DNA replication origin
gcagcgtgcgcctccccagcgagcactgtaccgcggcgtcgatgcgcgggctcacctgcaccgccacgtcgcagctgccggccctgcgggcgcgcggcccgagacccggccccacctgcgccaggagagccatgagccgctcccgctggtagctgtcgaagtactcggcggccgtcagccgcccgcagcccgggaaggacaacgaggccgcgcccgccgagcagggggaggaggcgggaaggcagcccctgccgcgctgctgccagctgccgcccgccgcgcccttgcccttggtggccgcggggtatgggtaccggtacgagcagggggggcacgccgggaacacgtaaccgtccagcacctcgtcccccagggccgccatgggcgcactgctcccgcccgccgccgcaccctaaataggcgacttgcccgggcggccgagcggaggcggggatggccctcggcgggggctcgcacgctgcaccgccctccacgcccttcctgccaccggcccgcgtccccgccgagggggcccctcttcgtccttctccctacagaaactctccacgcccggatgttggcacaatgacccttagatgatctggaaagagggctttctttgtgatgaaagggctgatccgtaagggaaccaaggcgcccgaggtgaggaggatttcaatgagagaaactcatcaccggcatcagctgagccggcttctcccggtgccctgattgttccaggtgcctgcgcatcccccccacccccgctccctcaccgggaagccgaggccaggccgggtgcctctggctaagtgagcgaaagtgccaaggtttgggaactgttctgggtctattacccgttaactcagatgataagtttattctcagagctgctctaagaggctacccactgagccccctcggcgagtgcatggagaaccacccagggatcttcatctaggcgaattgttttctcccctggagcgtgtcccttcccccagtcccagtggtgaccgggaggtaccgttttgttctgctccaga

SEQ ID NO: 8716 - DNA, 1751 bp, Artificial sequence
  DNA replication origin
caccacgggtggcggctctttctcccagcagccatcccgtcgaggcctggagcagggcagcccccagaacggcgccccgcggcccatgcgcttcccgcgcaccgtcgccgtgtactcgcccctggccttgcgccgtctcaccgccttcctggaggggcccgggcccgcggcgggcgagcagaggtccggggcgtcggacggagagagggggccgccgcccgcgcggcttcaaggcccagaggagggggaggtgtggacgaagaaggcgccccggcggccgcagtccgacgacgacggcgaggcccaggccgcagtccgagcgagctgggagcagccggccgacggtcccgagctgccgccgcgagaggcccaggagggcgaggcggctccgcggtcggcgctaaggagcccggggcaacctccgtcggcggggagggcccgagacggcggcgacggacgggaggcggccgtcgcgggagaggggccgtcgccacggagcccggagctgggcaaggagcggctgcgcttccaggtaaagcctagggcggtcagggcacaggggagcccgggggtgcgggtgtcttccttgggcctggccctgtgactgcttcgggcactcggaggtgcggcgcttccctaagcgtgggctacttccgtatttccgagacagccaatgaccgcgataggtgtcttccttgacagcacagtctcatgtccccgacatccagacttactcgtggcggctgctccacgggctggccagggcgacgcccttgggacgttcttataacccacatatttgcactgtaaacctcgcgcagtgggcgcataggccagccctgaccgcacggttggattacctatcagtaggcacaactgaacttcggagcacttgccggctggagagtcgattcccaaggatccctctctcccatttccgcactggatgtggcaaaaacccttcaactgctgggattctggtcagcaattctgatttctcctttacgagcttccaggctattggaaagctggagctcctaaaatgccccttcctaggaatttgctttgcttttaagaagcacccccaactcagaaatccaatactgcgaaagcatttggactgctcagtgttgctgcccgagggcagcaggctgaaactttaaagggctggggcacgcagagggcagttgtgacctagcagaagtggaaaggcacaagaggtggtaagaagcccgagggagtccctcgcggtctcttccacggccaccacaggctggtattccttttgaggggcggggttggtggcggtaggctgattgtgcgaggagtgaatcgagaggccagggcttcccagcgtggctgtgcaggagctgtgtgtgatcttaggccagtcataaccttcctggacttagcgcagtctcacaggtgagcagactgaattaagtgctccccagagttccttccaattctgaaaggctaactctaaaaacgtgtgcataactgcttgcttactgggagggaagaagggaagtttaagtaacactacttttgttcatattgaatatgaattatggcttacgtacgatttaggttcctggcaccactgtttgggagttaactagcagcatgaagaatgtgatcttgggtgaacctttaaagttccttagatgtggagtcttatttttcttcagcttaatacatgtgtgcatagtctaagatcaggctttatcttaaaaggccttcctacagaa

SEQ ID NO: 8717 - DNA, 1202 bp, Artificial sequence
  DNA replication origin
agacggtaccctagtaacactaacacttaagatatggggctgggtgcggtggctcatgtctgtaatcctaagtattttgagaggctggggtgggaggatcccctgggccaggagttggagaccagactgggtaacagccagatcctctctctccaaaaaaaaaaaaaaaaaaaaaaagccaggtgtggtgccgcacacctgtagtcccagctactggggaggttgagggaagatgatggctttgtggggggaagggagggagagaggaagagggagggagggagggagggagagaggaagagggggagggggatagggggtgggggagagggagagagagagactctgtctcaaaaataaaaaacagaaaaaaagggacggaaggcaagaatctaccaaaagagacagaaaaggaatactcaacggtagaagaaaaagcaggaaatattaagtttttggaaattaagtgagatcagagcttaaagaaatataagatggctaacaccaattgctgtggaaagtagcaaacagactgaagactattagccagtgactagactgagcacttggaaggtacctggtgaggctacagaaaggaaattgatactagtggagtgtgaaggccatctgtgaagatctaaggcatgcaggaggactgagaatatggaatagtgagtgtatatactcgaggcaaggcacaggggtgaggaaggggttaggagcaggtgtgaaggagggaaaggatgtgaggagcaagaatgggaagggcctcagagctgacaacatttagagaccattgcattgaatctggagaaagaaaggatcagggccctcaaattttaaagtggcaaagtttatgctgatacctgtatctgtgcagtaaaattctgaatgaatattgtgtttgtcttgccttagaaacagtgaaagtgaaaatgtaggttagctatggaatttgtcaggttgagaggctgttttggtttagaatgaactatcttaagcaaaggagttaaaattagctgatgctaaggacaagagtgtctgaagagagaactgaaggaagaatgacaaggtggtgggggtgtgggcatggtggacacctgtaccagcacacatcctaggcgatgacatgacattctaaacagttacatgatctcttgagacccagctggactcctctactttctgtgcaaaagcctcta

SEQ ID NO: 8718 - DNA, 1086 bp, Artificial sequence
  DNA replication origin
gcgcgcgcccgggtacccctcgcgcgccgccttctcgcgcgtcctgctctggtcgcgcgccgcctcgccaccgactcgcgggagccgccccgcgggaaggaaggcggtggcagaggtggaggaagaccggcgaccacggctccgccgcctcggctgggaagggagggctgaggagcaaacttagcgcggcggctggcgggccccggcgggcagggctggcggggaccggcggagcgcgccagcccagccgggcattgtccgccttttcccttgctctggtctctccgcccactgctcgcggtcctggggaggggtgcgggcgctgtgcccgcgcagccccgggccgttggcgtaccccgggacccggagtcttccggagccggagccagccctgcggacaccgcggccaccgcccgcgagctgactcggcctgtagattgcctgctgctctcagcctcggcaccgggcagggtgcctgggcgctgagctcttctttgcaacttttatttgccgtttgatggaagttgttgcttccgggcggcaggttctttgggcacagcctggtttcctgcgttctggagaggctggtttctagggcgaaatgatttattgctgccggtctttcctgccatcctagtttagttcctcgccacctaaaatcgcatttttgtggatttgcaatgatatgggagcattaatctttcctaggccaagatttgaaaagaaaaaaaagggggtgggggttagggtgtgtgctggtgaggagcaagagttcttagtagagctgagtttgcccttacctttgaactgcggaaaatattacttcgattcactggctggggttcttttggaagggtaggggaaaaaagacacagcaagacaggttgccagggtctgtcggattgggggggaaaaagggttttgatggaagtaaagttggttttataaaatgctgtgctgcctaggagatatcgtctgtaaagttgattctgctactgaatttacagccattataattagtaccaacagcttttactattgataaaaactagtataagacgtcttttcatcttgagcattatcact

SEQ ID NO: 8719 - DNA, 1805 bp, Artificial sequence
  DNA replication origin
tttctggcaaatttcttctttttggcttggaatgcttacccaatgcctgtacaatcattgtaccttggaagtggttaacttgctttgtatttcagaggctcagggcagaaggtatggcagccttgtctcagaagagactttgggctttagacatttgagtaaacgctgggatgagttaagatttgggggactctagggaagtcatcattgcgttttgcaatgtgagaaagacatgaactttgggggaccagggacagaataatatgttttggctctgtgtctctaccaaaactcatatggaattttaatgggaaatgttaaaggtgggggctggtggaaggtgatttaatcatgatggagagtggaggtgggatggttggggggttggggagggtgggggtgattagggggtggggagggttggggtgattgtggtggggttgggggtgaaaggcaggggcggggggtgcatccttcacaaatggacatttgagtaaatgctggaatgagttcagacactgggggactgtagaggatgcatcattgtattttgcagtatgagaaggatgtgagattggggagccaaagggggaataatatgatttggctctgtgtccctaccaaaactcatgttgaattgtaatggggaatgttaaacgtggggcttggtagaagatgatttaatcatggtagagaatgggggttggaagggggatgtaggggaacggaggttcatggtgtgagtgaaggtgaaacatggggacgggtggcagatccttcacaaatggttaaatactatctccttaatgcagtctgtgtgatagtgagttctcatgataaatgaatgctgtcctgctgggttttggagtcggattgggcctgtgtcccaattgtgttatttttctgggaaaatcttccctttggtttgagaaagtttacccagtgcctgtgccatcgttttaacttgaaagaaaagaattgtattttacattcagggacttataggcagaagggattggtcttgttctggatgagacttgaacttactacatttgagttactgctggaatgagttaagactttttgaaacttttgaaaaggcatgtttgtatttttctgtgtgagaaagacatgagatgtgggggtgtcagggtcaggataatatggttcggctgtgtttctctacaaaaactcatggggaacagcattcctgactgttgtaggtgggacctggtgggaagtgatttaatcacaaacaggaggttggtaggggtgaaagggaaaataaatgggtagggtggggaggagtaggctggcagtagggtggtgagagcgtggtgggcagtaggaagggggagtagcctgctgcagaggcatatcctcatggaaaacctctaccagggctgtgcacctgtggtttgcagggtgtagccgccgtggctgccctcataggctgggctggtgttgagtgcctgtagcttttccatactgagagtgcaagctgttggtgggtctatgaatctggggtctgaggatggtaacctcatgcgtggggcctccaagcccatctattttttctgctctgccctagtagaggttttcctagtggctctgcctctgcctcagtcttctgcctggaaacagtgaggggtgtgggtggtagggggcagatctttcaccaatggttaagcaacatcttgatactgaccttgtgatagtgagttctcaggaaatctggttgtataacagggttatacaacgtgtggcacctttttcctctctgtgtttttttttctacttctgcc

SEQ ID NO: 8720 - DNA, 1024 bp, Artificial sequence
  DNA replication origin
cctatgagtcccttctgtgttttgtgcttctttctaggaattatttttttctgttgactgggaatgcttacccattgcctgtacaatccttgtaccttggaagtagtaaattttctttataattcagtgactcatgggcagaagggactgtaaacttgtctcagataagactctgggctttgggcctttgagtaaatgctggaatgagttaagatttgagagactctagggaaggcatcattgcattttgcaatgtgagaaagacatgaactttgggggaccagggacagaataatatgttttggctctctgtctctaccaaagctcatgtggaatattaatgggaaatgttaaaagtgggggctggtggaaggtgatttcatcatggtgaagagtggaggttggatggttggggggcggggagggttggggggattggggggcgaggagggttggaggggattgggggttgggagggttggaggggattgtggtggggttggggatgaaaggcaggggtgggggtggatccttcacaaatggttaaacaccatctccttaatgctgtccttctgatagtgagttctcttcatgattttggagctgtgagattgaatgaacactgacctactgtattttggatgtccactgggcctgtggtcccatttgtgttatttttcttggaaatttctttcctttggattgagaaagcttacccagtacctgtgccatcattgtaccttgaaagaaatgaacacccttttaacttcagggaatcataggcagaagaaactgtagcgttgtctcagatgagactttgaactttttacatttgagttaatgcaggaaggagttaaggcttttggaaacttttgaaaaggtatgaatgtattttattctgtgagaaggatatgagatttggggggtcaaggtcagcataatatgatttggctgtgtgcccctggaaaaactcatgtggaattgtaatgccaaatgttggaggcaggacctggtgggagattat

SEQ ID NO: 8721 - DNA, 1023 bp, Artificial sequence
  DNA replication origin
gcttggccacagccacagggacatttggccctgcttccgagatgtggggagtgtgggcgagctcgggagttgcctggaggctgctgcctgcacgcagaaggcggctgcagctcgggtgcccaggcgggctggaagtgcatggcctggtcggccttgggatcgccagcgcgcccagcctcagggcccccaggccgtgcctcccgaccactcctccacctgagggagatcggagccgtttgtatgggcactcggcagtcacctcgtgtggggttgagcggtgggttctcagttctcgctcctgtgcagctgctgccgcagggcagaatgcctggcttggctgcagccactgggacacgtggccctgcttctgtgatgctaggagcgcgagcgggctcgggggttgccaggcagctgctgcctgcacacagagggcgacggcagcttgggcgcccagatggcggagcatggtttgggtggcctctggaatgcgtgcgcgccaggcctgagggtcaccctggtggggccacataccccggtcttcctctgctggagcctggagcagctggaatggccactactccgtcacaggggatagagttaagttttcttatcccacccatgcacacaaaaaggtgacgattctgtgaggtaataaacgtgttaattgactacattcatgccactctgcacccacaagtaaggctttcataacaatgacacagaaaataaatgttgctaaggaggtggagaagttggagccctcatgatttggctgctaggaatagaaaatgatgcccttgctgcggaaaacaatttggttgttcctcacagaatgagcattgggtgaaaaatgaaatcaagatggaaatgtaaaaaatttattcgaactggatgacacaacctatcaagacctctgggatacagcaaaggcactgctaagagcaaagtttgtagtcctaaaaacctacatcaaaaagtctgaaagagcacaaacagacaatctaagttcacatctcagggaac

SEQ ID NO: 8722 - DNA, 866 bp, Artificial sequence
  DNA replication origin
gggggcaccgcgagggcggagctgcgttctgctcagcacagacccgggggacaccgctaaggcagagcagcgttctcctcagcacagacctttggggcactgcctcgctttgggacaactcgggaccgcatagacggtgaataaaatccttcccttttgcagccctgaataatcagggccagagaccagttagaagggctcagtgtggaaaagggaaaccaaaagcccctctgaatcctgccaaccgaggttctccccagccaagccgaggcggccacagtgcgagatccacaccgcagactcggaagacaaatgcagcattcctaatgcagacatgacacccaaattatgacactcccattgctcatgtaacaagcacctgtaatgctaatgcactgcctcaatacaaaaatattaatataagatccgcaatccccttgctgccatgcagtcctaagacagagatcataataatcaacattgacatagtacaaacgtagtaacgaacctagggttaaggttggtgttagggttaggggttaggggttaagtttagggttaggggttggagataggggttggggtcagagttaagagttaagagtcaacgtttagagttagaggttaagagaggttaggggttagggataaggggttagggttggattagtgtgagggtgagggttgtggttaggggttaggcttaggggttacggttaagggttagggttagggtcaggggttaggggtcagggtcaggggttagggatcagggtcaggggtcagggtcaggttcaggggtcccactctgagttgtccatttagtctgctgactgttccttttgccatgcaaaagctgtttagtt

SEQ ID NO: 8723 - DNA, 1145 bp, Artificial sequence
  DNA replication origin
ctgggtgcaggaagctgactccaggtgatatctggagatggttggagagtagctgagagagacagaagagtccctgagggctgggggtgagaacatgagggagactggggagtaagtcagtgaaattcgtgagttcggtggtgtatcgtgggtgcctggaactgactccagctggaatctagagaagttttgagagtagctgaaagagacacgagagtccctgtgggctgagggcaaagacctgagagagaccagggaggacctcagtgaagtctgtgagtccgtaggtgattctggagtgtgggaggctgactcccgctgaaatctgggcgtggtgggagagtagctgggacagacaggagagtcccagggggctgggggtgaagacatgagagagactggagagtaactcagtgaaactgctgagtttgtaggtgatacctgggtgcctggaactgactcccgctgaaatctgggcatggttggagagtagctgggacccaccggagagtccctgagggctgggggtgaagacatgagagagaccggggagtaactgagtgaaactggtgagtttggtggtgactccggggtgtctggaactgactccagctgcaatgtgggcgtggttggagagtagctgggacagatgggagagtccctgagggatggtgaagacatgagagagactggggagtaacgcagtgaaattggtgagtttggtggtgatttctgggtgcctgcaacggactcccactgaagtgtgggcgtgtttggagagtagctgggacagacaggcgagtccctgagggttggagataaagacgtgctagagactggggagtaactcagtgaaagtggtgggcttggcggtgatccctgggttcctggaactgacccgcgctgaaatgtgggcgtggttggagagtagctgggacagactggagggtccgtaagggctgggggtgaagacgtgagagagactggccaggatctcactgaggtctgtgagtttgtaggtgtttctggggtgtggggtacagactcccgctgaaatgtgggcgtggttggagagtagctgggacagacaggagagtcatgggtggctgggggtgagctgctggatgatggcagtaagaacatat

SEQ ID NO: 8724 - DNA, 947 bp, Artificial sequence
  DNA replication origin
gggagaagctgggtgaggcaggcatgaatcttgaggagtcagggctgggggaccgctcatattctcccgagacctgtgagtctctgggggactcctgggtgcatgcgactgaatcccgcaggaacctggggatggctggatagtaactgggagccacgggagagtccctgaggcctgggggtgaagagatgaaagacacaggggtggagcaccgtgaggctcgtgagtttgtaggtgattcctgggtgtggggggctgactccagctgaaatctggggttgtttggagagtagctgggagacacaggagaccccccgagagctgggggtgagctgctgggtgatggcagtaagaacatgtggtatattattgatgaacctggggactctgaggaatcctcagaggaggacagaggagagcccgatgacttcattgattgcccatcacggtcaggacagggaaatgggagcttgtgggattctggtgatgacagaggtgagtgtggtgaagccctaggggatggtgaatggtagctccggatccctggtgaggagcttccccttaagcctgagtttctgagatgggagagggagaagctgggtgaggctcgcatggaccttggggagtccgggctgtgggaccgttcataagaagagccagacaagaccctactgttcttaggagcagacatgattaggaaacctgcagctcccaggggcccctactaattttctaactcgcagaaggaaggagtgtgtgtgcgtgtgtgtgagcgtgtgcgtgtgtgtgcgtgtgtgtgtgtctgtgtgtgtgcggtgtgaggtatgtgccccttaagaaaatggaaatcaaccaaccaatgggacagacacacaaacagacagacagacagacagacagacagacagacagacagagattcacttgcccaagtgttctgtcctgtc

SEQ ID NO: 8725 - DNA, 824 bp, Artificial sequence
  DNA replication origin
ggaccgctcatattctcccgagacctgtgagtctctgggggactcctgagtgcatggggctgactcccgcaggaaccgggggatggctggagagtaactgggagccacaggagagtccctgaggcctgggggtgaagagatgaaagacacaggggtggagcaccgtgaggctcgtgagtttgtaggtgattcctgggtgtggggggctgactccagctgaaatctggggttgtttggagagtagctgggagacacaggagaccccccgagaactgggggtgagctgctgggtgatggcagtaagaacatgtggtatattattgatgaacgtggggactctgaggaatcctcagaggaggacacaggagagcccgatggcttcattgattgcccatcacggtgaggacagggaaatgggagcttgtgggattctgatgatgacagaggtgagtgtggtgaagccctaggggatggtgaatggtaactccggatccctggtgaggagcttcccattaagcctgagattctgagagtggagagggagaagctgggagaggctcgcatggaccttggggagtccaggctgggggaccgttcataagaagagccagacaagaccctactgttcttaggagcagacatgattaggaaacctgcagctcccaggggcccctactaattttctaactcgcagaaggaaggagtgtgtgtgcgtgtgtgtgagtgtgtgcgtgtgtgtgcgtgtgtgtgtgtctgtgtgtgtgcggtgtgaggtatgtgccccttaagaaaatggaaatcaaccaaccattgggacagagaca

SEQ ID NO: 8726 - DNA, 1126 bp, Artificial sequence
  DNA replication origin
tgcgtgaagctgactccacgtgaaatctggagatggttggagagtagctgagagagacagaagagtccctgagggctgggggtgagaacatgagggagactggggagtaagtcagtgaaattcgtgagttcggtggtgtatcgtgggtgcctggaactgactccagctggaatctagagaagttttgagagtagctgaaagagacacaagagtccctgtgggctgagggcaaagacctgagagagaccagggaggacctcagtgaagtctgtgagtccgtaggtgattctggagtgtgggaggctgactcccgctgaaatctgggcgtggtgggggagtagctgggacagacaggagagtcccagggggctgggggtgaagacatgagagagactggggagtaactcagtgaaactgctgagtttgtaggtgatacctgggtgcctggaactgactcccgctgaaatctgggcatggttggagagtatctgggacacacaggagagtccctgagggctggtgaagacatgagagagactggagagtaattgagtgaaattggtgagtttggtggtgattcctgggtgcctggaactgactcccgctgaagtgtgggcgtggttggagagtagctgggacacacaggagagtccctgagggttggagataaagacgtgctagagactgaggagtaactgagtgaaacaggtgagtttggtggtgattccggggtgcctggaactgactccagctgcaatgtgggcgtggttggagagtagctgggacagacgggagagtccctgagggatggtgaagacatgagagagactggggagtaacgcagtgaaattggtgagtttggtggtgatttctgggtgcctgcaacggactccggctgaagtgtgggcgtgtttggagagtagctgggacagacaggcgagtccctgagggttggagataaagacgtgctagagactggggagtaactcagtgaaagtggtgggcttggcggtgatccctgggttcccggaaccgacccgcgctgaaatgtgggcgtggttggagagtagctgggacagactggagggtccgtaagggctgggggtgaagacgtgagagaatctgg

SEQ ID NO: 8727 - DNA, 911 bp, Artificial sequence
  DNA replication origin
ctgggtgcatggggctgactcccgcaggaacctggggatggctggagagtaactgggagccacaggagagtccctgaggcctgggggtgaagagatgaaagacacaagggtggagcaccgtgaggctcgtgagtttgtaggtgattcccgggtgtggggggctgactccagctgaaatctggggttgtttggagagtagctgggagacacaggagaccccccgagagctgggggtgagctgctgggtgatggcagtaagaacatgtggtatattattgatgaacctggggactctgaggaatcctcagaggaggacagaggagagcccgatggcttcattgattgcccatcatggtgaggacagggaaatgggagcttgtgggattctggtgatgacagaggtgagtgtggtgaagccctaggggatggtgaatggtagctccggatccctggtgaggagcttcccattaagcctgagtttctgagaggggagaaggagaagctgggtgaggctcgcatggaccttggggagtccgggctgggggaccgttcataagaagagccagacaagaccctactgttcttaggtgcagacatgattaggaaacctgcagctcccaggggcccctactaattttctaactcgcagatggaaggagtgtgtgtgcgtgtgtgtgagtgtgtgcgtgtgtgtgcgtgtgtgtgtgtctgtgtgtgtgcggtgtgaggtatatgccccttaagaaaatggaaatcaaccaaccaatgagacagacacacagacagacagacagacagagattcacttgcccaagtgttctgtcctgtcctctgaatccgcctccaagtcgcaagacgccgtgagctccaagtccacgcagagtccgccaaacgctccggccgctgatccg

SEQ ID NO: 8728 - DNA, 735 bp, Artificial sequence
  DNA replication origin
gcatgtgcctgactcccgcaggaacctggggatggctggagagtaactgggagccacaggagagtccctgaggcctgggggtgaagagatgaaagacacaggggtggagcaccgtgaggctcgtgagtttgtaggtgattcctgggtgtggggggctgactccagctgaaatctggggttgtttggagagtagcagggagacacaggagaccccctgagagctgggggtgagctgctgggtgatggcagtaagaacatgtggtatattattgatgaacctggggactctgaggaatcctcagaggaggacagaggagagcccgatggcttcattgattgcccatcacggtgaggacagggaaatgggagcttgtgggattctggtgctgacagaggtgagtgtggtgaagccctaggggatggtgaatggtagctccggatccctggtgaggagcttccccttaagcctgagtttctgagagcggagaaggagaagctgggtgaggctcgcatggaccttggggagtccgggctgggggaccgttcataagaagagccagacaagaccctactgttcttaggtgcagacatgattaggaaacctgcagctcccaggggcccctactaattttctaactcgcagaaggaaggagtgtgtgtgcgtgtgtgtgtgtctgtgtgtgtgcggtgtgaggtatgtgccccttaagaaaatggaaatcaaccaaccaatga

SEQ ID NO: 8729 - DNA, 2397 bp, Artificial sequence
  DNA replication origin
cattctacaatggattgcgaattaaaattgaatgtgcacaaccacaggtgtactaaaagccactcaattcatgacttttaatgggggaatcttatgtggcgcactctcatggagaccacggcagacatagtgagagagaaaaaggtgagtgaatatctgaaacggaggcagaaacagagagaatgaaaagcccagtgaatggaagggagagcgaaaagggaaaatggtcctatttccaaatgacagatgtgaaactggggttcacatcaacagtgtcactgccaggaaggagggtgatgctagccatgtcaccggtagtgtgtctcgcagggacgccgacctgctggagcgtcgtgccagcatgggctctgtcagccacgtgggccagcaggagggtcccgctgcacagctgtggggtgaggatagactgggtggtgatatcggccatgacgggggcctcttctgctggcaagagtgtgacagtagcaagtagatggacaggcctgcgtgtgaggacggaatgcaggagcggctcttgtgcggctgggtgtggggccctcacgggaaccgtggagtaatggccaggtaactgcgtcatgtgggctagtagattggccagggcttcgaactgaaggacaataacggggagtagctgtcaggccctgggagtgtctgagtgtaagtggagatgggtttggggtcactgagggatgcatgggagccatccctgtataggtacaggtcatagggagatagtctcgtgtggcccgtgagtgtctagggttgtcctgggtgcctggggctgactgtggcagaaatctggggaaggctggagagaagctgggagacccaggagagtccctgaaggcagggggtgaagaggtgaaagaaatgggggagggttgcagtaaggtccgtgagtttgtaggtgattcctgggtgcgggaagctgactccaggtgaaatctggagatggttggagagtagctgagagagacagaagagtccctgagggctgggggtgagaacatgagggagactggggagtaagtcagtgaaattcgtgagttcggtgttgtatcgtgggtgcctggaactgactccagctggaatctagagaagttttgagagtagctgaaagagacacaagagtccctgtgggctgagggcaaagacctgagagagaccagggaggacctcagtgaagtctgtgagtccgtaggtgattctggagtgtgggaggctgactcccgctgaaatctgggcgtggtgcgggagtagctgggacagacaggagagtcccagggggctgggggtgaagacatgagagagactggggagtaactcagtgaaactgctgagtttgtaggtgatacctgggtgcctggaactgactcccgctgaaatctgggcatggttggagagtatctgggacacacaggagagtccctgagggctgggggtgaagacatgagagagtccggggagtaactgagtgaaactggtgagtttggtggtgactccgggttgcctggaactgactccagctgaaatgtgggcgtggttggagagtagcttggacagacaggagagtccctgagggctggtgaaggcatgacagagactggagagtaattgagtgaaattggtgagtttcgtggtgattcctgggtgcctggaactgactcccgctgaagtgtgggcgtggttggagagtagctgggaaacacaggagagtccctgagggttggagataaagacgtgctagagactgaggagtaactgagtgaaactggtgagtttggtggtgtttccggggtgcctggaactgactccagctgcaatgtgggcgtggttggagagtagctgggacagacgggagagtccttgagggatggtgaagacatgagagagactggggagtaacgcagtgaaattggtgagtttggtggtgatttctgggtgcctgcaacggactccggctgaagtgtgggcgtgtttggagagtagctgggacagacaggcgagtccctgagggttggagataaagacgtgctagagactggggagtaactcagtgaaagtggtgggcttggcggtgatccctgggttcccggaaccgacccgcgctgaaatgtgggcgtggttggagagtagctgggacagactggagggtccgtaagggctgggggtgaagacgtgagagagactggccaggatctccctgaggtctgtgagtttgtaggtgttgctggggtgtggggtacagactgccgctgaaatgtgggcgtggttggagagtagctgggacagacaggagagtcatgggtggctgggggtgagctgctggatgatggcagtaagaacatatggtatattattgatgaatgaggtgac

SEQ ID NO: 8730 - DNA, 821 bp, Artificial sequence
  DNA replication origin
tcctgcaggaacctggggatggctggagagtaactgggagccacaggagagtccctgaggcctgggggtgaagagatgaaagacacaggggtggagcaccgtgaggctcgtgagtttgtaggtgattcctgggtgtgggcagctgactccagctgaaatctggggttgtttggagagtagctgggagacacaggacaccccccgagagctgggggtgagctgctgggtgatggcagtaagaacatgtggtatattattgatgaacctggggactctgaggaatcctcagaggaggacagaggagagcccgatggcttcattgattgcccatcacggtgaggacagggaaatgggagcttgtgggattctggtgatgacagaggtgagtgtggtgaagccctaggggatggtgaatggtagctccggatccctggtgaggagcttccccttaagcctgagtttctgagaggggagaaggagaagctgggtgaggctcgcatggaccttggggagtccgggctgggggaccgttcataagaagagccagacaagaccctactgttcttaggtgcagacatgattaggaaacctgcagctcccaggggcccctactaattttctaactcgcagaaggaaggagtgtgtgtgcgtgtgtgtgagtgtgtgcgtgtgtgtgcgtgtgtgtgtgtctgtgtgtgtgcggtgtgaggtatgtgccccttaagaaaatggaaatcaaccaaccaatgagacagacacacagacagacagacagacagagattcacttgcccaagtgttctgtcctgtcctctgaatccg

SEQ ID NO: 8731 - DNA, 757 bp, Artificial sequence
  DNA replication origin
agggagaagctgggtgaggcaggcatgaatcttgaggaatcagggctgggggaccgctcatattctcccgagacctgtgagtctctgggggactcctgggtgcatggggctgactcctgcaggaacctggggatggctggagagtaactgggagccacaggagagtccctgaggcctgggggtgaagagatgaaagacacaggggtggagcaccgtgaggctcgtgagtttgtaggtgattcctgggtgtgggcagctgactccagctgaaatctggggttgtttggagagtagctgggagacacaggacaccccccgagagctgggggtgagctgctgggtgatggcagtaagaacatgtggtatattattgatgaacctggggactctgaggaatcctcagaggaggacagaggagagcccgatggcttcattgattgcccatcacggtgaggacagggaaatgggagcttgtgggattctggtgatgacagaggtgagtgtggtgaagccctaggggatggtgaatggtagctccggatccctggtgaggagcttccccttaagcctgagtttctgagaggggagaaggagaagctgggtgaggctcgcatggaccttggggagtccgggctgggggaccgttcataagaagagccagacaagaccctactgttcttaggtgcagacatgattaggaaacctgcagctcccaggggcccctactaattttctaactcgcagaaggaaggagtgt

SEQ ID NO: 8732 - DNA, 2053 bp, Artificial sequence
  DNA replication origin
ggtcaggaagagggtttgagagggaatgaggagtgactaatgtctacagggtttttctctggtcgggggtgataagacgttctacaatggattgcgaattaaaattgaatgtgcacaaccacaggtatactaaaagccactcaattcatgacttttaatgggggaatcttatgtggcgcactctcatggagaccacggcagacatagtgagagagaaaaaggtgagtgaatatctgaaacggaggcagaaacagagagaatgaaaagccctgtgaatggaagggagagcgaaaagggaaaatggtcctatttacaaatgacagatgtgaaactggggttcacatcaacagtgtcacttccaggaaggagggtgatgctagccatgtcacgggtagtgtgtcccgcagggacgccgacctgctggagcgtcgtgccagcatgggctctggcagccacgtgggccagcaggagggtcccgctgcacagctgtggggtgaggatagactgggtggtgatatcggccatgacaggggcctcttctgctggcaagagtgtgacagtagcaagtagatggacaggcctgcgtgtgaggacggaatgcaggaggggctcttgtgcggctgggtgtagggccctcacgggaaccgtggagtaatggccaggtaactgcgtcatgtggactagtagattggccagagcttcgaactgaaggacaataacggggagtagctgtcaggccctgggagtgtctgagtgtaagtggatatggctttggggtcactgagggatgcgtgggagccatccctgtataggtacaggtcatagggagatagtctcatgaggcctgtgagtgtctagggttgtcctgggtgcctggggctgactgtggcagatatctggggaaggttggagagaagctgggagacacaggggagtcactgaaggcagggggtgaagaggtggaagaaacgggggaggtttgcagtaagttccgtgagttcgtaggtgattcctgggtgcgggaagctgactccaggtgaaatctggagatggttggagagtagctgagagagacagaagagtacctgagggctgggggtgagaacatgagggagactggggagtaagtcagtgaaattcgtgagttcgggggtgtatcgtggttgcctggaactgacaccagctggaatctagagaagttttgagagtagctgaaagagacacaagagtccctatgggctgagggcaaagacctgagagaaaccagggaggacctcagtgaagtctgtgagtccgtaggtgattctggagtgtgggaggctgactccggctgaaatctgagcgtggtgggagagtagcttggagagacaggagagtcccagggggctgtgggtgaagacatgagagagactggggagtaactcagtgaaactgctgagtttgtaggtgataccagggtgcctggaactgactcccgctgaagtctgggcatggttggagagtagctgggaaacacaggagagtccctgagggttggagataaagacgtgctagagactgaggagtaactgagtgaaactggtgagtttggtggtgtttccggggtgcctggaactgactccagctgcaatgtgggcgtggttggagagtagctgggacagacgggagagtccttgagggatggtgaagacatgagagagactggggagtaacgcagtgaaattggtgagtttggtggtgatttctgggtgcctgcaacggactccggctgaagtgtgggcgtgtttggagagtagctgggacagacaggcgagtccctgagggttggagataaagacgtgctagagactggggagtaactcagtgaaagtggtgggcttggcggtgatccctgggttcccggaaccgacccgcgctgaaatgtgggcgtggttggagagtagctgggacagactggagggtccgtaagggctgggggtgaagacgtgagagagactggccaggatctccctgaggtctgtgagtttgtaggtgttgctggggtgtggggtac

SEQ ID NO: 8733 - DNA, 676 bp, Artificial sequence
  DNA replication origin
ttggagagtagctgggacagacgggagagtccctgagggatggtgaagacatgagagagactgcggagtaacgcagtgaaattgatgagtttggtggtgatttctgggtgcctgcaacggactccggctgaagtgtgggcgtgtttggagagtagctgggacagacaggcgagtccctgagggttggagataaagacgtgctagagactggggagtaactcagtgaaagtggtgggcttggcggtgatccctgggttcctggaactgacccgcgctgaaatgtgggcgtggttggagagtacctgggacagacaggagagtcatgggtggctggtggtgagctgctggatgatggcaggaagaacatgtggtatattattgatgaatgaggtgactgtgaagaatctccagaggaggacacgggagaacacaatgacatgagtgactgtcctgcttggttaggaaagggaaacgtaaagctgtggaattctgttgatgatggatgtgagagtggtgaagccctgcgggatgatgtagagtacttccatatccctggtgaggagctgccccttgggtctgagtttctgggaggggagagggagaagctgggtgaggcaggcatgaatcttgaggagtcagggctgggggaccgctcatattctcccgagacctgtga

SEQ ID NO: 8734 - DNA, 607 bp, Artificial sequence
  DNA replication origin
tggagagtaactgggagccacaggagagtccctgaggcctgggggtgaagagatgaaagacacaggggtggagcaccgcgaggctcgtgagtttgtaggtgattcctgggtgtgggggactgactccagctgaaatctggggttgtttggagagtagctgggagacacaggagaccccccgagagctgggggtgagctgctgggtgatggcagtaagaacatgtggtatattattgatgaacctggggactctgaggaatcctcagaggaggacacgagagagcccgatggcttcattgattgcccatcacggtgaggacagggaaatgggagcttgtgggattctggtgatgacagagatgagtgtggtgaagccctaggggatggtgaatggtagctccggatccctggtgaggagcttccccttaagcctgagattctgagaggggagggggagaagctgggtgaggctagcatggaccttggggagtccaggctgggggaccgttcataagaagagccagacaagaccctactgttcttaggtgcagacatgattaggaaacctgcagctcccaggggcccctactaattttctaactcgcag

SEQ ID NO: 8735 - DNA, 858 bp, Artificial sequence
  DNA replication origin
cctggaactgactgcagctgaaatgtgggcatggttggagagtagctgggacagacaggagagtccctgagggctggtgaagacatgagagagactggagagtaattgagtgaaattggggagtttggtggtgattcctgggtgcctggaactgactcctgctgaaatctgggcatggtcggagagtagctgggacccacaggagagtccctgagggctgggggtgcagacatgagagagaccggggagtaactgagtgaaactggtgagtttggtggtgacactggggtgcctggaactgactccagctgaaatgtgggcgtggttggagagtagctgggacagacaggagagtccttgagggctgggggtgcagacatgagagagaccggggagtaactgagtgaaactggtgagttaggtggtgactccggggtgcctggaactgactccagctgaaatgtgggcgtggttggagagtagctgggacagacaggagagtccctgagggttggagataaagacgtgctagagactggggagtaatggagtgaaattggtgagtttggaggtgattccggggtgcctgtaactgactccagatgcaaagtgggcgtggttggagagtagctgggacagacgggagagtccctgagggatggtgaagacatgagagagactggggagtaacgcagtgaaattggtgagtttggtggtgatttctgggtgcctgcaacggactcccgctgaagtgtgggcgtgtttggagagtagctgggacagtcaggcgagtccctgagggttggagataaagacgtgctagagactggggagtaactcagtgaaagtggtgggctt

SEQ ID NO: 8736 - DNA, 828 bp, Artificial sequence
  DNA replication origin
gggaggggagagggagaagctgggtgaggcaggcatgaatcttgaggagtcagggctgggggaccgctcatattctcccgagacctgtgagtctctgggggactcctgggtgcatgcgactgaatcccgcaggaacctggggatggctggatagtaactgggagccacgggagagtccctgaggcctgggggtgaagagatgaaagacacaggggtggagcaccgtgaggctcgtgagtttgtaggtgattcctgggtgtggggggctgactccagctgaaatctggggttgtttggagagtagctgggagacacaggagaccccccgagagctgggggtgagctgctgggtgatggcagtaagaacatgtggtatattattgatgaacctggggactctgaggaatcctcagaggaggacagaggagagcccgatgacttcattgattgcccatcacggtcaggacagggaaatgggagcttgtgggattctggtgatgacagaggtgagtgtggtgaagccctaggggatggtgaatggtagctccggatccctggtgaggagcttccccttaagcctgagtttctgagatgggagagggagaagctgggtgaggctcgcatggaccttggggagtccgggctgtgggaccgttcataagaagagccagacaagaccctactgttcttaggagcagacatgattaggaaacctgcagctcccaggggcccctactaattttctaactcgcagaaggaaggagtgtgtgtgcgtgtgtgtgagcgtgtgcgtgtgtgtgcgtgtgtgtgtgtctgtgtgtgtgcggt

SEQ ID NO: 8737 - DNA, 629 bp, Artificial sequence
  DNA replication origin
ggagagtcatgggtggctgggggtgagctgctggatgatggcagtaagaacatatggtatattattgatgaatgaggtgactgtgaagaatctccagaggaggacacgggagaacacaatgacatgagtgactgtcctgcttggttaggaaatggaaacgtaaagctgtggaattctgttgatgatggatgtgagagtggtgaagccctgcgggatgatgtagagtacttccacatccctggtgaggagctgccccttgggtctgagtttctgggaggggagagggagaagctgggtgaggcaggcatgaatcttgaggagtcagggctgggggaccgctcatattctcccgagacctgtgagtctctgggggactcctgggtgcatgcgactgaatcccgcaggaacctggggatggctggatagtaactgggagccacgggagagtccctgaggcctgggggtgaagagatgaaagacacaggggtggagcaccgtgaggctcgtgagtttgtaggtgattcctgggtgtggggggctgactccagctgaaatctggggttgtttggagagtagctgggagacacaggagaccccccgagagctgggggtgagctgctgggtgatgg

SEQ ID NO: 8738 - DNA, 875 bp, Artificial sequence
  DNA replication origin
ctggagagtaactgggagccacaggagagtccctgaggcctgggggtgaagagacgaaagacacaggggtggagcaccgtgaggcccgtgagtttgtaggtgattcctgggtgtggggggctgactccagctgaaatctggggttgtttggagagtagctgggagacacaggagaccccccgagagctgggggtgagctgctgggtgatggcagtaagaacatgtggtatattattgatgaacgtggggactctgaggaatcctcagaggaggacacgggagagcccgatggcttcattgattgcccatcacggtgaggacagggaaatgcgagcttgtgggattctggtgatgacagaggtgagtgtggtgaagccctaggggatggtgaatggcagctccggatccctggtgaggagcttccccttaagcctgagcttctgagaggggagagggagaagctgggtgaggctcgcatggaccttggggagtccgggctgggggaccgttcataagaagagccagacaagaccctactgttcttaggtgcagacatgattaggaaacctgcagctcccaggggcccctactaattttctaactcgcagaaggaaggagtgtgtgtgcgtgggtgtgagtgtgtgcgtgtgtgtgcgtgtgtgtgtctgtgtgtgtgcggtgtgaggtatgtgccccttaagaaaatggaaatcaaccaaccaatgagacagacacacagacagacagacagacagacagacagacagacagagattcacttgcccaagtgttctgtcctgtcctctgaatccgcttccaagtcgcaagacgccgtgagctccaagtccacgcagagtccgccaaacgctccggcc

SEQ ID NO: 8739 - DNA, 1575 bp, Artificial sequence
  DNA replication origin
atctggagatggttgcagagtagctgagagagacagaagagtccctgagggctgggggtgagcacatgagggagactggggagtaagtcagtgaaattcgtgagttcggtggtgtatcgtgggtgcctggaactgactccagctagaatctacagaagtttgagagtagctgaaagagacacaagagtccctgtgggctgagggcaaagacctgagagagaccagggaggacgtcagtgaagtctgtgagtccgtaggtgattctgtagtgtgggaggctgactcccactgaaatctgggcgtggtgggggagtagctgggacagacaggcgagtccctgagggttcgagataaagaggggctagagactggggagtaactcagtgaaagtggtgggcttggcggtgatccctgggttcctggaactgactcccgctgaaatgcgggtgtggttggagagtagctgggacagactggagggtcccagggggctgggggtgaagacatgagagagactggggagtaactcagtgaaactgctgagtttgtaggtgatacctgggtgcctggaactgactcacgctgaaatctgggcatggttggagagtagctgggacacacaggagagtccctgagggctgggggtgaagacatgagagagaccggggagtaactgagtgaaacttttgagtttggtggtgactccggggtgcctggaactgactccagctgcaatgtgggcgtggttggagagtagctgggacagacgggagagtccctgagggctggtgaagacatgagagagactggagagtaattgagtgaaattggtgagtttggtggtgattcctgggtgcctggaactgactcccgctgaagtgtgggcgtggatggagagtagctgggacacacaggagagtccctgagggttggagataaagacgtgctagagactgaggagtaactgagtgaaattggtgagtttggtggtgattccggggtgcctggaactgactccagctgcaatgtgggcgtggttggagagtagctgggacggacgggagagtccctgagtgatggtgaagacatgagagagactggggagtaacgtagtgaaattggtgagtttggtggtgatttctgggtgcctgcaatggactcccgctgaagtgtgggcgtgtttggagagtagctgggacagacaggcgagtccctgagggttggagataaagacgtgctagagactggggagtaactcagtgaaagtggtgggcttggcggtgatccctgggttcctggaactgacccgcgctgaaatgtgggcgtggttggagagtagctgggacagactggagggtccgtaagggctgggggtgaagacgtgagagagactgcccaggatctcactgaggtctgtgagtttgtaggtgtttctggggtgtggggtacagactgccgcggaaatctgggcgtggttggagagtagctgggacagacaggagagtcatgggtggctgggggtgagctgctggatgatggcagtaagaacatatggtatattattgatgaatgagg

SEQ ID NO: 8740 - DNA, 995 bp, Artificial sequence
  DNA replication origin
tgccagaccctgccccggcctggctcctcctctgtcagagctccagatctctatccaggggccctctgcagccaccggggatggggctgagggccggttcccgcccctgtgcagctgctgcaggacagaccgcctggcttggccacagccacagggacatttggccctgcttccgagatgtggttagtgtgggcgagctcgggagttgcctggaggctgctgcctgcacgcagaaggcggctgaagctcgggtgcccaggcgggctggaagtgcatggcctggtcggccttgggattgccagcgcgcccagcctgagggcccccaggccgtgcctcccgaccactcctccacctgagggagatcggagccgtttgtatgggcactcggcagtcacctcgtgtggggttgagcggtgggttctcagttctcgctcctgtgcagctgctgccgcagggcagaatgcctggcttggctgcagccactgggacacgtggccctgcttctgtgatgctaggagtgcgagcgggctcaggggttgccaggcagctgctgcctgcacacagagggcgacggcagcttgggcgcccagatggcggagcatggtttgggtggcctctggaatgcgtgcgcgccaggcctgagggtcaccctggtggggccacataccccggtcttcctctgctggagcctggagcagttggaatggccactattccgtcacaggggatagagttaagttttcttatcccacccatgcacacaaaaaggtgacgattctgtgaggtaataaacgtgttaattgactacattcatgccactctgcacccacaagtaaggctttcataacaatgacacagaaaataaatgttgctaaggaggtggagaagttggagccctcatgatctggctgttaggaatagaaaatgatgcccttgctgcggaaaacaatttggttgttcctcacagaatgagcattgggtgaaaaatgaaatca

SEQ ID NO: 8741 - DNA, 1672 bp, Artificial sequence
  DNA replication origin
ttctttctgggaaatttcttctttttggcttggaatgcttacccaatgcctgtacaatcattgtaacttggaagtggctaacttgctttgtatttcagaggctcagggcagaagatatggcagccttgtctcagaggagactttggcctttggacatttgagtaaatactgggatgagttaagatttgggggactctagggaaggcctcattgcattttgcaatgtgagaaagacatgaactttgggggaccagggacagaataatatgttttggctctgtgtctctaccaaaactcatgtagaattttaatgggaaatgctaaaggtgggggctggtggaaggtgagtcaatcatggtgaagagtagaggttagatggttggggggtggggagggttggggggattaaggggtggggagggttgggggcgattgtggtggggttgggggtgaaaggcaggggtagggggtaggtccttcacaaatggacatttgagtaaatgctggaatgagttcagacactgggggactgtagagaatgcatcattgtattttgaagtatgagaaggatgtgagattggggggccaaagggagaataatacgatttggctctgtgtccctaccaaaactcatgtggaattataatagggaatgttaagtgtggggcttggtagaaggtgatttaatcatggtagagaatgggggttggaagggggatgtgggagaatggaggttcatggtgtgggtgagggtgaaacatggggataggtggcagatccttcacaaatggttaaatactatctccttaatgcagtctgtgtgatagtgagttctcgtgataaatgaatgctgtcctgctgggttttggagtcagattgggcctgtgtcccatttgtgttatttttctgggaaaaccttccctttggtttaagaaagcctacccagtgcctgtgccatcattgtaacttgaaagaaaagaattgtcttttacattcagggactcataggcagaagggattgcagccttgtcttggatgagacttgaacttactacatttgagttactgctggaatgagttaagactttttgaaacttttgaaaaggcatgtttgtatttttctgtgtgagaaggacatgagatgtgggggtgtcagggtcaggatagtatggtttggctgtgtttccctacaaaaactcatggggaattgtattcctgacagttgtaggttgggcctggtgggaggtgatttaatcacaaacgggaggttggtaggggtggaagggaaaacaaatgggtaggatgaggaggagtaggctggcagtagggtagtgagaggttcgtgggcagtagtaagggggagtagcctgctgcagaggcaaagcctcaagaaaaacctccaccagggcagtgcacctatggctttgcagggtgtagcccccatggctgccctcataggctgggctgttgttgagtgcctgtagcttttccatactgagagtgcaagctgttggtgagtctatgaatctggggtctgaggatggtaacctcctgtgtggggcctccaagcccatatactttttctgctctgccctattagaggttttcctagtggctctgcctcttcctcaggcttctgcctggaaacagtgaggggtgtgggtggtaggag

SEQ ID NO: 8742 - DNA, 1611 bp, Artificial sequence
  DNA replication origin
tacacacacaaaagatttgaaacttgtattaaatgacatataatttattatttcctagatgtagattaagctgaaacataaatagaataaagaatgcaggagcagcttccctgctcagagtaagggcggatattcttactgctagatctgcccaacaagcaatcccctatctcagagtccagaggtacctacccatcactgtggggccccgctgaggtactgtcatgataaaggtgatcaataaggatgttctatgagagattcttgtcttgcgaaagaacctgaagcaaataataaataacttcaggtacagttctgagattccataaagtgattcataaatgtttgaatgataaaaatattatataaatagtattataaggatgtaatttattaaagagaaattagcgattaagatggagggagcattttaccatgggagtgctgtgggacacagaaactggtttgtctgagccccttccaaatagcataacatttgtgtcctgatttaaaatctaaatttcagagcctggaaacccaaaagcctgggctgtagaaatctaaaaccaaaaagaccgtgcgttctgttacctgtgatttgtggtgtcacctactctttgaggctcccagatggcccagggccttaggatatggggatgccttgtaggtgtgttgttgttggagttggtggctgggatgagggtggaggcagggtagggtgggggtgggttggggtggggggaatcctccgttaatatctcgaaatattgttctgttaccataatgcggtgtgataagttagcttcaagtattgaaaaatcagggcaggactcatggaaatggtgcgaattcttgacttagggtcagaagaattcaccaaaattaacgtctccctctgccaaataacagccagtttcaatttctggacggcctctccgcgggagtgacaggttttcttagatgccgccgggggtctttcacgggctggtggtctgccccctggactcgtccatgtgttaggctcagtccgcagctcagagcgcggccctgtatttctgtctgatgtctggggcatacagatgtgtgtgacggacaatgctcgtggcattcgaagcctctttaacagacattagtgactagaggaaagaagtgtgcgaactctgcgaaacaagtatgcggactctggaaaagaagtacatttcgaaagtggggagaggatggatcttcgtaggagaaatggaaatttgctccccaccagaaggtttgctggaaattaagacgcggcaattcttaatccagtttcctgcggtaggaagcagctgacaagagaagtcccagtccgagttcggcgcgaactggacaagtgtcgtgggacaagtggcgggagacccggccgcgtcgcgccgggcgctagggacggacgcatttccctacttccagcagctggtacgagccgcccccaactgcgctgcgctgctctattctttgggaaacacttcgcgtgctttgtttcagacgccgacccatctttcttggtgggtctccagctccaccaatcccgcccgccactgggcggggtttcagggtcaaggtggaccaatttcccagctt

SEQ ID NO: 8743 - DNA, 779 bp, Artificial sequence
  DNA replication origin
aggccccaggaccaatcgtattggccagtggggggcggggcctcgttgccagctccagaccggcgctatgggcactccttttgtcaaatgagagacgcagcagggcggcccctgagccgcggtttagccaatggagaaggcgagatgggcgggctgggagtgcccggcggcgggtcctcagcttcgagccgaggtgcagtgagctggtggggggaccgcgaggcgagcgcgggagcctgggcggcgagccgggtgtgagctgcctgaaaatgcactcggatgccgccgctgtcagtgagtagcagagagccagccagcgggccggggccgggcggctgccaaactcgccactcggctcccgcagtccccgccccacgcctcgggtcccgaaacgcgccgggagcccctgcctgggaaccaccccttcccctcccggggccggggcgggcggtgacgctgcgggcggcgtggggcgggggcgggcgtggggggaagggaccggcctgcggggagggcggaggtgaggggggtggggactggctctctttcagtgttgggggaagggagggctggacgtgcgatgaagggccgagatcggagtgtccggggtgcatggaggtggaggcagcgttgggctgtagcgggcagggccggggatgtgggggggtggcaccggcggggagagggagggagcgagcgagcgagcggggcacaagggtgaggatttccaaagggctgagtggtgcgggcggctccgtgagaaaggcgggtgagtgcga

SEQ ID NO: 8744 - DNA, 1070 bp, Artificial sequence
  DNA replication origin
cgccccacgcctcgggtcccgaaacgcgccgggagcccctgcctgggaaccaccccttcccctcccggggccggggcgggcggtgacgctgcgggcggcgtggggcgggggcgggcgtggggggaagggaccggcctgcggggagggcggaggtgaggggggtggggactggctctctttcagtgttgggggaagggagggctggacgtgcgatgaagggccgagatcggagtgtccggggtgcatggaggtggaggcagcgttgggctgtagcgggcagggccggggatgtgggggggtggcaccggcggggagagggagggagcgagcgagcgagcggggcacaagggtgaggatttccaaagggctgagtggtgcgggcggctccgtgagaaaggcgggtgagtgcgaggggggcgcgggggcggggacaatgggaagaagggctggttggcgggggggtggggggggggcggcgaacaatggggtgggggaatgggggcagcggccgagcggggcaggagggcgggcgactggacgagggctgatgtaacgggaaagcgaggtggtgggagggactggggtgtaatggtagttggggagtcctgcggggcgggaggggcgttggaagggcggtgggtaacggagagtggtgggagtggaagatgttggggtaaagagatggggcaggtgtggaagggtagggcgattgggaggaagaggagaaaaaggtgggtaggatttggggtggcagagtgggggcaggggtggagaatatgaaatgggggtgaggagctagtcggggaggaaggggaggtggggcggagttgggcaggaggactgtcacgtccagattcggtccggagccgggctaagggggtgtcagactgtgcttaggggaggtacttcctctccctgtcgaggcagggtcccttgaaggggggagtccaagcttcggggtgcggagagaggagggggcggggctgaggtggaggagacggggtaagtgccctaaggttggaactggccgtggttccccccggacggcgggaagcgaggtcagcgctggc

SEQ ID NO: 8745 - DNA, 1407 bp, Artificial sequence
  DNA replication origin
aagggcggtgggtaacggagagtggtgggagtggaagatgttggggtaaagagatggggcaggtgtggaagggtagggcgattgggaggaagaggagaaaaaggtgggtaggatttggggtggcagagtgggggcaggggtggagaatatgaaatgggggtgaggagctagtcggggaggaaggggaggtggggcggagttgggcaggaggactgtcacgtccagattcggtccggagccgggctaagggggtgtcagactgtgcttaggggaggtacttcctctccctgtcgaggcagggtcccttgaaggggggagtccaagcttcggggtgcggagagaggagggggcggggctgaggtggaggagacggggtaagtgccctaaggttggaactggccgtggttccccccggacggcgggaagcgaggtcagcgctggcgcgggctccggcagcgggactaggaggcggggcaggggtgcgggctgcggggtttcagcagcgggagccggaggggtcgggccctgatggccgggtcgggggcttggcgccggggaggtgtcggggtccctggcagtccgtgggtttgatagtctgtgacgcagttgtctaatttctggctatcaggtgtgggggttggtgccatggaacccgcttccttagagggatggccgggccctaggccgcgccccacgcccggggggcgcgacttctcccaggcgtgctgggagggcgcttgaggggtttcctttagggtttgtctccagtcaacgggtatgaaggggaaaggcggtcccgccgaattctgggacttgtagtcgcggccgcgcccggccgcggttgggttgggtgcacgtgggtaactgtggaaacgggtcccggcatgcagcgcgcccttggagccttcctgctcggccaactcgtgctttattccccggccagctcctgcgcgctctcgggaggcggttgagttcccagggacggagcgactccccagcccttctcccttgggagagggagagcccacgccaggcgcagccctcttcacgcttaggttcttggtccccaagtgaatttccccctgcattttgtggccttacttgtggaataaatgcttggtcttgtaccatcatgcgcacgggttgtgggaaaacatttaagaagcaacacaatgtaaagcagcctttagaatggtgtatttaattttggcatccagtgtgtgtaagcactgggttccagcattcccttgcataaatatgagaacacagtggaggtacacgtaacccttgtaacgataatataaactatgtgttggtatttcttggggtgtttgaaaaaataactgtcttgaaatgagtgatggaggtgggttagtggaatttagggtggaaatgtgaaggtgagca

SEQ ID NO: 8746 - DNA, 1324 bp, Artificial sequence
  DNA replication origin
ggggccgactcccccacctccctcccggacggggcggctggccgggcagaggggctcctcacttcccagtaggggaggccgggcagaggcgcccctcacctcccagacggggcggctggccgggcagagggctgacccccccacctccctcccagacagggcggctggccgggcggggggctgacccccccacctccctcccggacggggcggctggccgggtgggggggctgacccccccatctccctcccggacggggtggctggccgggctgaggggctcctcacttcccagtaggggcggccgggcagaggcgcccctcacctcccggacggcacggctggccaggcggggggctgacgcccccccccggatggcacggctggccgggcgggggggctgacccccacctccctcccggatggggcggctggccgggcggggggctgaccccccccacctccctcccggacggggtggctgccgggcggagacgctcctcacttcccagatggggtggctgccgggcggagaggctcctcacttctcagacggggcagctgccgggcggaggggctcctcacttctcagacggggtggttgccaggcagagggtctcctcacttctcagacggggcggccgggcagagacgctcgtcacctcccagacggggtctcggccgggcagaggcgctcctcacatcccagatggggcggcggggcagaggcgctccccacatctcagacgatgggcggccgggcagagacgctcctcacttcctagatgtgatggcggctgggaagaggtgctcctcacttcctagatgggatggcagctgggcggagacgctcctcactttccagactgggcagccaggcagaggggctcctcacatcccagacaatgggcggccaggcagagacactcctcacttcccagacagggtggcggccgggcagaggctgcaatctcggcactttgggaggccaaggcaggcggctgggaggtgtaggttgtagtgagccgagatcacgccactgcactccagcctgggcaccattgagcactgagtgaacgagactccgtctgcaatcccggcacctcgggaggccgaggttggcggatcactcgcggttaggggctggagaccggcccggccaacacagcgaaaccccgtctccaccaaaaccagtcaggtgtggtggcgcatgcctgcaatcgcaggcactcggcaggctgaggcaggagaatcaggcagggaggttgcagtgagccgagatggcagcagtacagtccagcttcggctccgcatgagagggaga

SEQ ID NO: 8747 - DNA, 907 bp, Artificial sequence
  DNA replication origin
gagggaggtggggggggtcagcccccccgcccggccagccgccccatccgggaggtgaggggcgcctctgcccggccgcccctactgggaagtgaggagcccctctgtccggccagccgccccgtccgggagggaggtgggggcgtcagccccctgcccggccagccgccccgtccgggagggaggtgggggggggtcagccccccagcccggccagccgccccgtccgggaggtgaggggcgcctctgcccggccgcccctactgggaagtgaggagcccctctgcccggccagccgccccgtccgggagggaggtgggggggtcagccccccgtccggccagccgccccgtccaggagggaggtggggggggtcagcccccctgcccggccagccgccccatccgggaggtgaggggcgcctctgcccggccgcccctactgggaagtgaggagcccctctgcccggccaccaccccgtctgggaggtgtgcccaacagctcattgagaacgggccaggatgacaatggcggctttgtggaatagaaaggcgggaaaggtggggaaaagatcgagaaatcggatggttgccatgtctgtgtagaaagaagtagacatgggagacttttcattttgttctgcactaagaaaaattcctctgccttgggatcctgttgatctgtgaccttacccccaaccctgtgctctctgaaacatgtgctgtgtccactcagggttaaaatgattaagggcggtgcaagatgtgctttgttaaacagatgcttgaaggcagcatgctcgttaagagtcatcaccaatccctaatctcaagtaatcagggacacaaacactgcggaaggccacagggtcctctgcctaggaaaaccagagacctttgttcacttg

SEQ ID NO: 8748 - DNA, 1298 bp, Artificial sequence
  DNA replication origin
ccgcgctccctccccgccctccccgcgccgccgcctcctcctcccggcctccctctcccagccaaactgaaagccggaccccaggccgccgcgctgccgcccggcctccccgccagcgcgccaccatgggcagtcccggtttccccttgtaaagatggcggtgagggatcgctgcaacctttagactaatgactgtccgaaacatcgcctccatctgtaatatggtgagtggccgagccgcctcggggtcgcgcccgactcgcggcgaggcaaagaaagggaagcccgagctgcacacacgcccggtggctggggcggcgggggcggcggggtccgcgccgccagaagttcccggcccccgagctgggcgcgcggccgcagccacctcagcggccggggagggtccccgagcccccggcgcccgtctcagccccgggacctcggaacccgcccggcgatcccggggccgcgctgctgcgccccccgccctcgggttgcggtggaagcggcttgagggaagggaagcgaccgaacctgaacgtccccggggagggggtgggggataagctggaggtggggggcacccatcctcttcttgcggtcaagacagccttattggacgtccagactgccctcatctcattttgagttcagtccttccgaggtgtttaaaattcactttgcaatagcaattgtgtatctggagaaatcggaaatgtaataaagctgtaaaaaaagtgcaaaattgtggctggagaagtgaacttcaacctggtttgaaaaagcaccgtaatttgctccgcatgcctcagtttccccatctgtgaaaaagggacaaggctctgtggcggtaatatttgcaggccctaagggtggggcgggctgtgggcttggaggaggtctccagggttatcctgcctgatccgctgtagacctaggggaggctggcgggcatggatacagccagggacatcactgggttctgatgcagtccgagcccatgatgcggtggtcactttaatttgggtttcccccattgctttccctttttctgtaggaagaacctccagcccttgggtccccaggctggaccctgctggcgcctccacttgtcagagcctttggggagctcagattggagtaaggcattgctgtcccttgcagggtgagatgatgtgtgttttgcctacattctttagactgcaccccgcctcccctctagccccctcccaagcgggtccccggaggcaacacgtgctcttacagtgccagtttgaggaaaacctcccttgaagcta

SEQ ID NO: 8749 - DNA, 945 bp, Artificial sequence
  DNA replication origin
attgttacggtgcccagacctgcgccgggaacctccggctgttccgctgggcgcggcgcctgtgcctcgcgcagccccgggacgggcaccgccgcccgccccccgggccgccgagggctgctctacccctccgttctggccgccgggagcagaggagctcgaggcgggcaaagctcgtggggacaccgggcgagcccagcccctgatcggacccacgggccggccgggcgccctccccgcgggagaccgaaagccgaagactggagatgcactcaccgcgcaactccagctgacaaagaggcctgcgacctgcgacgggcgcacaaaccagagaggcggcgcggggcggggagggaagcaggagggtcgcgaggcccgcagccaatcccgggaagactctgggcaagggcggggcgcgcagccgatcccctggagaggtcgggtagctcagccaatcccgggaagatcctgagcggggcggggtggagggccgcggcacgcacagccaatcccggatggggcgggacgggcccggccattggctgtcggtgtccggggccggcctaggtgtggctcatgcagtagcacggggataagccatgtctgcgcgcggagcatccttctctgaattagatttttcaggctacctaccaatccccggcgttggtgattttggtgctcttgggccctagacccttcctcgggtgcccttctggagagggcatcgaggttactccagggttggcctaaggccctgggattccctttcttaaagccacactaatccggtgtgtgttcatcatctgtgtccgcctaaaccgtaagcttaaagagaagccacgaccatgtcttgttcaacaagctcactcccgtggcctctcctaaagctagaaggactacctcctttcctcatgctccctctttattcatttacagagtccaata

SEQ ID NO: 8750 - DNA, 1281 bp, Artificial sequence
  DNA replication origin
tgcggggctccgcggtaagaaataacaacaataaataagtgcaggtacgggcggggtggggccgagcgccgaggttccgcagggctcaggctccagacccagactgcactcgcgcggcgcgccggctgttttctccgcggccggccccgccccctctccccacagccaatcccggggcgccctacacgaggccccgcccccggcgccgctccgcgcgcgcgacgcccccggaggcgcctggagtcagtgcggagccccgtgaggcgcggggagaagaggcagcgggcggaggggagcagcgggtggtccgaggcggcgcagcccagggtgggcgcctggtaggtcctgccgcgcgagcatggggcagctgctgtggctgcggggccaggaagagagcgcagcctccacagagccattccggaccgctgcctccgccggctccacagcccacgcgcgcactcgctgcagccccaacctagggcgtctgctctgggcgggccgggagcggtgtttgctccccggcttagtgccgcccgccctgatttggagcgattgcactggcttgggtacatcccagctcatagattcagctacagttggcaatcatccgcaaagactccagcctaagacctttagacccccgtaaaatgtgacatttgaagcaaaaatatcatccacgttttatcctagacccacgttctctggctcttgtcgacggcgcaagctaacgcaaacacacatggtcggacgcatgcacagcacgcctagaagcggatcaagaagtaattatagaacaagctttccagcgcctcactcagtcacacctccttcaagagctgtgaaatggaaagaaaacagttactccagctgcgacgtctgaaggggccccgcacttcgtccctggtcataagacaccgcaagagtttagttaagtggcttgataccaaggaagaggtgggccctgcactcctaaaatcccaagctccggccccttacagtctcatctgagaaacacatcttcaacggcaggccaaattcctcctgcgagcaacattctgtagctgcagctgatggcaagatgtcaccagcggctgatggcaaaatgtcaccagagtcgcgggttaaccaccccatccgctatccaaggccctctccccgctaccctttcaaccttgtcccagaggcttttatgttggggtatggcaacaaactctgtggctttgtgtacccacccacattaaaggctaaaatgtgaaataaaccagtgcccttatccgcaca

SEQ ID NO: 8751 - DNA, 1432 bp, Artificial sequence
  DNA replication origin
gctccgcactgactccaggcgcctccgggggcgtcgcgcgcgcggagcggcgccgggggcggggcctcgtgtagggcgccccgggattggctgtggggagagggggcggggccggccgcggagaaaacagccggcgcgccgcgcgagtgcagtctgggtctggagcctgagccctgcggaacctcggcgctcggccccaccccgcccgtacctgcacttatttattgttgttatttcttaccgcggagccccgcagtcgggtcctcccgcccgctcccgcgcagcgctagcattctccagtccctcagtcccttcccgcgcggtgcgccgcagccgaggcgatgcgcctcattcagaacatgtgcaccatcgccgagtaccccgcgccgggcaacgccgcggcctccgactgctgtgtgggcgccgccggccgccgcctggtcaagatcgccgtggtgggcgccagcggcgtgggcaagaccggtgagtcgtcgcgcttagccctgggtctggtcttggacgacccctgacgggagttgaggctgaacaaggcgtggggagcggtgggagctgcagcccgaccgctctccgtccccgcgcagggagccgctgccccttgggagtgggcttagccgttgtctacgccacccgcctgcttccacagacgggggaaacaaggatcaagaatggccaggcagctttctggggaccaccggcaccgccgccatcagaactttggggtgtttgagcctctggcaatgcctggcacagaaaggggagttagtgaagctagcccccctgggaggtcttgaaggttaggaagacatgggtctactggaaggcttaggtgtggctcagccgggctcagaggagggggtgggcccagtgagccttccagctgcacagagccataattcacgatgccttctagccccctcctttttgtctggaaagaagggtcaaggagctacagggtaggaatttcacttggtggccatctatggctttctttgggagaactgttttccaggcagggggtggggtggagaacaatctaacttccaaggttaacactttgacgttcttttttctgacgtgcagcactggtggtccggttcctcaccaaacgattcatcggtgactatgaaagaaatgcaggtgagacaatgcatttgagaaaaattctgtcccattgcaggaggactgcggttcccattttccagcgcttcccagggaggttctttcagtgacagtccgagcctgaggatcccgccacttaaaactttccccagtccccagccctccatggcgcccccctcccataactaccatctggcctcattccattccaagcccattcatcattttatcaagtgcctgaaagtattccccttggtatgttttaactatagtgaccccagttggaagcacc

SEQ ID NO: 8752 - DNA, 1103 bp, Artificial sequence
  DNA replication origin
ttgggggtaaggttatagattaacagcatcccaaggcagaagaatttttcttagtacagaacaaaatggagtctcctacgtctacttccctctgcacagacacagcaacaatctgatttctctatcttttccccacatttcccccttttctattcgacaaaaccgccatcgtcatcatggcccgttctcaatgagctgttgggtacacctcccagacggggtgactgctgggcagaggggctcctcacttcccagacggggcagccgggcagaggcatcccccacctccctcccggacggggcggctgcctggcggagggggggcttcacttcacacatggggcggctgccgggcggaggggctcttcacttctcagacggggcggccgggcggagacgctcctcacctcccagatggggtggcggccaggcagaggcactcctcacatcccagaaggggtggcggggcagaggcactccccacatctcagacgatgggcggccgggcagagacgctcctcacttcctagaggggatggcggccgggaagaggtgctcctcacttgccagactgggtggccgggcagaggggctcctcacatcccagacgatgggcggccatgcagagacgctcctcacttcccagacggggtggcggcccggcagaggctgcaatctcggcactttgggaggccaaggcaggcggctgggaggtggaggttgtagcgagccgagatcacgccactgcactccagcctgggcaacattgagcactgagtgagggagactccgtctgcaatcccggcacctcaggaggccgaggctggcagatcactcgcggttaggagctggagaccagcccggccaacacagcgaaaccccgtctccaccaaaaaaataggaaaaccagtcaggcgtggtggcgcgctcctgcaatcccaggcactcgacaggctgaggcaggagaatcaggcagggaggttgcagtgagctgagatggtggcagtacagtccagcttcggctcggcatcagagggagaccgtggggagagggagactgcggggagagggagaccgtggggagagggagactgtggggagag

SEQ ID NO: 8753 - DNA, 1003 bp, Artificial sequence
  DNA replication origin
cgtcagggagggagatgggtggggggcgcctctgcccggccgcccctactgggaagtgaggagcccctctgcccggccagccgccccgtccgggatggaggtgggggggtcagccccccgcccggccagccgccccgtccgggaggtgaggggcgcctctgcctggccgcccctactgggaagtgaggagcccctctgcccggccagccgccccgtccgggagggaggtgggggggtcagccccccgcccggccagccgccccgtccgggaggtgaggggcgcctctgcccggccgcccctactgggaagtgaggagcccctctgcccggccagccgccccatctgggagagaggtgggggtcagccccccgcccggccagccgcccgtccgggagggaggtgggggggtcagcccccccgcccggccagaccccccatccgggaagtgaggggcgcctctgcccggccgccccctactgggaagtgaggagcccgtctgcccggccaccaccccgtctgggaggtgtagccaacagctcattgagaacgggccaggatgacaatggcggctttgtggaatagaaaggcaggaaaggtggggaaaagattgagaaatcggatggttgccgtgtctgtgtagaaagaagtagacatgggagacttttcattttgttctgtactaagaaaaattcttctgccttgggatcctgttgatctatgaccttacccccaaccctgtgctctctgaaacatgtgctgtgtccactcagggttgaatggattaagggcggtgcaagatgtgctttgttaaacagatgcttgaaggcagcatgctcgttaagagtcatcaccactccctaatctcaagtacccagggacacaaacactgcggaaggccgcagggtcctctgcctaggaaaaccagagacctttgttcacttgtttagctactgaccttccctccactattgtcctatgaccctgccaaatccccctctgtga

SEQ ID NO: 8754 - DNA, 1399 bp, Artificial sequence
  DNA replication origin
ccctcacctcccagacggggtggctggccgggcggggggctgacccccccacctccctcccggacggggcggctggccgggcagaggggctcctcacttcccagtaggggcggccaggcagaggcgcccctcacctcctggacggggcagctggccgggtgggggctgacccccccacctccctcctggacggggcggctggccgggcgggggctgatgcccccacctccctcccggacagggcggctggcctggcggggggctgacccccctacctccctcccggatgggcggctggccgggcagggggctgacccccccacctccctcccggatggggcggctggtggggcgggggctgacccccccacctccctcccggatggggtggctgccgggcggagacgctcctcacttcccagatggggcggctgccgggcggaggggctcctcacttcccagacggggcggctgccaggcggaggagctcctcgcttctcagacggggtggccgggcagagatgctcctcacctcccagacggggttgcggccgggcagaggtgctcctcacatcccagacggggcggcggggcagaggcgctccccacatctcagacgatgggcggccgggcagagacgctcctcacttcctagatgtgatggcggccgggcagaggtgctcctcacttcctaggtgggatggcggccgggcggagacgctcctcactttccagactgggcagccaggcagaggggctcctcacatcccagatgatgggcggccaggcagagatgctcctcacttcccagacggggtggcggccgggcagaggctgcaatctcggcactttgggaggccaaggcaggcgtctgggaggtggaggttgtagcgagccgagatcacgctactgcactccagcctgggcaccattgagcactgagtgaacgagactccatctgcaatcccagcacctcaggaggccgaggctggtggatcacgtgcggttaggggctggagactggcctggccaacacagcgaaaccccgtctccaccaaaaccagtcaggcgtggcggcgcgagtctgcaatcgcaggcactcggcaggctgagtcaggagagtcaggcagggaggttgcagtgagccgagatggcagcagtacagtccagctttggctcagcatgagagggagaccgtggaaagagagggagagggagaccatggaaagagagggagagggagaccgtggggagagtgagagggagagggagagggagaggagggagaggagggagagggagagggagagggagagggagagagcgtccccaatcttttaagtcaaagtcactgttttaataagacggagtttcgctcttgttgcccaagctggagtgc

SEQ ID NO: 8755 - DNA, 966 bp, Artificial sequence
  DNA replication origin
gaccctctgcctggcaactgccctgtctgagaagtcaggagtccctccgcccggcagccgccccgtctgagaagtgaggagcccctccgtccggcagccaccccgtctgggaagtgaggagcgtctccgcccggcagccaccccgtccgggagggaggtgggggtcagcccccaccaggccagccgccccgtccggaagggaggtggggggtcagacccccgcccggccagccgccccgtctgggagggaggtgggggggtcagccccccacccggccagccaccccatccgggaggtgaggggcgcctctgcccggccgcccctactgggaagtgaggagcccctctgcccggccagccgccccgtccgggatggaggtgggggggtcagccccccgcccggccagctgcccggtccgggaggtgaggggcgcctctgcccggccgcccctactgggaagtgaggagcccctctgcccggccaccaccccgtctgggaggtgtagccaacagctcattgagaacgggccatgatgacaatggaggttttgtggaatagaaacgggggaaaggtggggaaaagattgagaaatcggatggttgccgtgtctgtgtagaaagaagtagacatgggagacttttcattttcttctgtactaagaaaaattcttctgccttgggatcctgttgatctgtgaccttacccccaaccctgtgctctctgaaacatgtgctgtgtccactcagggttaaatggattaagggcagtgcaagatgtgctttgttaaacagatgcttgaaggcagcatgctccttaagagtcatcaccactccccaatcttaagtacccagggacacaaacactgcggaaggccgcagggtcctctgcctaggaaaaccagagaccgttgttcacttgtttatctgctgaccttccctccactattgtcctatgaccctgccaac

SEQ ID NO: 8756 - DNA, 1204 bp, Artificial sequence
  DNA replication origin
ttctcaatcttttccccacctttcccccgtttctattccacaaaacctccattgtcatcatggcccgttctcaatgagctgttggctacacctcccagacggggtggtggccgggcagaggggctcctcacttcccagtaggggcggccgggcagaggcgcccctcacctcccggaccgggcagctggccgggcggggggctgacccccccacctccatcccggacggggcggctggccgggcagaggggctcctcacttcccagtaggggcggccgggcagaggcgcccctcacctcccggatggggtggctggccgggtggggggctgacccccccacctccctcccagacggggcggctggccgggcgggggtctgaccccccacctcccttccggacggggcggctggcctggtgggggctgacccccacctccctcccggacggggtggctgccgggcggagacgctcctcacttcccagacggggtggctgccggacggaggggctcctcacttctcagacggggcggctgccgggcggagggactcctgacttctcagacagggcagttgccaggcagagggtctcctcacttctcagacggggcagccgggcagaggcgctcctcacatcccagatggggcggcggggcagaggcgctccccacatctcagacgatgggcagccgggcagagacgctcctcacttcctagatgggatggcggccgggcagagacgctccccactttccagactgggcagcagaggggctcctcacatcccagacgatgggcgaccaggcagagacgctcctcacttcccagacggggtggcggccgggcagaggctgcaatctcggcactttgggaggccaaggcaggcggctgggaggtggttgtagtgagctgagatcacgccactgcactccagcctgggcaccattgagcactgagtgaacgagactccatctgcaatcccggcacctcgggaggccgaggctggcggatcactcgcgattaggagctggagaccagcctggccaacacagcaaaaccctgtctccaccaaaaaaatacgaaaaccagtcaggcgtggtggcgggcaggcactcggcaggctgaggcaggagaatcaggcaggggggttgcagtgagccgagatggcagcagtacagtccagcttcggctaggcatcagagg

SEQ ID NO: 8757 - DNA, 1046 bp, Artificial sequence
  DNA replication origin
ctcacttcccagacggggtggcggccgggcagaggctgcaatctcggcactttgggaggccaaggcaggcggctgggaggtggttgtagtgagctgagatcacgccactgcactccagcctgggcaccattgagcactgagtgaacgagactccatctgcaatcccggcacctcgggaggccgaggctggcggatcactcgcgattaggagctggagaccagcctggccaacacagcaaaaccctgtctccaccaaaaaaatacgaaaaccagtcaggcgtggtggcgggcaggcactcggcaggctgaggcaggagaatcaggcaggggggttgcagtgagccgagatggcagcagtacagtccagcttcggctaggcatcagagggagaccgtggaaagagagggagagggagaccgtggggagagggagagggagagagggagggggacggggagggggagggggagggggagggagagggagagctaaaccttttttctttataaatcatccagtctcaggtatttcctcatagcagtgtgagaagggactaatacagtgacaatataatctgtacaacaaactcccatgacacgagtttctctatgtaacaaacctacacatgcgcccctgaacctaaaagtgtaacacacacacacacacacgaagccaaatatcacctttaatacagatagagaggccaaaccaggtggtagaatgtgaggtctattagccaagtgagcttgctaatatggggctccagaaggcagccttttcttctcggtcacaggcaagctatgagcaggctaggcctcccatgaaggggcaggacagagtgcctgttccctatagtcagttcaatgtgaagaagagtgcagaaagaaacagcagctgtcacacaataaaggcagatcctaaccctggaaggctgagccccgcagtgctctgtatagtcagggcgcctcctaagcggagaagaggtagagttgagccacttcttattccatcattccaaatttaccaatcagatagaacatccctct

SEQ ID NO: 8758 - DNA, 1033 bp, Artificial sequence
  DNA replication origin
ggaaggagggagtaagagggaaggaaggaagaagggagggagggagggagggagggagggagggggaagggaaggggaggggagaaagggaagggaagggaatgggaggggagaaagggaagggaaggaaatgggaggggaggagagaagaagggagggtagggaagacaatggcagagagagagggaaggacaaagggaaggaaggaagaaggaaggaaggggaagggaaggtaaaagggaaggaaggaggaaggcaggaaggaagaagggaagggaaaggaaaagaaagaagggagggagggaggaaggaagggagggagggacaaagggaagggaagggagggaggggttgagggagggaggggaaaggaagggaggaaagaaggaaggagaagggagataaagaggaagggagggagggagggagggacggagagagggaggggatagtaaaggagggcttctctgaagatcgtcagagaaagaccaagagtctttggccaatgagagaatcagcttcctgctctgtgactgatgctgctgacatccagggagccccaaatgccttccttgacagggggtacttctgcaacacctgccccagttctaggcacatcagcatctccagcttgcattagtggtcactgggccctggctggattgacactatgacctactggagagggaagaaacagaaacaccagagtcttgagtgaaaactccctgtctccctcccacctctggttcctcggccacactgagaaatatactttaagatcagactccaaagcccacgactgactttacttggagtggagatgggatcagtgtgtgtgtgtggcatgcgggcgggcgggaggtggttaataaacttctttctttgatgattgtgaagacacaggctctctctccttagcaagggcttctcatttgaagcagcgcgtgataactcattgtgtgaccgcctgttttctctgcagatctgagctgaaaaggatcataccagatttatttcattgctgtagagccag

SEQ ID NO: 8759 - DNA, 2204 bp, Artificial sequence
  DNA replication origin
gagcgcaggtgccccaagaccccgccctacccatggtgaggcagtggaatctccgcgggtccgccacgttgtaggtggtggcggtgcagacaggtgcgtggtgctgcgggtgccccaaggccgccgcggccgccgccgccgctgctgctgctgccgccgccgcggccgagccaggctgctggggctgatgatggtgatggtggtgctgcggcgggtggtggtgatgatgcgcatggttcacccgcgggcaaaactgcgcgtccccaggagccgaagagaactggcccttaagcagaggcagtgcccctgcggcccctgccaccccactgcctccggccccggtaaccccggcccctgcgcccccgctgccggcgcccacagacccccgagaggagtgcaggtgcgaagtgacgcagagagggcacacgcagaacgcgccgctcttgcgggacgggcagccggggccggacacggacatcaccaatgggggcggcatgccaagcgggatgaagaaatccggcccggggtgcggttcaggcagcgagggcgcaggccgtgaggtgtccttgatgatgagcgagtcgacatagaaggagcgcgacatgtcgagaggggtgggtggctggaagccccggcagttcgcggcgacccctctcctctagtgttctaagctctgccctgggagccgcgcagacacgggcagtcaagcccttggggacgcagaggtgttggcgtctgggctgggaacaaaggggtccccggagagggctggtcctcacgtcccccgcccggcgccccggctcgggtattttatagccccccaccctggcacgtgatgctgcggagtaccgctcggctcaggctcctcggcagctccgcaccctcgggataggctgcccgagtcacaacagaagccgcgaggaggggcgggcgcgcggcggggaagaactcgggggagggggatgggggagactttgcaaagtgtaggttttgttaatttcccggggaggccggcctcctccccctctttctccacgctttactgagaaatcacagcgctgcatcctccatcccaccccctctcgctaccctggccgcagcccaactcttccccacgccccaccgcaaagcgtaccaggtggggacttggaggcttatttaataggaatgctcagtgtttccagctcctctgtggtaggggtggctgcggcgcggtgaagtgtgaggcctgcggtttggagcaggattgtgcgggcgacggactggcagtcgtccagtccctgagcgcagctctggccacggttacacctacccctgtccacagcttttggacttggcagaggtcattcaggtggttagttcaggactgtccggcgcagaactgtgaggcctcccagctaagaaaccgtcaagcttttcatgctgatgttcgacaaggtctgaagtgtctttgtacttggggccctcctggggccactcagaccaacgacccttccttgtttccctttctgatcggcacctcccacttccgcagagagagagagatgttgaagagtcacccttttctttctccaagtagtaacaccatggcattccagggcaatcctacaaactccatcctgaagattttggagggaggacctcaaacaccaagccctcctaaagacgcagcagggattagatagaccttcgctctgggtctgaggatttcctgtccctcatttttaccaatcatgggcagcttagcaaggctaaccaggaagcactctttcctctgcatcttaagaacctaaaaaggatgaagaggattcagccatccagggaatcttgcctctgattggcagaagtggctttgtaagggaactctctctggtccatggaagtcttgcacaccccttactgcccgagagagggtggctgccaaactattgggactatttatcttcggagaaggcaaggcagcagaggtggccattttctctcttcatttccccctgcagaaaagcgggctggggccatgtggttgggcaatagttagaagtctgatcctttttccagagcagctaacttcaatcctgagttcatgatggtgctaagaaacttagagacaggactccctccacctgagagaacaaggtgcccaaatccaggagagcactagctagaggcacggctctatctttccatcctctgtcttcccctct

SEQ ID NO: 8760 - DNA, 1466 bp, Artificial sequence
  DNA replication origin
tttcttcatcccgcttggcatgccgcccccattggtgatgtccgtgtccggccccggctgcccgtcccgcaagagcggcgcgttctgcgtgtgccctctctgcgtcacttcgcacctgcactcctctcgggggtctgtgggcgccggcagcgggggcgcaggggccggggttaccggggccggaggcagtggggtggcaggggccgcaggggcactgcctctgcttaagggccagttctcttcggctcctggggacgcgcagttttgcccgcgggtgaaccatgcgcatcatcaccaccacccgccgcagcaccaccatcaccatcatcagccccagcagcctggctcggccgcggcggcggcagcagcagcagcggcggcggcggccgcggcggccttggggcacccgcagcaccacgcacctgtctgcaccgccaccacctacaacgtggcggacccgcggagattccactgcctcaccatgggtagggcggggtcttggggcacctgcgctccgcgcctttcgcgctcctggagcaaactttccacctccagtggaggaagtgggagcccggggacagggtgaagagagaggacgggcttttagtgtaaccgtagagtcagccacagaagttccacgaaagtggaagttagtttgccagcttctccactcagcctggtgcgttttactcctagtagtaggtgctcgagtattgccttattaatactggggccttagggacctcgaacgtcacggcggataaaccagaggttaactgcttgggatttggggtgggtgtgtttgaacctgtgtggcatccccgcgtcggggcggctaaagcgtcttgacgtttttggctaagcctgcgcgcttctccgcttggctcaaagggaggcgatcagatagtgcaagcccccatccctctttaatcctgtgacttcgcatcctgcgcatcgaagacctttatttgctttgcacgtctcttttcttccccgctaagcaaccacgtgccttgaaatgggaaagggatacagatgttcggctgggcttccccgggtgggtccctgaaatgcgtcctggttagcacatggggtgggagcaccttgcccgagccttacctctctaccctctcttcgccggtccgcaggaggctctgacgccagccaggtacccaatggcaagaggatgaggacggcgttcactagcacgcaactcctggagctggagagagaattctcttccaacatgtacctgtctcgactccggaggattgaaatcgccacttacctgaacctgtcggagaagcaggtgaaaatctggtttcagaaccgccgagtgaagcacaagaaggaggggaagggcacgcagaggaacagtcacgcgggctgcaagtgcgtcgggagccaggtgcactacgcgcgctccgaggatgaggactccctgtcgccggcctcagccaacgatg

SEQ ID NO: 8761 - DNA, 1480 bp, Artificial sequence
  DNA replication origin
ctattgataattttcttcgcttccttggggagagtaaaagggagagaacacagtctgagtagttcctcttcaaaataagctgggcgcagtggctcacgcctgtaatcccagcaatttgggaggccaaggagggcagaacacctgaggtcaggaatttgagaccagcctggctaacatggtgaaaccccgtttctactaaaaattcaaaaaattagctgggcctggtggcgcttgcctgtaatcccatctactcaggaggctgaagcaggagaatcgcttgaacccaggatgtggaggttgcagtgagctaagatcatgccattgtagtccagcttgggcaacaagagcaaaactccatctcaaaataaataaataaatacagaaaatataatcgaagttgggaagggtcgttgtcctatccagccagtggggcggggcccagtcttaactggaagcattgggtttcattgcctcagtctgctctgctacaggactttgttactcagaccagccctccctgcccttgcacagggattctttcagcaggctgagggacactgttcccatggtatgtccgtaattggtgggttcttggtctcactgacttcaataatcaagctgcagaccctcatggtgactgttaacagttcttaaacatagtgtgactggagtttgttccttctgatgtttggacgtgttcggagtttcttccttctgctgggttcctggtcccactagcttcaggagtgaagctacagacattcgctgggagtgttacacctcttaaggcagcactggagttgttcattcctctcagtgggttcatgatctcactagcttcaggagtgaagctacataccttcaggtgagtgtcacagctcataaaggcagcaaggctccaaaaagtgagcagccacaagtcttattaggaagaacaaaagaacaaacctgccacaacatggtagacgacccaagcagattgccgctgctggctctggcaccctgcttttattcccttatctcactccacccacatcctgctgattcgcccattttacagagagctgattggtccattttacaaagagctgattggtctgttttatagagagctgattggtccgttttgacagggtgctgattggtgcgtttacaatccctgagctagacacagagtgctgattggtgtatttacaatcctctagctagacataaaagtgctccaagtccctactagattagctagacacagagcactgattggtgcatttataaaccttgagcttgacacagggtgctgattggtgcgtctacgaacccctgccccccaccaatgctagacacagagtgctgattggtgcatttacaatcctccagctagacataaaagttctccaagtccccactccactcaggaacccagctggctttgcctagtggattcccgccccaaggctgctggcagagctgcccaccagtg

SEQ ID NO: 8762 - DNA, 1070 bp, Artificial sequence
  DNA replication origin
tgaggactcattgcttttttcttttttaataagttattgaggtaaaattcagataacataaatacttaaaagtaaacaattccatagcattgagtatattcgcaatattgtacaaccatcacctctatcgaattccagaaacattttcatctcgccaaagtaaaattccttacccactaagcagtttctcccctttccaccttttcccagcccctggcaggactcacagctctgaagccagcttttttcctactagataccctacataccttccagctagatcaaaagcagattcttgtctgcttttgatctagcaagaaggtatgtagggtatctagtaggaaaagcaccctgggaggctaaggcaggaggatcacttgagctcaggagttcaagactagccttggcaacacattgagatgctgtctctacaaaaaaaattaaacattagccaagtgtggtggtgcatacctatagtcccagctacttgggaggctgaggcagaagggttgcttgagaccagggggtggaacctgcagtaagccatgattgtgccactgtactccagcctgcgtgacagagagagaacttaaacaaacaaaaacctcatagattctgacaaaaaagacacgatgcaaaataatactggtgtgaggggcaattacgggagacactcatttatgttttgtcttctctgtttaggaggtgtggtgtaaggagtgacatttcggcccctcacactgtttattcttttgcaggtgggtgagatagaagtctataaaggggaaagagaagaagctgatgctgaaacttaagagatatttctccaagactagagaaagacaagaagaaggagcctctgagagtgataagaggcccaaggtttgcatgcatggagcaccagtaagagatggcttcaggaagccagagagctaggccggggacacagataccttgggaaccacagcgagagtgtccgtgggctgaggcagtggtcagtggagagacccattgagaggtgacaacatgctagtagccctgcctcgctctcggcacctcctcaagccacg

SEQ ID NO: 8763 - DNA, 1450 bp, Artificial sequence
  DNA replication origin
accgcccggggctggggaaagcgggatgcgtccccggagcccactagagggcgcgacagccccgcgaatcttacccggctcgccagctagctcgcccgcagcccaggctcctggtccccgacagcgcagccgggagtgctgcgcgcagacttcgcccgggaggctctgcgctcggactgtccagcccccgccactgtccggcttctgaccccgggacccagaggaacactgcgcggtccgctctccctcccacctccaccaagtcctcggcggcttggttgtcccggggttggcggcgatgcccagccgctccggggacctgcgcccctgcgcccctgcgcgccgcgctctgaacctcagagctgcagaggccgctgcgccccaggcacgacgctctgcgtttgcattgttttcaactgagacccgagagggggccgggcgggtgtggagagaggggggagagcgggaagagaatccgggcgggtggggggaaaggggccgaggggtttagggttacaggagctcgccagcgcctcctatgggcacgagagccgcacggccgtgggtagcggctcaccgggaatgctgaggagagctagcatgcgccctctcggcatttaagaaccgttcctggccgggcgcggtggcttacgcctgtaaatcccagcactttgggaggccgaggtgggcggatcacctgaggtcaggagttcgagaccagcatggccaatatggtgaaaccccgtctctactaaaaatacaaaaattagcctggcgtggtggcgggcacctgtaatcccagttactcgggaggctgaggcaggagaatcgcttgaacctgggaggcagaggttgcagtgagccgagatcgcaccactgcacttcagcctgggcgacagagcgagactcttgtcacacacacacacaaaagtgccttctggtgccaccttgcccgacacgcgccatagccgcctctgccccctcaagagtccgcgcccacccgcgcttgtcgctcccctttcgcgggggccgagaaactgcagtaggaggcagggaaggaggcgccccaagtcgggtttcccattattccctcctacaatctactttttcagcccatcccaggttcgctcattgatcagtttaaaacaaaaggaaatgccgccgagccacttcagcaaacgacaaccatctggcagaacccgaattagggggaagttgggagaagccatttgcccccgatcctgcatcttgcgccccaggcgagaccgaaagattatctgccgccccaaggctgatgctgcggttggacccggcgagttagacccggggaaccctgagacccacacctttcggtcaccgatccggcttttagctcttttcctagaattgtcacttttccaccagcaacgtataacctggtcgcagctccccggaggtcaaagggagtact

SEQ ID NO: 8764 - DNA, 925 bp, Artificial sequence
  DNA replication origin
tgaggagaccctatgcctggcaactgccccgtctgagaagtgaggagcccctccgcccagtagctgccccatctgagaagtgaggagcctctccgcccggcagccaccccgtctgggaagtgaggagcatctccgcccggcagccaccccgtccgggagggagttgggggggtcagccccccgcccggccagccgccccgtccaggagggaggtgggggggtcagccccccgcccggccagccgccccgtccgggagggaggtggaggggtcaggcccccgcccggccagccgccccgtccgggagggaggtgggggggtcagccccccgcccagccagccgccctgtccgggagggaggtgggggggtcagccccccgcccggccagccgccccatccgggaggtgaggggcgcctatgcccagccgcccctactgggaagtgaggagcccctctgcccggccagccgccccgtccgggaggtgtacccaacagctcattgagaacgggccaggatgacaatcgcggctttgtggaatagaaaggggggaaaggtgaggaaaagattgagaaatcggatggttgccgtgtctgtgtagaaagaggtagacatgggagacttttcattttgttctatactaagaaaaattcttctgccttgggatcctgttgatctgtgaccttgcccccagccctgtgctctctgaaacatgtgctgtgtccactcagggttaaatggattaagggcggtgcaagatgtgctttgttaaacagatgtttgaaggcagcatgctcgttaagagtcgtcgccactccctaatctcaagtacccagggacacaaacactgcggaaggccgcagggtcctctgcctaggaaaaccagagacctttgttcacttgtttatctgctgaccttccctccac

SEQ ID NO: 8765 - DNA, 1273 bp, Artificial sequence
  DNA replication origin
tttctcaatcttttcctcacctttcccccctttctattccacaaagccgcgattgtcatcctggcccgttctcaatgagctgttgggtacacctcccggacggggcggctggccgggcagaggggctcctcacttcccagtaggggcggctgggcataggcgcccctcacctcccggatggggcggctggccgggcggggggctgacccccccacctccctcccggacagggcggctggctgggcggggggctgacccccccacctccctcccggacggggcggctggccgggcgggggcctgacccctccacctccctcccggacggggcggctggccgggcggggggctgacccccccacctccctcctggacggggcggctggccgggcggggggctgacccccccaactccctcccggacggggtggctgccgggcggagatgctcctcacttcccagacggggtggctgccgggcggagaggctcctcacttctcagatggggcagctactgggcggaggggctcctcacttctcagacggggcagttgccaggcatagggtctcctcacttctcagacggggtggccgggcagagatgctcctcacctcccggtcgcggccgggcagaggcgctcctcacatcccagatggggcggcggggcagaggcgctccccacatctcagacgatgggcggctgggcagagacgctcttcacttcctagatgggatggcggctgggaagaggcgctcctcacttcctagatgggatggcggccggacggagaggctcctcactttccagactgggcagccaggcagaggggctcctcacatcccagacgatgggcggccaggcagagacactcctcacttcccagacggggtggcggccgggcagaggatgcaatcttggcactttgggaggccaaggcaggcggctgggaggtggaggttgtagggagctgacatcacgccactgcactccagccggggcaccattgagcactgagtgaacgagactccgtctgcaatcccggcacctcgggaggccgaggctggcagatcactcgcggttaggagctggagaccggccaacacagcgaaaccccgtctccaccaaaaaaatacgaaaaccagtcaggcgtggcagcgcgtgcctgcaatcgcaggcactcggcaggctgaggcaggagaatcaggcagggaggttgcagtgagccgagatggcagcagtacagtccagcttcggctcggcatgagagggag

SEQ ID NO: 8766 - DNA, 1353 bp, Artificial sequence
  DNA replication origin
agatactgaattaaatcacatctgcaaactcgcttttgccatgtgaagttaacatgttcacagattctggggattaggatgcagacatcttcagggtaccattattcaggctaccacactacctaaattttggtatccaaaaatttggttcatctccctattaatttgtgacctcaaacaagtcacttctctctaaccttgccatctatatcagtagcagtattttacttgatttctttactttgagggtttatggggtaatccatataaaatgtctaccactgagccttgcatggtgtaagtgctagttcccctctcccttctctaccacatgagttaacattgtggagatgatggttgggaaagggcactgggactcttgccagctgtcgcaggctgaattcctgagaaaattgactttgcaatggagatatgcatgcagaaagtatattaaggcatggtcttaaggtggacacctgtacggggtgtgaaagaagcaggacttggcagagggagaagctgggctgccatgaaaaggcaacagaggcccatggggaactcagagttgactcaaattaggacaaggggccaggcttttacatccctccatgaactagtcattatatgtgagttgcccagagagggccatgacattggccaagctggctctctcccatggagacaatcctgggggggagggactcatccgtgacctacacttccagcagctgggggaatgcatgccccagtcatgcagcaaagacctggagaatgtcccatagcatccactacagcagctaaccctcttggctcattaagtgaagaccagagagaaaacagaaggtaagtgtcctagcaaggctatatacctcagaggttcaggggttttgctcccaagcaggtaagcctgaattcaaatcccttcttcccattgtatgatttgggacatgccctttaacatctttgtgtctcagcttcctcatctctaatttagaggatttatctcataattattgtaaggattaaaaggatagtcaatgtctctgcaaccatggacagttggtcccatacatgttagattttgtggttaatagcattctcagaaccccttgcctacttgtcctttttggctcaaatctagatgtttaaaataggggctggaaagaaaaaagaagactcctacaagaacactcatcatgatttaagacatgtttcagtaaagacagggatcgggggttggagggtgggaagagggggtgttaatgagaggtgacagcgtgctggcagccctcgcagccctccctcactctcggcacctcctctgcctgggctcccactttggcggcacttgag

SEQ ID NO: 8767 - DNA, 1263 bp, Artificial sequence
  DNA replication origin
ggcacctcctctgcctgggctcccactttggcggcacttgaggagcccttcagcccactgctgcactgtgggagctcctttctgggctggccaaggttggagccggctccctcagcttgcagtgaggcgtggagggagaggcgagagcgggaaccagggctgccggcagcacttgcgggccagctggagttccgggtgggcgtgggcttggcgggccccgcacacggagcgaccggctggccctgctggctccgggtaatgaggggcttagcacccgggccagtggctgtggagggtgtgctgggtcccccagcagtgccggcccaccggcgctgcactcgatttctcgcggggccttagctgcctccccacggggcagggctccggacccgcagcctgccatgcccgagcctccctccgccccttgggctcctgtgtggcccaagcctcccccacgagcgctgacccctgctccacggctcccagtcccattgaccacccaagggctgaggagtgcaggtgcacagcgcgggactggcagacagctccacctgcagccccagtgcgggatccactgggtgaagccaggtgggttcctgagtctggtggggacgtggagaacttttgtgtctagctcagggattgtacacgcaccaatcagcaccctgtcaaaacggaccaatcagctctctgtaaaatggaccaattggctctctgtaaaatggaccaatcagcaggatgtgggtgaggccagataagagaataaaagcagggtgcctcaggtagaagtggcaatctgctcggtcgtcttccacgctgtggatgctttgttctttcactctttgcaataaatgttgctgctgctcactctttgggtccacactgcctttgtgagctgtaacactcacctcgaaggtctgcagtttcacttctgaagctagtgagaccacgaacccaccaggaggaacgaacaactccagacgcaccgccttaagagctgtaacactcaccgcgaaggtctgcagcttcactcctgagccagcaagaccacaaacccaccagaaggaagaaactccgaacacatccgaacatcagaaggaacaaactccagtcacgtgtcctttaagaactgtaacactcaccgccagggtccacggcttcattgttgaagtcagtgagactaagaacccaccaattccggacgcattaagagcacacaatctggagccaagccgtctagttgagattcccagatgtgccact

SEQ ID NO: 8768 - DNA, 1275 bp, Artificial sequence
  DNA replication origin
agcgcctctcatcgcggtagctgcgatgggatccgagctctggtccacgttccagctctcgcccaagtgcagcgagcgcggcaaagccgagcccccagagccgcgagcggcgagcagcagcccctcctcccagcgccctccctctgcgcgccggccacgcccctcctcgcctcccctccctcgcgcccgcccgggtctcgcttcttcccggcggcgtctggcccctgctctttcgacgtgttaatgccggggggccgtgcccgccgggaggaggagggcgcgcgcgccctctctccccgctcttgactccggagcccctttctctctccacctttccacccctgggatgtggacggccaggctgaggccgttcccggaccaaggaggtgctgcccgctcgctttgtgaagctgggcaccacgcacacgttagggcacgggcccgccacctgccaggtgctccccagacaataaaggtcgactgcccgcccctcgagcacgttcgggcgggaggaggctggacgccgctgctcgtggaggtggcatggggatggggaggggagcgttaggaaattgagccccgacattcccctccaggcctgttaggagctcctggcaccgcggtaaaggctgagcccggtttcgctaattgtttctgctcaatttctccacctgcttcgtaacctgtaggaacacagtgggttcctattggtcggcgtggcctccgcccaagaagcccctgccgggacttgtgtggagacaggggcgatggagggcgcgtggcgaagtttgctctgggagcccaggttttcatacacgttttcccccctccccccaacgctgccaaccccagtaatgatttctctgcctctgtaacagacgacagttttagggctagggctcttaactgcccttgccggtcccaggagcaaaataaaagtacaatgattctcttaagcccgatttcactgcccagaaagtgccttacccacagtctcatggtggatccttgaacggaaagcaacaacagtatctgtataggggttaatagttcttccccacagcgactcgtcttttcatgctcacgataacagctttgtgaggagggtagagcaggtatgtttattattgtagtgagggaagacccagggcttgaacacttattggaagacctactccaagaaagatgagctttccctatgcattctgataaactaataagacatccctcctgagagcttaagaatggaaaaataaatggcagatgcccatcaga

SEQ ID NO: 8769 - DNA, 1897 bp, Artificial sequence
  DNA replication origin
ccatgccacctccacgagcagcggcgtccagcctcctcccgcccgaacgtgctcgaggggcgggcagtcgacctttattgtctggggagcacctggcaggtggcgggcccgtgccctaacgtgtgcgtggtgcccagcttcacaaagcgagcgggcagcacctccttggtccgggaacggcctcagcctggccgtccacatcccaggggtggaaaggtggagagagaaaggggctccggagtcaagagcggggagagagggcgcgcgcgccctcctcctcccggcgggcacggccccccggcattaacacgtcgaaagagcaggggccagacgccgccgggaagaagcgagacccgggcgggcgcgagggaggggaggcgaggaggggcgtggccggcgcgcagagggagggcgctgggaggaggggctgctgctcgccgctcgcggctctgggggctcggctttgccgcgctcgctgcacttgggcgagagctggaacgtggaccagagctcggatcccatcgcagctaccgcgatgagaggcgctcgcggcgcctgggattttctctgcgttctgctcctactgcttcgcgtccagacaggtgggacaccgcggctggcaccccgaccgtgcgactactcggcgaagcctgtgcctgggagggtggtacccgccagggtgcatccggagagaggactgcgggccctcagtgcccgtgcgttccagcctccggggagactccaggtggccctcggactctccggcgccctgcctcgctcacctgcgcgaggagaccccagctgctggtggtgggggacgcgaatccggggttcttcgggaatggggacagcaagagggggttaggcgtgagcgaggctgcaggctccgtgcgagtttggggtggcttttgtgccgacgttgcgcggggggcggaggcggggggctcaggggtttgcaccgagcgccttctcttgccgtgcgaggcgcggccgcagcttccttttgttaaaagttgcgtgtgtgtgaccggcgcccgggaggacctgcctgcaggttctccgccgcgctgagggcaaagttagagagccctttctctgctctgcggctactgccttccaaccgcaggcgctctttgtgcccagagctggggaccgacccgctgccgcctctgctcgcggcgccacccgtggagaccaatcgaaggctgcggcgtttccccgcctccgggttaggcttttgcgctgggagtgcgcggcgtggggctgttgtggggccggactcccgcgagcctggaggtggtggcgacagggacaacttgggcagggcgtgtggaaagcagccgctaggttgcagactttttgctttcgtacatcccgtgctcgcccctttctgccgcggcgccgtttcattcctgccgcgcgccccggggcggctggaggctgtgtttgccgcctgctccgggaaggcaagggacagcgtgctgggactctgcgttccctgactccaaccgcctagcacgccggccagagtgcccggcctgcctggcgggttctgaaagcccctagttcccggtgtctgcgacctgtattcgcaggtcctgttttcttcggaaatttttgagattcgtgaccgcccgcctccccgcccccgggacttctatacttcagggctgcctgggggtggggtgggagatggcgtggaactttctgcaaatcctactcagttcttaaagctataacagaaatccaggtatatccgcgcgggaactgggtcttaggtgaaggatttgcaggttgctggagccccttggtcagattcctgcctcccgttcccttttttccaggtgtcgctggtgcgggcgagtgcaggtcgcccagctcacccctgaagccctgc

SEQ ID NO: 8770 - DNA, 932 bp, Artificial sequence
  DNA replication origin
cacacggtgagggcgcggggaaggggagggagcggggggcggcgtgtgtggggccggggggcggcggccaagggtggggaaggcgggagctgaagcccaagtttggcgtgtcgttctagtgtgtcttttcccgggacttcgggccgaggcccgccctgcctgagaggccctctggggcagctggggttacctgcggggcaggggcgggagtggggtgcacggcggggccgggcggcttgagggcgcccggagctgcggccgattccagcagctgggaggcggggaaagacggggaccgggtgccgagagagctttcgctggggacccgctaggccttgtgacccactttattcctgtcaccactcgggcacgtttggagcagcgcccaatggggcgccggggcggccagctcctccggggaacccccgccctcccggcgcccggcccgcgtgccgcagtccgcagtccgaacggccgccgttgccggccgcgggctggttccgttagtggtggtggttccggggttccgttcctaggcagcgcgcggctattagcgtctgactccagcgaccgcgcgcgggttcgagggttggcggcgaggcgctcggtttctcttcttccgtccacccgcgcttcccgttccccgtcaccgccgctggcgtttgtagatttctttccgccagtgaagctgggttttctggagttggctctggcgctctggcccctggagtgtaatttcctacacgcagcgccgcagagtttatattctttgaaagtgtttgtagctttgtagaggtcctcttgttgatggtaggtgagcctaattctgcaagataaaagcctagtctctgacctggcagatgaaagatcaaatcagattgtggtttcctgctattagaatgccgtgctattagactttaaggctttttagc

SEQ ID NO: 8771 - DNA, 853 bp, Artificial sequence
  DNA replication origin
gagcccgcggggtcgctgacgacgcatgcgccgggagggggcgcaatcacggactcggcttgcggctgccggtttaaaaaaggaaaccccggagagcgagagcgcgaaggaaatctggccgccgccgccgcgagcgctcccggtgagaggcgcccgcccggtgggcccagggcctgccgagtgccggttggcttccttggcggcgcatgcgcgctcctgggctggtggaggaggggaagggaagggagggggaggaggagctggccacaggagcggcgaatttttgggggggtgggtggggggcgccactcacagccccaggtgctgctggaggtgggagccgcggcgcctcctggacacaggcggggtagtggttccgagtcaccgcagcgggagacctgggtgggggagggaagaagccggagccgccgcaagccacacggtgagggcgcggggaaggggagggagcggggggcggcgtgtgtggggccggggggcggcggccaagggtggggaaggcgggagctgaagcccaagtttggcgtgtcgttctagtgtgtcttttcccgggacttcgggccgaggcccgccctgcctgagaggccctctggggcagctggggttacctgcggggcaggggcgggagtggggtgcacggcggggccgggcggcttgagggcgcccggagctgcggccgattccagcagctgggaggcggggaaagacggggaccgggtgccgagagagctttcgctggggacccgctaggccttgtgacccactttattcctgtcaccactcgggcacgtttggagcagcgcccaatggggcgccggggcggccagctcctccg

SEQ ID NO: 8772 - DNA, 2805 bp, Artificial sequence
  DNA replication origin
gtgggtgtaaagggtacccatacaaagatgaaaaaagacacactcccagcctcaaagggactaagtcctgtgtaggagctgaggcatatatgcagtgtctgagagtttaacagttcttagcacagaggtgatctaggccaggggtcagcaaactactcattattttaggctttgtgacatgaagctacaagtactctcctttgtgccactcttccttcatagcacaaaaagcaaccaaagacaatgggtgtagctgtggcccggtaaaactctgattctccaaaacaggctgtgggcaggatttggcctcctggctatgttttgctaatcttggagctactctgaacctcatattagtcaaagtaggaaaattagttcctaaaagttatatgacttttacaagttaataccagtggacgctggcagaacaaatagtcaatgtcctttggttccaaaacgggtgttcatttcattttctgaggagttccctctgctcacctgcattccctgggccaggctgggcgaggcgcacactggaacgagtgccaccgttctgcgattccctgcaggttgtcttctgatcccaactgactttctattttaatctcccctacaggttgctcccgttaaaccgtctcggccaaaaaggcacttctcttctgctggcaccatcgaaagtgtcaacttagatgccatccccctggccatcgctcgcctggacaacagtgccgccaagcacaagctggctgttaagccaaaaaaacagagggtgtcaaagaagcacaggcgccttgcccaggtgtgtagagcctgcacgggctgaccaggcaggtgcccttgcctactgggcactaattctacaagtgggttggcattggggtggagccatgtaaagacctgagagtctccccatcgggaacttgagtgtgtggcggtgttggggaatacacaggcctgtttactttcctcgccctttctggcatgaggctggtggacctcagagggagcggttgccttttgaggggctccagacccgttgtgtttgctttgcagtggaaaagtggtttagccaatgctccctcagtttgactaggataggcttccaagtcacaagctccaggggacattaatgaagtccaagtctctttttgctcatctaatgcttgaatattggttttcctcgtttgttcatattaaggaaaggaattagggaatgacaaataaaggagctggtggggaggggggcgcggaaacagaatacacgtccttttctccattcgcacgacagagtcttgcgtggggtgaccgatgcctgagtttagctatccctgaacttgagaatacctgcttccaggtgttcttgagaaattaagagggtcgctggcactgtgaataggaaaaggaacgactgtgggtggagaaagcaaaaggctaattgtgttttcctttccaatgttaggatccacaacatgagcaaggcggccttgagagtcggccctgcctggaccagaacggacacccaggcgaggacaagccaacgtggcacgaagaggaacccaatccgctggattccgaggaagagagaagacgccaagaagactactggcgagaactggaggccaagtgcaagcggcaaaaggcggaagcagccgagaagagacgcctagaggagcagaggctgcaggcgctggagaggaggctttgggaagagaacagaaggcaggagctcttggaggaggagggcgaggggcaggagccgcctctagaggcggaaagggcgccgcgggaagagcagcagcggagcctggaagcgccaggttgggaggacgcggagcggagggagcgtgaggagcgcgagcgcctggaggcggaggaggagcgaaggcgtctgcaggcccaggcccaagcggaggagaggcggcggctggaggaggacgccaggctggaggagcggaggcggcaggaggaggaggaaggaagatgcgcggaggagctcaaaaggcaggaggaggaggaggctgagggatgggaagagctggaacagcaggaggcggaggtgcaggggccgcccgaggcgttggaggagactggggagggccggcggggcgcggaggaggaggatctgggggaagaggaggaggagggccaggcgcacctggaggactggagggggcagctcagtgagcttctgaacgactttgaggagaggctcgaagaccaggaacgcctgaaacccgaaggacaaagagaacactccgaggagccaggtatttgcgaggagcagaacccagaggccgagcggcgaagagagcagcagggaaggagcggggatttccagggggccgatcgtcctgggcccgaggaaaagagagaagaaggggacacggagcctctcctgaaacaagaggggccggtggaagccgcgcagcctccggtggagaggaaagaagccgccgcccttgaacaaggccgcaaggtggaggagctgcggtggcaggaggtggacgagagacagaccatgccccggccctacacgttccaggtgtcctccggagggaagcagattctctttcccaaagtcaacctgagccccgtgacgcccgcaaaggacacggggctcaccgctgctccccaggaaccaaaggcccccaaagccagcccagtccagcacgccctaccgtcgtccctgagcgttccccacaccgccattctggtcacgggcgcgcagctctgtggcccggcagtcaacctgagccagatcaaggacaccgcgtgcaagtccctcctgggcttggaggagaagaa

SEQ ID NO: 8773 - DNA, 1743 bp, Artificial sequence
  DNA replication origin
ctgcctctggcgttgggcacttctggttctagcagtgacgtagtcaatgagctggacagaggcagacaaggagcgcaaggaccacctggtgaccatcaaacagaccatccagaggcaaaactccttatctggggaattcagaattaaacttccctagtatctaacataggcatctggttccaggcttttcaacttttataactagaatttctagacatctctggaatgtcatggcaaaactcattttgcaacccttgctgacattaaggcaccaaaatgtccacaaatgtaatcatttatcacgacctacgtggctaatgtggcccaaattacccttccaattacccttaagctctcgacttaaggtccataaatgctcctaaggaaaatccaccagggcactcagtcctctcactgaggcgccccacggttttgttctgcagcgttctaataaaactttcctttttcaaatctgtattgttggtaaattattctcatgaacctgcgtgtggatctcttcttgatgccctggctctgacacctcggctggcagcagttacccaccctgcagctacctacctttcctcccggcctcgggtgtttgagaaggtttctcttgctgagtggcaggcagaggtggggaagcaggtttcctctctgtcgcctcttcctcctcgtccctcttctgtcccttcctttcctcggggcctgggggcgagggtggccggcggtcactgctctcctggtcctccttggacggctcacttggctctgggtccggcctccccgctcggcgagacagcagctctaccaagtagggcctgctcagtttggaaagtggggatgctggtggggtctgactggtgggcttgggagccagtgctggcttttgtgccagtggcattttgtttgctgccttgtcgtgctccggagccggggtctggctgctggccggtggaggcccagggtgggccacaggaacagagcggctgctggaaggttcagcggagtccctccgggtggaaggggcttgcttccgctcttgggggagggatggaccatgcttgagggccacaccctccatctctttctctccacgagcgctccccgctgcaggcggccctgcatccgcgctgtctccggtgctgctgtgcctcttcttcttcttctgttctgcctgttggtcgcagttgaagcgcaaggaatagttggtccttctcaattttattccaaacggtgaggctttttcctctccacctggcatcacagggtctggctttgctatcccgtttgcagtctcgctgtccgacgaggtcgtgaactctgtgtgggccaccactttctgcggagggtaaggaaggcttgggacaaggaaagacgggaggtctttggcaaatttgcatccctcggtggtgtctgcgggctcccggtgcatctccgacttctccggacccttcccgagctcgcgaacaccagcaggaggaggctggggggctgtctcttcgctgggtcccagcatgggtctttttcgtatgctttcagcttccgtgctctgtttggaggtctccgtgccaccatcggaaaatttctgccaggcaggcataatagagaactttgcattgactggcggagtcttccgttggttcccgcgggaatcacaccggcccctgggagtggactcatcaccgggcctcaactggtccctctcgctgctgcgcgggtcactctctgcgttcttcagga

SEQ ID NO: 8774 - DNA, 755 bp, Artificial sequence
  DNA replication origin
gtgtgcgcccgcgcggctgcctagaggcgctgctgcagggaggcgggacagagtttcgcggctcgcacgtggccgcgagctcacggcctgggggtcagggagaccgtgaagggcccggatccctgttactcaccctcagctgtcgccattatcctaagtgggctgagggctgcgaccgcgccgggaagcgaggcagaactctagaaaagaggggtggtcagagagcttcgctgggcggggaaggaggcggggccgcgcgaccctgcgccactcttttcgagctccgctacagccgcctaacccggaggggtatgggcggagactgaaacgcggatatcggacgaaacaacgccccactggcttcccgccgcgcaggcgcagagacgcgaccccgcctccgggccgccccgcgctggcgcagtgcccggacaggcgaaaagtggcgcgcactggcggcccctccccactctgcggaagctcgcataccccggccccttctcggctgcgggagcgactcagaagttggagcgtaccaagtcttgacggcctgggggaagcatgcagggaagggcatatgaaggctaaatgctctgaaagagaaatgaggttaagtccgttactcccattacgctactgttgggtgctggaaaataacggagatttccacgtgcagcaaatacagctttccaggcagctcttaggggaaggctagctccaccctacagcatccgtgaccccgcccctcagccgcggga

SEQ ID NO: 8775 - DNA, 871 bp, Artificial sequence
  DNA replication origin
tcgtctcctatctccaccgacctgtctctggcttttcttagtccccagatgcgcccagaaggtcctggagagtggtgcgtccccttggcaaccgtacaacgcgcaggaaggcggagtgagatgaggctgagtccggccggggcggggctgtgtgggactagggcggggctcgggggctagaccggggcggggctgtgtagggctggggcggggctcggggcggggctcggggcggggctgggcgcggggggccccggcagcccttatcgtatcgcgcagagagcaaactgcgcctgggcaaccagtcgggagggtgagtcccgcgcgcgacagaagcttctggcgcgaatggagaaccaagagtttctaagttcatctgcgccgtccgaggtgaccgatgggcaggtctcaacagaaatatccacttgctccgaagtcttccagaagcccattgtgctcaggattctcgacactcacagagagcttgaggagtccgaggatcccgagaaacacgagaatcccgaggaacccgaggaggtcagggagcaagaccagagagacgagtccgaggaatgtgatgagcctcatgagtcctatgagccccacgctccctatgcgccccacaagccccgggactcctatgcaccttacgaactccatgggccccatgcagcccccaaactcctcaaggcccgtgaaccccgccagctccgccacacccgtgagccccgcaagtcccgcgaggccaaggaaaccgagttgcttcccagcgccgcagtaatgatctccccctctctgatcaccagagccccgccacggcctcagctgtctttcctgggtggtaggtgttccccttccctcgtcccctctc

SEQ ID NO: 8776 - DNA, 1426 bp, Artificial sequence
  DNA replication origin
cagccgtaagcccccgctcagcgtgcagccaccggggacttgcgcggccgtggcaccgctggagggggcggcctggggctggggctgcccggcggcgccgcgaccgccttccttcgctgcgtcccgcccgctccacgcctcgctcaccgccgccgcttctccctgccccgcagcgcgcagggaccatgtcggcggagaccgcgagcggccccacagaggaccaggtggaaatcctggagtacaacttcaacaaggtcgacaagcacccggattccaccacgctgtgcctcatcgcggccgaggcaggcctttccgaggaggagacccaggtgcgtccccacacgcgcccagcgcgccccgacccctgcctgggctgagccttctcgcggctgggcggtcctgttcgtccgcgcctcccgccgggctgccctccccatgatctcccatcgcttctgcccgcatcccaggggcccagaccctgcatggctcccgccgccgcctccccgcttccccgctcccatgggcgcccggtctccccgccacccccatccagccgtggttccccgggagctgcgcagaaacccctcggtcaccagtcctttcttttccactctccccggcagcccgggatacacgctttctccctctgcgagttgggagcagcgtctctcgcctgtccctgtctcgccttcccggctcggtcccctctggtctgtctgcgaaaccttcgggaagatctattctaggcgggaatgtcagagctggaaggcgccccagagaccagctagccataaattcagtcctccggtttggcgaaccaggaggctgaggccgggagggagggcgctgtcaggatggcaggagcggtgaagcatgctctctccaccacatcacactgcagcgtcccccgagctgcagaactcacgctgcacgaagccacggagatttggttccgattttttaaaaaattccccggctctaaggtttagaggtttttcctggcgttttataagacggtagatagctaacatttcagctgacggcagcggcagccgatgtccccctaagtgcattcattgacttatctattttttaaatgctcctgtattatcccgaaaagtgccaggtaaagaatgcaacacggcctgtggttgttaaccacaggtgcaatgtgggagcctttagctgacttttaaaaccctgtctaaactccgacttctcttttccctttggtcatggaaagacaatccttttgcatgatagactacttggaactgatctagcatctctcctgtgggtccccaaagcacttcacacttctaacctcaactctaaagcagagacattatttttcctattttatataccagagcatcaggcacttgtcctgtcaccatgagccatgctcagttgaggtttagaagct

SEQ ID NO: 8777 - DNA, 1059 bp, Artificial sequence
  DNA replication origin
agagagggagggaggtggagaggaaggaaggaaggaaagaaggaaggagggagggagggagggaaggagggagggggaagaggaaagaaggaagaaaggaaggaaggagggaaggaaggaagggagggaggatgaggagaagaaggaaggaaggaaggaaaaaaggagggagggaggaaggaagggaaggagggagggggaagaggaaggaagggagggagggagagagggagggaggtggagaggaaagaaggaaggaaggagggagggagggagagaaggagggaggaagggaaggagagagggggaagaggaaggaaggaagaaaggaaggaaggagggaaggaaggaaggaaggagggaaggggaagggagggaagaagggagagagggagggagggaaggagggagagagggaaggagagaaggaactataaatcatccttgaaaaatgtctaaagattttgatttctgcttttggcaaaaatatgctgtcatcagcttttgttaaccaattcagtgaaattcttctctatgtatttcaggaaagccctgcctccttcgtggcccatctctgaggtttctgcaaccaggcaagccctggcagttctgtgggtgataatttagggtcccttgtagaatgtcttctgatgtggcacattatataaatggttgtgcacacgcttgcatctggctttcacctctctagagagtcatctcccaaactagtctttctagtgggctctgaataacctgcaagagggtcttgggttgatcctgtgaggctgacacccctgactttgttctctgacagagggaaatggccccatctgtgccagagccaaatctcagactgaagacaacttagtatggtgtcagggttcagaggaaaaggctttggggacaagctggacctggttcaaacctagggtgatcaactttcttagttgtcccgtaactgtcctcactttggcactgcaaatcctaaatcccagaaaatccctaagtcctgggtaaacccaaatgcttggtcaccctattctagctctttcaggcctt

SEQ ID NO: 8778 - DNA, 1322 bp, Artificial sequence
  DNA replication origin
tgcctggccgccaccccgtctgggaagtgaggagcgtctctgcccggccgcccattgtctgagatgtggggagcgcctctgccccgcaaccccgtctgggaggtgaggagcgtctctgcccggccgccccgtctgagaagtgaggagaccctccgcccggcaaccgccccgtctgagaagtgaggagcccctccgcccggcagccgccccctctgagaagtgagaagcccctccgcccggcagccgccccttctgggcagtgaggagcgtctccgcccggcagccaccccgtccgggagggaggtgggggtcagcccctgccaggccagccgccccgtccgggagggaggtgggggggtcagccccccgcccggccagccgacccgtccgggagggaggttggggggtcagcccccggcccggccagccgccccatccgggaggtgaggggcgcctctgcccggccacccctactgggaagtgaggagcccctctgcccggcctccaccccgtctgggaggtgtacccaacagctcattgagaacgggccatgatgacaatggcggttttgtggaatacaaaggggggaaaggtggggaaaagattgagaaatcggatggttgccgtgtctgtgtagaaagaggtagacatgggagacttttcattttgttctgtactaagaaaaattcttctgccttgggatcctgttgatctgtgaccttacccccaaccctgtgctctctgaaacatgtgctgtgtccactcagggttaaatggattaagggcggtgcaagatgtgctttgttaaacagatgcttgaaggcagcatgctcattaagagtcatcaccactccctaatctcaagtacccagggacacaaacactgcggaaggctgcagggtcctctgcctaggaaaaccagagacttttgttcacttgtttatctgctgaccttccctccactattgtcctatgaccctgccaaatccccctctgcgagaaacacccaagaatgatcaattaaaaaaaaaaaaagatttctgagatctccagggagctttacaagcactaacaacatgcctgctcccagtgggcatctgctggccatggtccttgtgtgcttggcgtctgctcatgcttgcctgtgtgctgctcctccaaggactgcagagcaaggggaaaagtgggcgtttggctttcaggaagaggagaaagggataaggctgtgacagcctgtctctgggtttacacaggacaaacttttagttcataaaatgcagccacctggatctgcttctgatttgttctgtcaccttgcgcag

SEQ ID NO: 8779 - DNA, 1094 bp, Artificial sequence
  DNA replication origin
acagatcaacaggatcccaaggcagaagaatttttcttagtacagaacaaaatgaaaagtctcccatgtctacctctttctacacagacacggcaaccatccgatttctcaatcttttccccacctttcccccctttgtattccacaaaaccgccattgtcatcatggcccgttctcaatgagctgttgggtacacctcccagacggggtggaggccgggcagaggggctcctcacttcccagtaggggtggccgggcagaggcgcccctcacctcccggatggggcggctggccgggccgggggctgaccccccaacctccctcccggacgggtcggctggccgggcggggggctgacccccccacctccctcccggacggggcggctggcctggcaggggctgacccccacctccctcccggacggggtggctgccgggcggagacgctcctcactgcccagaaggggcggctgccgggcggaggggcttctcacttctcagagggggcggctgccgggcggaggggctcctcacttctcagacggggcggttgccgggcggagggtctcctcacttctcagacggggcggccgggcagagacgctcctcacctcccagacggggttgcggggcagaggcgctccccacatctcagacaatgggcggccgggcagagacgctcctcacttcccagacggggtggcggccaggcagaggctgcaatctcggcactttgggaggccaaggcgggcggctgggaggtggaggttgtagcgagctgagatcacgccactgcactccagcctgggcaccattgagcactgagtgaacgagactccgtctgcaatcccggcacctcaggaggccgaggctggcagatcactcgcggttaggagctggagaccagccccgccaacacagcgaaaccccgtctccaccaaaaaaatatgaaaaccagtcaggcgtggcggcgcgtgcctgcaatcgcaggcagtcagcaggctgaggcaggagaatcaggcagggaggttgcagtgagccgagatggcagcagtacagtccagcttcggctcggcatcagagggagacca

SEQ ID NO: 8780 - DNA, 944 bp, Artificial sequence
  DNA replication origin
cagaactgagagaaataaatgtttattgcttatgccactcagttgatggtattctgtcattgcagcctgaactaagacagtttatgcttgaaaacttaaactaagaacgctagtgaaactcagcactaaatttgactctgagattcctaatggccaagattaaatgagaaataggatgagtttcttagttttgactatgcaaataaacctaaatgcttcgatctttatgcctaggatttaggggtgcaagaccaagatggcattttgatgtgaaaaagacaagcttcaacttactatattcttgcccgaaaagaggtccactttgtcttttactccacatgagaatcatattaccaaagcaaaacacacctcaccagttatgcctctgctgagtgaaagaccaatcccagctttaaagtaaatgagtaggctggacatggtggctcactcctgtagtcccagcactttgggaggccgaggcaggcggatcacttgaggtcaggagttcaagaccagcctggccaacatggtaaaaccccgtctctgctaaacatataaaaattaaccagacatggtggcacgcctgtaattccagctactcgggaggctgaggcaggagaatcgcttgaatttgggaggcagaggttgcagtgagccaagattgcactgctgcactctagcctgggcgatagagaacgactccatctcaaaaaaataaaaaaaggaataaattaaaaagtaaatgagtaaagacaaaattagggaaagagaagcttgatatcaggagaggagaatgtgattttgaggatgaattttgtttcaatgacctgcctaagtgtaaaatgctggtctggatgagcaccttaaataagatagtttccatcccattgaattccccctcactcaagtataggaccagccaattatatgcaatcttttttcac

SEQ ID NO: 8781 - DNA, 796 bp, Artificial sequence
  DNA replication origin
cggccctcccccaccctgaccgagcccccagcccagcgccccacttaccggccttcctcggtgaggaggggcgggcgaccctgagtcgccgctccttctccgactacttttctttgttgctggagtttcgggggagaggtgggggagggtggtaaagttgggtgctggggccgtcgtggaccaagaaggcccaggagtggggctgcagagggtgctcaggcctccgggcctcgccctgccgtctcggctgcggcagccgccgccagggtctggggccccgggcctcggcggcgctcgctccgctgctgcgccgcgagctcgcggcagccgcacattccaacacaggacgctgcgccgcgcacccagtccgcgccgccgccgccgccaccgcccgcgggacacgccccctccgacgcccgcgcgcgcccgcgagacacgccccctccgacgcccgcgcgcgtggccgctaggcgcgccccgcccctctaccaagcaaggagtgccccagtctccagctcgcctgggggcgcgtctagggggagccgcccgtaatcctcccggcccctcactcctgcccttaggtcagaaaagaggcgggccccactccctttctcgatttctattacaaacaaacaacaaaagttccccccagccctggcgtgcatgcatgagaatagagctgttaaaagaagaatccgcaggctttgacgggtctctttagagctattgtcaccggcctctcaagtctaaagcgctccaagatacccttcagatctcttcaagtctccacccatag

SEQ ID NO: 8782 - DNA, 1386 bp, Artificial sequence
  DNA replication origin
caggtcctttgaggccaaggagcggagctgctcgggcccgtagtcctgaaacttcctctgcttcctcctcctgcccccgggtcccaccgcagccccgcgccggcccgcggccctcctggccccctcccccagggcctctccctgtcgccggaaggcgccgttgagtgcggccgggcgggttgagtcagccccggggcccgggcggttccgcctgcggggctggacagcgatttctgcgcttcagccgtccggcgccgctggcccccgcgtccggccacccgaccgctggagctggcggggctggggcgcgcgtcctgccgggcgccgtgggggagtgaagttcgcaaacttccggggcgcgggggtggcggctggcccgtgtgggggccccctccggcgctcggagcccgacgcctcgcgagggcgcccgcggagcctccccggccctgggcgttgggcgagccccggggcggtcggaggggcccgggggcggtcggagaagcccggacgccggctgcgcggtaactttccgtcctctcccgggacgggggccctagggctggggagggggctgcctggactcggggaggactggttccggccaaacagcgcctcgagcttgatcccctcccccgttttagtgttggagagcgcaggaaaaggctcaggacgagtgtcggggcgactcccgcgagttggtgtgtaaatgtgtgcagtgagcgggccgaggcgagaggaagcgagagcgcccgagtttgcaaagagctgctttgtgtttggtattttgagaaaatggccgaatgcctatttcagttaggaatgccgccgccgaggcaggcgctggtggcagcagcacggaggaattcgtgcagcacgttgggctttcgggctgtgcctggacggtcttcctaacaatcgttaaaattccatttggggtggcagttaggggttagggagcaattagaaaagtcgatgttgggccaaattacccaatagcttgggctgttcagccccgggacagccttcgccctctgttttctgtgatggcatttgcttccaacttttgttggtacgtagaactaaaccggtttgtgtttatacacttgggtgaagcgggttactttttgtattttcggtttaactttattttcttagaacttcttactttttttaatttgcgagtgaacacttcgtttgagaatggcaccttttagattgagaagtaacgtagcatctagaaagcccaacttgttttgaagaaggtgatcttgtaatggcttccactaggcaagtaggccaagtcaagcacaatgcaagaaagttgctgattgtcgagttgagttgcacgatgattttattcgtattgaaaagcttggaattcagtgt

SEQ ID NO: 8783 - DNA, 970 bp, Artificial sequence
  DNA replication origin
aggccaaaaagcagtgctaggtttttctggattggaggatgtttccccactctccaccccccgattttgtggtcatttaattttcaaaaaatttgcaataattatccttgtaagagtctgttgagaatgagttctttacactgctaatgggattatgaactgaactgctggctttcagtcagcaaccctgtaaatccctggatttatgctaagaaaaaagaacacaaaagaaccacaatgtgacatgcagaataatgcacgctgcaatgttacacattcagttaaaaagtgaaagcaacttccatgtctgcattggagaggccagtgttcctgggaagagaggctttcaagttgagtttgcagagcacttcgcagaaagactgaggaagagtccaccgtttatatcaaaaacctcctggaatgctggtgaagactgggggcgctttaggtgcctccgtggcagctccaacgaggaaggagctgggacccctgctcctctcagctgcgctctgttctcccgagaggcttgctggagggcgagcagttcagcaagaactcaaaacaagggcacagctctcacacggattccagtactcactgaaaacggctcagcacaaaaaaagcacagagtcttgttgaatgccactgggagacaaagcggggagggaggtgcaggcagttaagaggttccagaaagggaagtggttggcaacggtttgtccttttagtgcttgacacccaagaccacagcaggcctgtggccagcggggacacagtccacaagtgggggtttttaacagcttgttcttaagagagcttcccaaaccacagagtaatgagcactcaggtgtctcaggcccacggaggatttaatagatgaaaccctggatcgtctcgaagccgtggttgttaagaagtttaaatatattgaccggaaacggggagaaaccagagggtggaagagccgctc

SEQ ID NO: 8784 - DNA, 1117 bp, Artificial sequence
  DNA replication origin
agcacaggggtgggggtaaggtcacagatcaacaggatcccaaggcagaagaatttttcttagtacagaacaaaatgaaaagtctcccatgtctacctctttctacacagacacggcaaccatccgatttctcaatcttttccccacctttcccccctttctattccacaaagctgccattgtcatcatggcctgttctcaatgagctgttgagtacacctcccagacggggtggtggccgggcagaggggctcctcacttcccagtaggggcggccgggcagaggcgcccctcacctcccggatggggcggctggccaggcgggggtctgaccccccccacctccctcccggacggggtggctggccgggtggggggctgacctccccacctccctcccggacggggctgctggccaggcggggggctgacgcccacctccctcccggacggggtggctgccgggcagagacgctcctcacttcccagacggggtggctgccgggcggaggggctcctcacttcttagacggtgtggctgccgggcggaggggcttctcacttctcaaacggggtggttgccaggcagagggtctcctcacttctcagacggggcggcagggcagaggcgctccccacatctcagacgatgggcggccgggcagagacgctcctcacttcctagatgggatggcggccgggcagagacgctcctcactttccagactgggcggccgggcagagacgctcctcactttccagactgggcagccaggcagagacgctcctcacatcccagacgatgggcggccaggcagagacgctcctcacttcccagacggggtggcggccgggcagaggctgcaatctcggcactttggggggccaaggcaggcagctgggaggtggaggttgtagcgagccgagatcacgccactgcactccagcctgggcaccattgagcactgagtgaacgcaactccgtctgccatcccggcacctcgggaggccaaggctggcggatcactcgcggttaggagctggagaccagcccggccaacacagcgaaaccccgtctccaccaaaaaaatacgaaaaccagtcaggcgtggcggcg

SEQ ID NO: 8785 - DNA, 890 bp, Artificial sequence
  DNA replication origin
ccggccgcccatcgtctgagatgtggggagcgcctctgccctgccgccccgtctgagaagtgaggagaccctctgcctggcaaccaccccgtttgagaagtgagaagcccctccgcccggcagccacaccgtctaagaagtgaggagcccctccgcccggcagccaccccgtctgggaagtgaggagcgtctctgcccggcagccaccccgtccgggagggaggtgggcgtcagccccccgcctggccagcagccccgtccgggagggaggtggggaggtcagccccccacccggccagccaccccgtccgggagggaggtggggggggtcagacccccgcctggccagccgccccatccgggaggtgaggggcgcctctgcccggccgcccctactgggaagtgaggagcccctctgcccggccaccaccccgtctgggaggtgtactcaacagctcattgagaacaggccatgatgacaatggcagctttgtggaatagaaaggggggaaaggtggggaaaagattgagaaatcggatggttgccgtgtctgtgtagaaagaggtagacatgggagacttttcattttgttctgtactaagaaaaattcttctgccttgggatcctgttgatctgtgaccttacccccacccctgtgctctctgaaacatgtgctgtgtccactcagggttgaatggattaagggtggtgcaagatgtgctttgttaaacagatgcttgaaggcagcatgctcgttaagagtcatcgccactccctaatctcaagtacccagggacacaaacactgcggaaggccgcagggtcctctgcctaggaaaaccagagacctttgtttacttgtttatctgctgaccttccctccactattg

SEQ ID NO: 8786 - DNA, 1023 bp, Artificial sequence
  DNA replication origin
aggtgattgtagcgagccgagatcacaccactgcactccagcctgggcaccattgagcactgagtgaacgagactccgtctgcaatcccggcacctcgggaggccgaggctggcggatcactagcggttaggagctggagaccagcctggccaacacagcgaaaccccgtctccaccaaaaaaatacgaaaaccagtcaggcgtggcggcacgtgcctgcaatcgcaggcactcggcaggctgaggcaggagaatcaggcagggaggttgcaatgagcccagatggcagcagtacagtccagctttggctcggcatcagagggagactgtggaaagagagggagagggagaccgtggggagaggggagaggggagaggggagaggggagaggggactggattaaagatttaaatctaagaactgaaaccatcaaaattctagaccaaaatctgggaaaaactcttctggacattggcttaggcaaaaaaaattatgactaggaccccaaaagcaaatgaagcaaaatgttaaataaataaatatatgggacttaattgcactaaaaagcttctgaacagcaaaagaaataatcatcagagtaaacagacaaaatctatgggctgggggaaaatctttacatcaaacaaaggactgatatccaaaatctacaaggaactcaaataaatcagcaaaaaaagaaaaacgattaaatttaaaagtgggcaagtgatatgaatagacatttctcaaaagaaaatatacaaatggccaaaaatacatgaaaaaaatgttcaacatcactaatcatcagagaaatgtaaattaaaaccacaatgagataccaccttaccccagccaaaatggccattattaaaaagtcaagaaatgatagatgttggcccagatagatgtagtaaaaagggaatgcttatacactgttggtgggaatgtaaactagtacaacctctatggaaagcagtatagagattttttaaagaactaaaggaactaccatttgatcc

SEQ ID NO: 8787 - DNA, 1134 bp, Artificial sequence
  DNA replication origin
tcttgcaccgcccttaatccatttaaccctgagtggacacagcacatgtttcagagagcacagggttgggggtaaggtcacagatcaacaggatcccaaggcagaagaatttttcttagtacagaacaaaatgaaaagtctcccatgtctacttctctacacagacacggcaaccatccgatttctcaatcttttccccacctttcccgcctttctattccacaaaaccgccattgtcatcatggcccgttctcaatgagctgttgggtacacctcccagacggggtcatggccgggcagaggggctcctcacttcccagtaggggcggctgggcagaggcgcccctcacctcccggacggggcagctggccgggcggggggctgaccccccccacttccctccctgacggggcagctggcctggcgggggctgacccccacctccctcccggacggggtggctgccgggcggagacgctcctcacttcccagacggggtggctgccggacggaggggctcctcacttctcagacggggcggatgccaggcagagggtctcctcacttctcagacggggcggccgggcagagacgctcctcacctcccagacggggtcgcggccgggcagaggcgctcctcacatcccagacggggcggcggggcagaggcgctccccacatcccagacgatgggcggccgggcagagacgctcctcacttcccagacggggtgactgccgggcagaggctgcaatctcggctctttgggaggccaaggcaggcggctgggaggtgattgtagcgagccgagatcacaccactgcactccagcctgggcaccattgagcactgagtgaacgagactccgtctgcaatcccggcacctcgggaggccgaggctggcggatcactagcggttaggagctggagaccagcctggccaacacagcgaaaccccgtctccaccaaaaaaatacgaaaaccagtcaggcgtggcggcacgtgcctgcaatcgcaggcactcggcaggctgaggcaggagaatcaggcagggaggttgcaatgagcccagatggcagcagtacagtccagctttggctcggcatcagagggagactgtggaaagagaggga

SEQ ID NO: 8788 - DNA, 965 bp, Artificial sequence
  DNA replication origin
aatcacctcccagccgcctgccttggcctcccaaagagccgagattgcagcctctgcccggcagtcaccccgtctgggaagtgaggagcgtctctgcccggccgcccatcgtctgggatgtggggagcgcctctgccccgccgccccgtctgggatgtgaggagcgcctctgcccggccgcgaccccgtctgggaggtgaggagcgtctctgcccggccgccccgtctgagaagtgaggagaccctctgcctggcatccgccccgtctgagaagtgaggagcccctccgtccggcagccaccccgtctgggaagtgaggagcgtctccgcccggcagccaccccgtccgggagggaggtgggggtcagcccccgccaggccagctgccccgtcagggagggaagtggggggggtcagccccccgcccggccagctgccccgtccgggaggtgaggggcgcctctgcccagccgcccctactgggaagtgaggagcccctctgcccggccatgaccccgtctgggaggtgtacccaacagctcattgagaacgggccatgatgacaatggcggttttgtggaatagaaaggcgggaaaggtggggaaaagattgagaaatcggatggttgccgtgtctgtgtagagaagtagacatgggagacttttcattttgttctgtactaagaaaaattcttctgccttgggatcctgttgatctgtgaccttacccccaaccctgtgctctctgaaacatgtgctgtgtccactcagggttaaatggattaagggcggtgcaagatgtgctttgttaaacagatgcttgaaggcagcatgctcgttaagagtcatcaccactccctaatctcaagtacccagggacacaaacactgcggaaggccgcagggtcctctgcctaggaaaaccagagacctttgttcacttgtttatctgctgacattccctcc

SEQ ID NO: 8789 - DNA, 950 bp, Artificial sequence
  DNA replication origin
ggaggggaggtgcaggaggggctgcaggaggggctgcaggaggggaggtgcaggaggggctgcaggaggggctgcaggaggggctgcaggaggggctgcaggaggggaggtgcaggaggggctgcaggaggggaggtgcaggaggggctgcaggaggggctgcaggaggggaggtgcaggaggggctgcaggaggggaggtgcaggaggggctgcaggaggggctgcaggaggggaggtgcaggaggggctgcaggaggggaggtgcaggaggggctgcaggaggggctgcaggaggggctgcaggagcaacagcggtagtggtaggacccctgtgccctgcaacctggaggcagcctactgtgctgccctcaccctctcacagtcaagcgggacccactcccaggcccagagcctccgctgctcggggatcgggacccgggccctgcggccactgctgggagggtgtggagaataggcggacaatcaccagagcctgcaccgaggactgccgcgatgggaccaggctgagtctggcggggaagcagagcattcaggaagagaggggaaggcagagagaggccccaggtggagccgagtttggggtggtgcggtgcttcacggagctggtgggacccggggacaagcatgagccccgcccctttcaagttggcggggagggagttctcaggcgcaacggcaaccacccaagccagggtgagaccggtgcacacctgtgctcttgggagccaggagcaagcaggagcccagccctcccaggtacccctgcagccaccctgccacagctgtggatccaagcatctctgcactctcaggggcccaggaaggcccctgcccctgcagggctggaagtgcctgccctgctgcccagcttctccccagtgttgatgcctgctctgatctggtagccggcttgaggccaaactcaag

SEQ ID NO: 8790 - DNA, 1065 bp, Artificial sequence
  DNA replication origin
ccccgggctctgcgccgccgccgctgtctcttcggttctttctcttcttcgactccccaagagcgagcgaggcactggcgctctccagacacgcacactcacacacgcgcacacacgagcgagctcctgccaaagcaaaccgtgcaacccgcgcgcgcgcacacccgtaggaagaggaccaaggcaaaaagagaagaaagaaaggggagggggcgagtcacaggcggcggtggcggcggcagcagctgccggagcggaggcaacgagcagtccgagaaaaaccagcagcagcggcggcggcggcggcggcggcgcccaccccgaccagctgcagcatctgcatccccgctcctgggaactggagcgagcggtgccgggccagcaggcgaggggggcgacgcgcagacagcgggtcagagcgcgggcgcgcggggaccgtgcagcctgcgcgcggggtaggcgcagccggggccggagcggaggccagaatgagcagcggtcgggcgggccagcggcaagagctccgagagccggggagggggctcgcgccagggaaaggggtggccggcaaaacccggatatggagtgctcgtgggctccgcggcgcgggctccacctagcagttcggcaaacgcttggaggtgggaacgggagggctgctactagaggcttccctttcagggtttgtcagacaaagggtacctctccagtggcttcgaggcccgcctcggcgctcgctctccctctctctctctctctctcattctttctctctctctctcttccacttcctcctctgtccctccctccctctctccccctcccactctccatcacctccctcccccctttctcctcttgtcttcctctcccactccaccctaggtgagtaaacgacatcagcttgaaagtcctgccagtgtctcattttttcaggtgcggattattccgtattttcattatgcaagtaccgagtctgaaaatgtttcctgcctttggtcaattttatgttccttcaaacttaactcgacctgcaagttcattgcacggtttaaagtatccctg

SEQ ID NO: 8791 - DNA, 1328 bp, Artificial sequence
  DNA replication origin
cccaggagcggggatgcagatgctgcagctggtcggggtgggcgccgccgccgccgccgccgccgctgctgctggtttttctcggactgctcgttgcctccgctccggcagctgctgccgccgccaccgccgcctgtgactcgccccctcccctttctttcttctctttttgccttggtcctcttcctacgggtgtgcgcgcgcgcgggttgcacggtttgctttggcaggagctcgctcgtgtgtgcgcgtgtgtgagtgtgcgtgtctggagagcgccagtgcctcgctcgctcttggggagtcgaagaagagaaagaaccgaagagacagcggcggcggcgcagagcccggggccgcgcgatgaagctcccacatgcccgcagctgcccggcccggccggcgagctaatcatccaccccacgggctcggggttcgccggcccccgggacgcagccctcggcggccgggcgcccgctctgtctgcgcgccccctccgtgcaccggggaaggagtttgtgtggctctcgctccggctgtccgcggaggttgcgggcttgagaggggaccctcggctgggagagagcctcgggaggacgaagaggaggacggtttggcggagaagccacccctggccctcgcggctccccctacctattccatcgctcccgctccgaggcggaaaggggaggacgtggaagaagaaaaagaaagagaaggggggtggggtgggagaactggatataaagatcggctggggggatggtggaagatttttggtctcttcggcagcgtcttttcttaagcggcggcggcagcagcagcagcaagagaaggagaagcagccccagctatgactgccgcatgttaatagctgccgctgggtccctcggctgctgctggagacagagcctgactccgaagttgtgcaactgtggactgggagagacatttgaaccctcttttcttttcgctccccttttgcccccttggggtgtgtgaagcgaggaacgtaaaggaaggcgaacatttggctctctttttccttcccctttctccgtggctgtgtagcggaagaaagggaagagagactttttgttgttgtttccttgactggggtctccaccctcctgctgctttctctgcgcttcgattctcgttatttgccgcgtgtggttgggggtgtctgcacaggggccggccggtcttttgccccgggctcaatggctggattgtggaaactgcacccgccttcaggttgttgagcaactgatgggacgatctcagggaccggcgtttacgaaaggtaatttattcttcgcactctt

SEQ ID NO: 8792 - DNA, 922 bp, Artificial sequence
  DNA replication origin
tgaagcgaggaacgtaaaggaaggcgaacatttggctctctttttccttcccctttctccgtggctgtgtagcggaagaaagggaagagagactttttgttgttgtttccttgactggggtctccaccctcctgctgctttctctgcgcttcgattctcgttatttgccgcgtgtggttgggggtgtctgcacaggggccggccggtcttttgccccgggctcaatggctggattgtggaaactgcacccgccttcaggttgttgagcaactgatgggacgatctcagggaccggcgtttacgaaaggtaatttattcttcgcactcttcataataggggtcgccctggccgggcgcaggcggcggcatccaccgggcgggcaacaagagggggtgcggggtgcatgcacactcgcccttccactcacacactcgccctcacacacacacacactcatccggtcgtggtgcggggcgggaagggaacctcctggctggtgggcgctcgggtctggcgcgggttggagttttttccagccattgggcgatttgaccggccgaggggagtgagggggataagagactgggcgcattcgcagctgcacacgctggggaataggaacagttcccaccccgttaattttccctctcctctcaccccagtggcatcccctggtgggggcagaaagcggacaggagggcgacttttctccgtcaggctggaactggtgccgctggaggcgggagcgggctggaggacggacagggtctgggtgagaagctgggctctgggaagatggaaaatgcagggtgccgagcccggcgcgattctccctcaacgcttgcctggagcatccctggccccttttgcccaggtcgcgcccctgagtcttggagtcgcgctgcctccccgcgccctgcc

SEQ ID NO: 8793 - DNA, 953 bp, Artificial sequence
  DNA replication origin
agagtttttgaaaatacacagtaagaggagacaaaataaaaaagaataaaaaataatgatgcatgcctatagaatctagaaaatagcctcagaatagacaaatctaagatattggccttcagccgccccgtccgggagggaggtgggggggcagccccccgcccggccagccgccccgtccgggagggaggtgggggggtcagccccctgcccggccagccgccccgtccgggagggaggtggggggggtcagcccccccgcccggccagctgccccgtccgggaggtgaggggcgcctctgcccggccgcccctactgggaagtgaggagcccctctgcccggccagccgccccgtccgggagggaggttggggggtcagccccccgcccggccagcctccccgtccgggaggtgaggggcgcctctgcccggccgcccctactgggaagtgaggaacccctctgcccggccaccaccccgtctgggaggtgtgcccaacagctcactgagaacgggccaggatgacaatggcggctttgtggaatagaaaggcgggaaaggtggggaaaagattgagaaatcggatggttgccgtgtctgtgtagaaagaagtagacatgggagacttttcattttgttctgcactaagaaaaattcctctgccttgggatcctgttgatctgtgaccttacccccaaccctgtgctctctgaaacatgtgctgtgtccactcagggttaaatggattaagggcggtgcaagatgtgctttgttaaacagatgcttgaaggcagcatgctcgttaagagtcatcaccactccctaatctcaagtaatcagggacacaaacactgcggaaggccgcagggtcctctgcctaggaaaaccagagacttttgttcacttgtttatctgctgaccttccctccactattgtcccatgaccctgcc

SEQ ID NO: 8794 - DNA, 1143 bp, Artificial sequence
  DNA replication origin
ttatagattaacagcatcccaaggcagaagaatttttcttagtacagaacaaaatggagtctcctacgactacttctttctacacagacacagtaacaatctgatctctctttcttttccccacatttcccccttttctatgcgacaaaaccgccattgtcatcatggactgttctcaatgagctgttgggtacacctcccagacagggtggcggccgggcagaggggctcctcacttcccagacgttgcggcggggcagaggggcccccccaccccccagacggggcggccgggcagaggcgccccccacctcccagacggggtggctgccaggcgggggcgccccccacctcccagacggggcggctgccgggcggaggggctcctcacttctcagacagggcggccgggcagaggcgctcctcagttcccagatggggtcgcagccgggcagaggcgctcctcacttcccagatggggtggcggcaggcgctcctcacctcccagacggggtggcggcggggtagagatgctcctcacctcccagatggggcggccaggcagaggtgctccccacatcccagacgatgggtggctaggcagagacgctcctcacttcccacacgggatgacggccgggaagaggtgctcctgacttcccagactgggcggctggacagaggggctcctcacatcccagacgatgggcggccaggcagagatgctcctcacttcctagaccgggtggcggccgggcagaggctgcaatctcagcactctgggaggccaaggcaggcggctgggaggtgggggttgtagcgagcgagatcatgccactgcactccagcctgggcaacattgagcactgagtgagggagactccatctgcaatcccagcacctcgggaggccgaggcgggcagatcactcgaggtcaggagctggagaccagctccgccagcacggcaaaaccccatctccaccaaaaagtgcaaaaaccagtcaggcagggtggtgcgcgcctgcaatcccaggcactcagcaggctgaggcaggagaatcaggcagggaggttgcagtgagccgagatcgtggcagtacagtccagccttggcaacagagggagaccgtggaaagcgggag

SEQ ID NO: 8795 - DNA, 1062 bp, Artificial sequence
  DNA replication origin
agcgtccctggccggctgctactctgcacctcgacgggctcccctctggacgtgccttctcctgtgcgccgcactccggaccctcctggccagccccagcaacgaaggtagggagatgggggtggggaccgtggcgacctggggcggaggggctaggcggggcctgggagttcaggtctcagcgcgctggacgctgctgctgcagactaaatcgcagtctcatctcaaattggtatttgtcgtccccttccactggccttttcgctcccctctgcggtttttggttgcattgtttgacgttagctgcggagtgctgggcaaggaacatgcgtgtggacagaggctggttggggggctgggaaggtggaaaaccttgggggaaaggaggtcgaggcctcctttggggaatggaggcccgttccagggggatgggtgcggctgggcctcacttaaggcgcgtggggaagtgacatttcgggcttgaaggagtgggaactgttggaagctcagtgacaaggatctctggagcagtggggcttttagaaaccgttatttgaggccagtgatgggaaacgttgtgggggtggctggatgcttttatttttggggaaagtgcctgctgggagctgttatttagggcatcaccagctgctattctggggtgggtggcaggagcttttatttctcgtgggaggggtatagcgaaggacagaaggcgccccacacagttgggtgcccttcttcttgggggagttcattgtcacactcaagccaaggtggaagaaggcgagaaggtgggatgccgcggcaggaggggtgagggggagtgtcgctgctaggaagttgccgctaaaacccacctgggcatgtcttaaagacggaaaagacctgctctggccagcacctgatccaggagtacccagtccccctccctacccccaatcctgtgctccagacccagaatactgtccctgcctttttctgggagagtagagctggcgcgggagcaacacctgtgtcgctcttcgtgctcccggaacagtgctcagcccctctgtccgc

SEQ ID NO: 8796 - DNA, 1383 bp, Artificial sequence
  DNA replication origin
gcccgttctcaatgagctgttgggtacacctcccagacggggtggcagccgggcagaggggctcctcacttcccagaaggggtggctgggcagaggcgcccccacctcccggacggggcagctggccaggtgggggctggcccccacctccctcccggacggggcggctggccgggcaggggctgccctccacctccctccagggctgggcggctggccagacgggtgctgccccccacctccctcccggacggggcggctggccgggtgggggctgcccccccacctcccggacggggcggctgccgggcggagacgctcctcacttcccagacggggtggctgctgggcggaggggctcctcacttctcagacggggcggcagggcagagacgctcctcacctcccagacagggtcgcggccgggcagaggcgctcctcacatcccagatggggcggtggggcagaggcgctccccacatctcagacaatgggctgctgggcagagacactcctcacttcctagacgggatggcggccgggaagaggcgctcctcacttcccagactgggcagccgggcagaggggctcctcacatcccagacgatgggcggccaggcagagacgctcctcacttcccagacggggtggcggccgggcagaggctgcaatctcggcactttgggaggccaaggcaggcggctggggggtggaggttgtagctagccgagatcacgccactgcactccagcctgggcaacattgagcactgaatgaaggagactctgtctgcaatcccagcacttcgggaggccgaggctggcagatcactcactgttaggagctggagaccagcccggccaacactgcaaaaccccgtctccaccaaaaaaatatgaaaaccagtcaggcgtggcggtgcgcgcctgcaatcgcaggcactaggcaggctgaggcaggagaatcaggcagggaggttgcagtgagctgagatggcagcagtacagtccagcttcggctcggcatcagagggagaccatggaaagagagggagagggagaccgtggggagcgggagcaggagagggagagggacctaaatttctttatcaaaacagactttcttttcccccaaattctaaattaaatcctcctatggtgattttcataacactatgtactttttccttcatggcactcatttttactgatatgcatatttatttaatgtttgtgtcctcactaaatcattcatccagggaccatttactttccgtcattgtatcctcagtgcccaacatatgatgtcatttagtaaatattccttaaataagtagatgaatgaatgactataaatgtgttcaccttacatctttatatgact

SEQ ID NO: 8797 - DNA, 850 bp, Artificial sequence
  DNA replication origin
gggagcgcctctgccccaccgccccatctgggatgtgaggagcgcctctgcccggccgcgaccctgtctgggaggtgaggagcgtctctgccctgccgccccgtctgagaagtgaggagcccctccgcccagcagccaccccgtctgggaagtgaggagcgtctccgcccggcagccgccccgtccgggaggtgggggggcagcccccacccggccagccgccccgtccgggagggaggtggggggcagcacccgtctggccagccgcccagccctggagggaggtggagggcagcccctgcccggccagccgccccgtccgggagggaggtgggggccagcccccacctggccagctgccccgtccgggaggtgggggcgcctctgcccagccaccccttctgggaagtgaggagcccctctgcccggctgccaccccgtctgggaggtgtacccaacagctcattgagaacgggccatgatgacgatggcggttttgtagaatagaaaagggggaaatgtggggaaaagatagagaaatcagattgttgctgtgtctgtgtagaaagaagtagacatacgagactccattttgttctgtactaagaaaaattcttctgccttgggatgctgttgatctaatctatgaccttagccccaacccggtgctctctgaaacgtgtgctgtgtccactcagggttaaatggattaagggcggtgcaagatgtgctttgttaaacagatgcctgaaggcagcatgctcgtcaagagtcatcaccactccctaatctcaagtacccagggacacaaacactgcggtaggccacagggtcctctgcctaggaaaac

SEQ ID NO: 8798 - DNA, 1003 bp, Artificial sequence
  DNA replication origin
agtcctgaaggaacacctggccactgtggtttaggcattttgaagttcttgtgtgctggagatgtggctaggctttctctcagagaagaggcaagtaattgcaactcttctctattattgtacaccttgaaggagaggttaagtcctgttgtggggtttgagggccagaatctaatttttggagctttatttaatgttgggagcagattgggtaataaaatgcatatttagaatgagacggccttctgacctttcagggtctagggctgtaaagcgtctcagggttgttgccaaatgagccatgcactgggctgggttttcatatttgacgaaaaaaagcctaaatgctaactgatttgggagaggtcggataaagaaaaaggagcattaaccttgactatgcctttagctctagccaccatttttaaaaggaaattgttgggaggtgggggagggctagtcgcggaacaaaactgtaagccagactgggtgtggggagaggaggtgatagaaggattatagggtggaggagcggaagctgaggaagaattggagcctgactcagcctggcggggagttacctgaggaggagcaatcttgggatgaagggagaggtcagatgggtcggtagaaaaggaagattgaaagcaacgcttggggttgggactgtggggacaggtgggagggaaagaagaaaggtttgggatgagtcgcactgggagcagagattaggaagagactgatgtgtaaaagaatgcctggacgtcaggcacctcagaccatttgcccattttatgagaagaattatctagatcttgtaggatgtaaaaatcaaaagtgccattttctggctatttggaaccattgtcgagtttgtgttggggttaagcagcattgcagaagaaaataaggtgtttaggttttaggtcaggtgtgagttgaagaggttttaagttcttgagaacacaggctaagggagaggatggaggaatggagggtggaa

SEQ ID NO: 8799 - DNA, 936 bp, Artificial sequence
  DNA replication origin
ttaaaagggagatagtatgtatgggtgttgcagtctctttgagaggggctacacaggagcagattattaacatattaaagaagagaggatgattttagggataaagtacagaagttactagcaagggcctgtccaaaaaggtgggggctgtctctaaaaccttgaggtagtacgcaccaggtgagctgacctgaaaggtgggtgtcggggttttcccaggtaaaggcaaagaggttttgggaatcagggtgtaaaggaattgtgaaaaagcatcatttaggtttagaacagaaaagtgggtggtattcgagggaagtgaggaaagtaaagtatatgggttagaaactactggacacactgggagtacagcttggttaatgagcctgaggtcctggactaagtgataagttccatctggctttttaacaggtagaactgatgtgttaaaaggagagtttgttgggcagagtaggtgactggtgaggaggagagaaatgataggctttaggcctatgagagctgcttgggggatgagatactgcttctgtgataggaacggggtgggctctttaagggtgatgtggatgggggtgtggtgctctgtgaccgagggtgtggaagtatcccaaacagtggggttaactacaggtgggggataaggaaaagttgcatgtttcagggtgggaggtcggaggagtagaagaaggttagaagcctgttagaagccttggaggggtctgggttgatgtgttgggtactatggggaatgtggaagtggagagtagtgtggagttttgaaagaatatctctgcctaggagcggagctgggcatgaaggcaggactaagaaagagtgactgaaggaaaaggtgttcagggagcagaaaagtggaggggggtcttggggtttggagacttgtccattgattcccacaac

SEQ ID NO: 8800 - DNA, 1389 bp, Artificial sequence
  DNA replication origin
actgtgggagcccctttctgggctggccaaggccagagccggctccctcagcttgcagtgaggtgtggagggagaggtgcgagcgggaaccagggctgcgtgcagtgcttgtgggccagctggagttccgggtgggcgtgggcttggccggcctcgcactcggagcagccggccggccttgccggcccgggaagtgaggggcttagcacccgggccagcggctgcggagggtgtactgggtcccccagcagtgcccgcccactggcgctgcgctcgatttctcactgggccttagctgccttcctgcagggcagggctggggacctgcagcccgccatgcctgagcttcccacccccaccatgggctcctgtgcagcccaagcctccccgacgagtgccgccccctgctcaagggcgcccagtcccatccatcgcccaagggctgaggagtgcaagcgcatggcgcaggactggcaggcaggcagctccacctgcgaccccagtgtgggatccactgggtgaagccagctgggctcctgagtctggtggggacgtggagagtctttatgtctagctcagggattataaacacaccaatcaacaccctgtgtttagctcaaggtttgtgagtgcaccaattgacactctgtatctagctgctctggtagggccttggagaacctttatgtctagctcagggattgtaaacacaccaatcagcaccttgtgtttagctcagggtttgtgagtgcaccagtcaacactctgtatctagctgctctggtggggccttggagaacctgtgtgtcgaaactctgtatctaacaaatctgatgtggacatggagaacctttgtatctagctcaggaattctaaacgcaccaatcagcgccctgtcaaaacaggccactgggctctaccaatcagcaggattgggtggggccagataagagaataaaagcaggctgccctagccggcagtggcaacccgctccagtccccttccacactgtggaagatgtgttcttttgctttttgcaataaatcttgctactgctcactctttgggtccacactgcttttatgggctgtaacactcaacgagaaggtctgcagcttcactcctgaagccagcaaaaccatgagcccaccgggaggaatgaacaactccagacacgccaccttaagagctataacactcaccgcgaaggtctgcagcttcactcctgagccagcaagaccaagaacccaccagaaggaagaaactccgaacacatctgaacatcagaaggaacaaactccagacgcgccagcttaagagctctaacactcaccgccagggtctgcggcttcattcttgaagtcagtgagacaaagaacccaccaatt

SEQ ID NO: 8801 - DNA, 1246 bp, Artificial sequence
  DNA replication origin
acagaacaaaatgaaaagtctcccatgtctacctctttctacacagacacggcaaccatccgatttctcaatcctttccccacctttcccccctttctattccacaaaactgccattgtcatcatggcccgttctcaatgagctgttgggtacacctcccagacggggtggtggccgggcagaggggctcctcacttcccagtaggggcggccgggcagaggcgcccctcacctcccggacggggtggctggccgggcggggggctgaccccccccctccctcccggatggggcggctggccaggcggggggctgaccccccccacctccctcctggatggggcggctggccgggcagaggggctcctcacttcccagtaggggcggccgggcagaggcgcccctcacctcccggacggggcggctggccaggcggggggctgacccccccacctccctcccggacggggtggctgccgggcggaggggctcctcacttctcagacggggcggctgctgggcggaggggctcctcacttctcagacagggcggttgccaggcagagggtctcctcacttctcagacggggcggccgggcagagacgctcctcacatcccggacagggcgacagggcagaggcgctccccacatctcagacgatgggcagccgggcagagacgctcctcacttcctagatgagatggtggccgggaagaggcgctcctcacttcctagatgggatggcggctgggcagagatgctcctcactttccagactgggcagccaggcagaggggctcctcacatcccagacgatgggcggccaggcagagacgcttctcacttcccagacggggtggcggccgggcagaggctgcaatctcggcactttgggaggccaaggcaggctgctgggaggtggatgttgtagcgagccgagatcacgccactgcactccagcctgggcaccattgagcactgagtgaaggagactccgtctgcaatcccggcacctcgggaggccgaggctggcggatcactcgcggttaggagctggagaccagcccggccaacacagcgaaaccccgtctccacccaaaaaatacgaaaaccagtcaggcgtggcggcgcgcctgcaatcgcaggcactcggtaggctgaggcaggagaatcaggcagggaggttgcagtgagccgagatggcagcagtacagtccagcttcggctcggcatcagagggagac

SEQ ID NO: 8802 - DNA, 879 bp, Artificial sequence
  DNA replication origin
ccggccgccccgtctgagaagtgaggagaccctctgcctggcaaccgccctgtctgagaagtgaggagcccctccgcccagcagccgccccgtctgagaagtgaggagcccctccgcccggcagccaccccgtccgggagggaggtgggggggtcagccccccgcctggccagccgccccgtccgggaggtgaggggcgcctctgcccggccgcccctactgggaagtgaggagcccctctgcccggccagccgccccatccaggagggaggtggggggggtcagccccccgcctggccagccgccccatccgggagggagggggggggtcagccccccgcccggccagccaccccgtccgggaggtgaggggcgcctctgcccggccgcccctactgggaagtgaggagcccctctgcccggccaccaccccgtctgggaggtgtacccaacagctcattgagaacgggccatgatgacaatggcagttttgtggaatagaaaggggggaaaggtggggaaaggattgagaaatcggatggttgccgtgtctgtgtagaaagaggtagacatgggagacttttcattttgttctgtactaagaaaaattcttctgccttgggatcctgttgatctgtgaccttacccccaaccctgtgctctctgaaacatgtgctgtgtccactcagggttgaatggattaagggcggtgcaagatgtgctttgttaaacagacgcttgaaggcagcatgctcattgagagtcatcaccactccctaatctcaagtacccagggacacaaacactgcggaaggccgcagggtcctctgcctaggaaaaccagagacctttgttcacttgtttatctgctgaccttcc

SEQ ID NO: 8803 - DNA, 1340 bp, Artificial sequence
  DNA replication origin
tctttatctaaggactttctttgccctcagtaggctatctctgtaggatccaaagagttattttgaaccccagacctgcatctggcttgtgggatagaggcattttgtcttgttaataggtcttgtggtggtgaataattagattgaaagattaatgatagtgctttaaatctgagtaatataatttcatgttgggattggtgctaaaagaaaggtggtagttctgcactcatgaatcacatcttgtaaatgacagaacactttacaacatacaatatactattgctccaccatgtcgtcaataattctgtttagtagattcttcatatataaaagaaatcgagaaattttattttggccaggagctgaagttggttgtttagtagtagtagtttgagtagtgaccgaagtagtagtctggtgtgtgggtgcagctgaagtttcagaagtgtcaggtgcaagagtagttggggaagaattaggtgtggtaattggggcagctgtggtctcttgtggagctggggaagacggtggagctggtgtagttgcagaaggtgtgggtggggcagctgtggtctctggtggagctgaggcggatgatgggtctagggtagttgcagaaggtgtgggtgggacagctgtggtctctggtggagctgaggaagatagtggagctggtgtagttgcagaaggtgtgggtggggcagctgtggtctctggtggagctgaggaagatggtggagctggtgtagttgcaggaggtgtgggtggggcagctgtggtctctggtggagctgaggaagatggtggagcttgtgtagttgcagaaggtgtgggtggggcagctgtggtctctggtggagctgaggaagatggtggagctggtgtagttgcagaaggtgtgggtggggcagctgtggtgtcttgtggagctggggaattcactggtgctaatgtagctacagaagagcttgtgttaacattttctcttgaagatatggtggtggcattctggggaagaaaagtcacatttggaagggtagtaattttggtggaagctgatgggaaagtcacagatggaatttgggttgtagccactaaggtagggttgaccacactgctatttttatctggatgtttaggtggctggtgaggatttgggaatttgggggggttattaggtgaaggtggaagcttaggcctacagcgtttgtgcagacatttataggactttctaatgaacggcttctggtgagctagcagtccaggataatgtggtaattcaaagtgagatttgggtgattggtgatgatgccttctgtgacgtagttcatgatccc

SEQ ID NO: 8804 - DNA, 1110 bp, Artificial sequence
  DNA replication origin
ccggcgcctccatcgccggggtacagcaggaagaagggggcggccaccggcgagtcgggctccgactgcccggcgggggaggccggcggcggccccgcctcgccctctcggtccgtgcccccggcgggagcgcggcgcggctcctccggccgccactccccgcccctcgccggctcctcgctgcaactttcggcaccagcggtgggcggcggcggggtctcagccatgctcactccttccttcgccgcagcctccgattcgcgcccgggcctgggcgggggagcagagggtcagggcgaggagccgccgccccgtcccgtccgctgcgccgccgccgccaccgccacctttcttctcggccacgggctggcgcctgggctccgccgctcggcccacagcccgccccgccagggtccaagccagctggagggaccgccccgcccgacggcgcggcctcgctaccggccgcctcctccagcccctcccgccccggcccccagcctgtgactcggctcccctagggggcagcgtcctcctcttcccactccccaccttccgcttccctccggctgggctgactgcctcccgaccctcgggccctgggcctcttccttacccgcccccgctgggccctgtaaggcggtcaggtgtgtctagtgcttgaaaagtggaagacctggcgaaatacctggcggcgttttgtcgtgtaaccgccaactttatcggtagcacgaaggcacaaagatctgggttgaagaagaggcgaaagctaattttaaaaaagcacctccctgcccccgggtattaaactgtaccatttgcctttcacacactgcaacttcaaccgttgattcactgtttggagtattgagctctttatgtgagaaaccaaaggtgggtgtcttccttccaccacctcttttgttcccgtcttgtgcgctgtactgaaatcctgtatttgctttgactttaattccctggttttctagtgccgcgggtgcgcatgagtgcattttaaatcaaacagcttagaatttatacgacaaatgtcaattacaggtcgacagttttctctttcacagtgcccgtgtctcgctagtaattagccac

SEQ ID NO: 8805 - DNA, 1336 bp, Artificial sequence
  DNA replication origin
gcatggggacgcccgcggggaagggagcattcggctggggagggccggcccggcccccgcggagctccgcctcccgcggggtgacccgagccgggtggccgggaggcgggggctttaggggctaccctcgggaagctgttctcccgaggcgcccggtgaggaggcagcgggacgaccgcggttcgggcgccggattctacctccgcgtctccccaggccgcggctcctgcctggcctggtctctctcccgtcttgggctgggcgctggtcttcgccggcctcccacgtgcttgggcgggggcgagaagcggcctgcctgcccccctccacccggggcgccctggccctgtcccgggtcccgggctgggaaccttccccgaaggagtctaagagggggcggcgcccggagaccccgtggcccctctgacccgcctttttcgggctcccggcgccgcggcagctgagtaggtgtggctgctgcgccgccgccgccgccagtgcggccttagtaatactagtaactaattttttacgagcgttccttccatgccggtaaatatgacagatccgtcccccggattggaaagagaaatcggagcggtgcatgagaagacaagaagggaatgtgtggctttggaaggctacctcccagggttatatcggttgtcgggaagaggcctccacttttaaagccactggcacacgcgagcgctctgaatgcagctgacccacactccgtgctgtattttttattagtgaactgtttactgtgctggcaaacgagtagggccctagagtcgtcaatgaatataaggactcttagaggaatgttaaatctgattttcaaatacaagctcttacagtatgaaaatgtggctgacgatacaaggcatgctgtaagcgccaaatactttgctgtatgagttctggaaagggagacagaaacttgcctgaagcgatgagggaaggacctttcccaccatacaccctatatttttaaagcacaagtacaaatcttttagctgctctgccctgccaagaaaccctgactcaccttttctgccccgatccatctcctaggaaaagataatatttattgattatttcctatgtgcatgtgttgtgataatcatggttaataagtttgtgtgcgccaaactgaatgccactttttcagatgcggaagctcgatttatcccaagtaacagcttaagagaaggaatgcagttgacccagattgcttttctgctaaacccatgctctttaaatctaacaagagatccaaaactgtgatggtgggtgacaggttaacaggaagggtctatgtgattcagct

SEQ ID NO: 8806 - DNA, 757 bp, Artificial sequence
  DNA replication origin
gcagctgccttcaggccctgcgccgcctccggagtccatggccggcacgcgctgggtactcggggcgctgctccggggctgcggctgtaactgcagcagctgccggcgcaccggcgccgcctgcctgcccttctactccgccgctggctctatcccgtcgggcgtctcgggccgccgccgcctgctgctgctgctcggggccgccgcggccgctgcctcccagacgcgtggcctccagaccgggcctgtgcctcccgggaggctggcggggcctcccgctgtggccacctctgccgcggccgcggccgccgcgtcctactctgccctccgtgcctctctgctgccgcagtcgctggcggcggcggccgccgtcccgacgcgcagctacagccaggtacgtgggcgccgtgagggacctggcgcgagatccctcccgggccgcgtgcacgcgcccccgcgcccctccgtccctccgtgtgcgcctcgcgggcacgcccggggatccgcgacactcgccgcacacccgcccccgtccaccctgtgctcctattgggccctggaacaagggaagctctcccaggcgtcgggtcttctgcttgttttgttctcgcctcgagtctctggtcggttgggcagtgtaagtgtggctggggtgaatgttgaggccttgttccccgcctggcccatggtaggtttcgtgaggctgctgacgcccccacctcgcatcttcttgctttccgccggctggttgtgaagt

SEQ ID NO: 8807 - DNA, 1255 bp, Artificial sequence
  DNA replication origin
caggcaggcggcgccggtgcgccggcagctgctgcagttacagccgcagccccggagcagcgccccgagtacccagcgcgtgccggccatggactccggaggcggcgcagggcctgaaggcagctgctccagcagcgatggtggaacggaagtggaatccagggccggttgggggtggggtgtgcctggcacatgcgccgcgggcactgggtggggggcctccgagagtcggaaggaggtggaggagagcgcgacgctccgcccagtctccgcccttgggcggggctgcccatggtttgggcggggctgcccatggtttgggcggggctgcccatggtttgggcggggctgcccatggtttgggcggggctgcccatggtttgggcggggctgcccatggtttgggcggggctgcccatggtttgggcggggctgcccatggtttgggcggggctgcccatggtttgggcggggctgcccatggtttgggcggggctgcccatggtttgggcggggcccggggaagtgggtgcaatcgaactgctcttttttcaggcggtggaaactgaggcccaaagtaagtgaggctaggggcctggcgcagtgactcattcgtagtgactcattcttgtaatcctagcactttggcaggcagaggcgggtggactgcctgaggtcaggagttcgagaccaacctaggcaacacggtgaaatcccgtctctactaaaatacaaaaaattaggtcggacgcggtggctcccgcctgtaatcccagcactttagtaggccgaggtagggcggatcacctgaggtcagcagttcaagaccagcctggccaacatggtgaaactgtgtctctactaaaaacacaaaaattagccgggtgtggtgacgggtgcccgtaatcccagctactcaggaggctgaggcaggagaatcgcttgaacccaggaggcggaggttgcagtgagccaagatcgtgccaccgcactgcagcctgggcgacagagtgagacgccatctccaaacaaacaaacaaaaaaattaggttagggccatcctgctctgggtagggccgagagctgtagcacaagtctgtgctgccctgcgctgtgccaccgaaacccgtggtgtgagtggctaaagaaccctttctgaaaggaattgtgataccttggttataaaaaaatcgttgggataatatcagagatttggtaccccccgaatttgaggtatgtgaggaaggagaacttc

SEQ ID NO: 8808 - DNA, 979 bp, Artificial sequence
  DNA replication origin
ggcccaggtccacccgaacaaagccggcgcgtgcggggcctggctactcacaacaagaagctcatgttggccgcggggcaggctgcaggctcggcggtcgcgaggcctcggagcggcgtgggccaggaaagaagaggaaaggcgaatggaacaggagacagggaggcggaggaggaggtgccgagagccggctgctcggtggccgcaactagttcggctcagctagttccaatggcagggggagggggcggaagtgggtagcgctcgtcttgaatcactccaggggaggggaaggaaagggaggcggggcaggctctccgcgagcccctccccagctccccgccgcccccacctcacgagctctcgcgatagcggtgcaagcccaccccggccctccggctgcggcatggggactctcaccttctggtctcctctgctgctagggacgacgcccagcgtgtgcgccgcggctgcccggcccccctgtccacccggttaggagtcatggcagagctctcggagccgctcagctgggctccagaggtcagggaggaagtgggcttcagctcggggatgtcaaggtcccgcagtgagggatggaattaccaccggagttaggcccaccgtgagtgtccggccaagggcggtgaaaggtaatggcatctctcagttcaccacggaacccagcatgatagggtggtcatcggtgtaaccacttagggggccaaagcttgtaagcattctaatgcacagaacatcctagaagctagaagctattcagacccacttacaaagggacttttattctcacagggttatggggcccagggcaagcctttatattctgtttaagaatccttcacataccttgaatatgtcaccacagcattaccaatttaggagggaaatacgggtatcgaagagatgtccgtcttctttactcacaacacccatcaaatctacaagttttcaaagagaa

SEQ ID NO: 8809 - DNA, 1604 bp, Artificial sequence
  DNA replication origin
tcttgggcaccgggcattctgaggcccaggggccaggcttttggcatttgaagcaaggtccacaaggatgttttgaaggagcccctgggagctgtggcttggatgttctgaagttcttgtatgctggagacatggttgtgggttgtcttacagcagaggcaagtagctgtaactcagaaacacgttgctgtctggctacctcctctctattattgtacaccttgaaggtgaggttgattaattcctgttgtggcgtttgagggccggattccaatttttgaagttttctaatgtcaagagctgactgggtgataaaatgcatattgagaataagacggccttcctctggggtctaggacagtaaagcatctaagggttgttgccaaacgggccatgaactgcactgggtttttatatttgatgaaaaagagcctaaatgctaactgatttgggagaggtcggataaagaaaaaaggagcattaactttgactatgcctttaactccagccacctcttcaagaggaaattgttgggcaggtggggaagggctagtcgcggaaggaaactgtaagccagaccgggtgtgaggaggggaagtgatagaaagattatagggtgggggagcagaggctgaggaagaattgggacctggcacagcctggcaaggagcagcctgggtagaaggggagaggtcagatgagtccgcagaaaaggattcaaaggactcagagcttggtgtggagactgaaggaacagacaggagagaaagaagaaggatttgggatgagtcgcattaactttgactatgcctttaactccagccacctcttcaagaggaaattgttgggcaggtggggaagggctagtcgcggaaggaaactgtaagccagaccgggtgtgaggaggggaggtgatagaaagattatagggtgggggagcagaggctgaggaagaattgggacctggcacagcctggcaaggagcagcctgggtagaaggggagaggtcagatgagtccgtagaaaaggattcaaaggactcagagcttggtgtggagactgaaggaacagacaggagagaaagaagaaggatttgggatgagtcgcattgggagcagagactagggagggacaaatgtgtaaaagaatgcctagacatcaggcacctcagaccatttgcccatttttcaacaaaaattatctagatcttgtaggatagacaaattgaaagtgccattctccggccacctggaactactgttgagtttgtattggagccaagtggtactgcagaagaaaataaggcatttaagttttaggtcaggtgtgagttgaagaggttttaagttcttgagaacacaggctaagggagaagggggaatggagggcggaaggttgcccatagtgaaggaggtaagtttaaagagaaaggtagagacacggggaagggggtgggcgagcagcccggggctgcaatgtgggtgagcaaccaaagcagacgtccccgcaattgacttgccaccaagggaatgtgggtgaatcaccaaggcaggctccctgcagtgatcagacaccaatgaaatgtgggtgaataatcagtcagg

SEQ ID NO: 8810 - DNA, 1381 bp, Artificial sequence
  DNA replication origin
accctcccgccccagcgcctttgccccgctctcccgcgctcgcctctctccggagcgcgcacccacccaggcggcaaagttgtgactacttgggcgcgggtgactggcgccccgctcgctccgcgcccggcgcagacaacttcccgcggctcggccccgccgcgtcccgggctcgcgcctccagggattccgcggccccccagcctccaaccccggcggcgcgccgggcagcgcttcggtggcggcggcggccgcggtggcagcgaaggcggcggcggcggcggcagtggcagtggccgctgcagccccacactccgccgccaaactggaggagcgacggaagccagaccccaggaggtgagcgcccggccccggcagctgccgggagggtcgatggggtccctcgctccaaggcggaggcgggcgcgggcccgggggccgattccgtagggcgcgcaggcggcctcagcgcgctcctgggagggagagagaggtcaattgcgggccgggcatcccctgagctgggcgcgggcggtgtgtggaggctgcttccgcggaaaagtattttttttccttcttagggtttagaggaagagtttgggtggtctgcttctccctcactgctaagtcccctgcgcgcaactgggcgtctttacgaggactgcggggccagttctgcggcgggctgggctcgggctcagtgacacgtgtgttgctgtgagcctgggtggtcgccctgtgaccaggcacctgcttgagaggaacacatccctaaacccatcacagggggagatttggggactcttggtgctaccgaggccgcggcccccacttcactgccagctccaggacggagcatttacatctctccctggcacgccaaaggcggggggtgagtcaggcagattctctgcaagtggcacacacacatttatttgcaatggatttggctaggggaggcataggttaaactggaatttctcttggccagcgacaacggagctctccctcaggtactgggcagcatgtgagtcttggcaaagagaggtgatttcttttttcttaagtgcattttactcagccgttgccagtccgttaataagtcaccagaggaaggcaggacctgggaactacatcagcaaaccgcagcaagcaccataaagacaaaagttcttatagaacaaaaagaaaaacttgaacttgacgtgaaagatggaggaagcagttctacctctcttctatcacttttttcagcgccctgtaaaactgtttttttctatccttccttccctctcaaggccctaccttctcagcataattgatcgcagcaagctctttccaacttgacactgaagagcagcgacccctttggcttaccctc

SEQ ID NO: 8811 - DNA, 1166 bp, Artificial sequence
  DNA replication origin
gcggcggcggcggcggcagtagaggtgaccgaggcggtggcggcggaggcggcaccgattgctgtgtcggccccagtgcggccgaagtcgcggtagagcgtagccccacgcccctcccccgtccgcgccctccctctttccctggggatggagaaggcgacggttccggtggcggcggcgacggctgcagaaggagaagggagccccccggcggtggcggctgtggcgggcccccccgcggcggcggaggtcggcggcggcgttggcggcagcagcagagctcgctcggcctcgtctcctcgtgggatggtgcgagtctgcgacctgctcctgaagaagaagccgccgcagcagcagcaccacaaggccaagcgtaaccggacttgccgaccccccagcagcagcgaaagcagcagcgacagcgacaacagcggcggcggtggaggcggcggtggaggcggaggtggcggcggcggcaccagcagtaacaacagcgaggaagaagaggacgacgacgacgaggaagaggaggtttctgaggcaagggcctggtttcaaaggaaggagggaggaagggactgtaagggataggggccgaaggtgggaggggatttggagtgggacagattccagtgggttgatctcttaggggccaggctttcgactgccccctttcttccctcggcctaaatcgtgaggtgtgggaatgtgggggagggtagctgacacgtgggggtgggaggaccacggagttcacagagttggtgaacagcctgttatcatgggatggctcacttggttaaggatggagggaattggttagattccctgtttgcacgccggggggtgggggggtggtctgcctggggccagtagggccaccttagtctgaggcgggatcgggatcaaagcgggaggagtaaaataatgggtaaatgagtctcttggggaccaactaggaggttgatcaacttctcccagttgtgaggtggaggggagcagtttgaggggggacgtaaggttgtaatggactcagagctaagtgtttgtgtatgtgagggacacgtgagaagctgtacttttccatactgttctgcagggtttttcgtaactatcctggctgctgaagtaacttcatttcctcgatctcccagggattttcgatg

SEQ ID NO: 8812 - DNA, 1019 bp, Artificial sequence
  DNA replication origin
accgccgccgctgttgtcgctgtcgctgctgctttcgctgctgctggggggtcggcaagtccggttacgcttggccttgtggtgctgctgctgcggcggcttcttcttcaggagcaggtcgcagactcgcaccatcccacgaggagacgaggccgagcgagctctgctgctgccgccaacgccgccgccgacctccgccgccgcgggggggcccgccacagccgccaccgccggggggctcccttctccttctgcagccgtcgccgccgccaccggaaccgtcgccttctccatccccagggaaagagggagggcgcggacgggggaggggcgtggggctacgctctaccgcgacttcggccgcactggggccgacacagcaatcggtgccgcctccgccgccaccgcctcggtcacctctactgccgccgccgccgccgccgctccgccagctctcacctcgtctcgcgatactaagggcggggagcctgacgatgggagggagggagggagggagagggagggagcaagggaaggagggtgaggcgtaacagggagaccgggtgtcgggagaaccagaggagaggagactggaaagaagcggggaagtgtgcctggggcagcttccgaaggggaacggcggggacagatgaggggggcgcgattgcaaccagagcgcccgcgagctcccggatttcttctctttcctcgctatttcccgcacacacagccctgcagccctcccttcttccttcctggcttgtgattagaacgcagccgcaggcggaagtgcagtgacgccatcagccgtcgcctgagccgtggcgcgcgggtggccgaaaggcgaaagtgagatttcaagggccgggtctggggccccgcgggcgcgcagtgctgcggcgtgtggggagtacggggaggctggagaggagccggccccgggcagtgtgaggtgcggaagcgcggtccagacactttgctgacgggaggccggtccgccagatccgggaggtggggcc

SEQ ID NO: 8813 - DNA, 927 bp, Artificial sequence
  DNA replication origin
gtgtgcctggggcagcttccgaaggggaacggcggggacagatgaggggggcgcgattgcaaccagagcgcccgcgagctcccggatttcttctctttcctcgctatttcccgcacacacagccctgcagccctcccttcttccttcctggcttgtgattagaacgcagccgcaggcggaagtgcagtgacgccatcagccgtcgcctgagccgtggcgcgcgggtggccgaaaggcgaaagtgagatttcaagggccgggtctggggccccgcgggcgcgcagtgctgcggcgtgtggggagtacggggaggctggagaggagccggccccgggcagtgtgaggtgcggaagcgcggtccagacactttgctgacgggaggccggtccgccagatccgggaggtggggcctcgttctggactgctgtacgtagttttattcctggtcatttttttccaccgccaaatcgagagatagagctttggatcatgagagatggcgtcgtgttgggaaaagagccttctttacctgagtttaagctcggctcatagacatcctctacctgagtttacacgtgtgtaatatgaaggcagtcgattaggagatgtctaagatcattacttacacctcaagtttccaaggggaggaagacacgggaaggatgcgtggtctgtgccagactttgtagacgattcactgaatgaccctgatttagctcttccggccctcttcgattcagcttggaagcaagcataaatagtgattgttgtctgtatacttctctcggaaggaatgctgttatgggagttgtgggttcatttttaggtgtctgaagaagtttcaggacttttgaaatgatagtggagcccattgaactcagaattatccctttctggtctagtaggagtatagtggcatacggaaaa

SEQ ID NO: 8814 - DNA, 1008 bp, Artificial sequence
  DNA replication origin
aaccatatcaagtgatcaaatggtgtcagccaaagcattctgtagtgtagtggtatcaggatctgtcttaattcacatgtgccagtagcacaaagcattttgtagtgtggtggcatcaggatgtcttttttttttttttttttttttttttttgagacagagtctcactcttgcccaggctggagtgcaatggaatgatcttggatcactgcaacctccatcccccaggttcaagcgattctcctgcccttccaagtagctgtgattacaggcacggaccaccacatctgtctatttttgcatttttagtagagatggggttttgccatgttggtcaggctggtctcgaactcctgacttaaggtgatctgcccacctcggcctcccaaagtgctgggattacaggcatgagccactgtgcctggcctaggatctgtcttaatttacatgtgtcagcagcagtggcagcgtcagcaagccagcacggtggggtgcacacttgttggctgtgtagcagggtgtgggcattcaccacagtgacagaggcagcatggcttggggagggtgaaggacccctgatgcttactgtgtgcatggtcccactggtggtcgtgttggtaggagggcagggcactggtatgtgcaggtctgtttggctctctatgagccacaggcaggggtggttgctcagcataggggagggtctgctgttctccgtgcctagtttcactcctgtggctgtgttggtgcaagggaagggtactggagggtgcagtgttgtctggctctgtgcccaccaaggttccaactgcaaggcccgtctggtgggaggagggggtacaaaatgcacttccccactgaagcagtggcaaggcaggactcatgcacaggcacacttgcggggctaggaagacaaaacctacgtgtgcacacatgtgcctgcaatgtgatgcaggtggggggtggagggttgctgtgtgtctgagagatgctgcagtgtggagaggg

SEQ ID NO: 8815 - DNA, 905 bp, Artificial sequence
  DNA replication origin
gggtgaattccctgcagggtctgcaagcactggcaaggcagttcatgggccacccatactcctagggaagaagagactcgctgggtgagcgggactgttggcgcggggtgctaccccagccgtgtcccgctccggagaccccagggcgccgggacccatctgccgctcgccggccggaggctaccaggagcaggagcagcagcgccgcccgcagtagccggggagcgcgggggacagcggggggcgcggcgcagttcaccgggctcagaaggcaggtcgggcggcggtgcgaggagcgggagagctggcagggaggtgcctgcagcccaggctctgtggctccccaagatcggtgaaccctttttatgcatgattggggctgaaaagtctggaacccccgggccagggaaattctcggagctccaggtctatcccgagtactgaagaaaagggctggccccacccccggggtgggtgggtggtgggcggtggctggttacccactggtgcagcctccccggctcgccttccagagtaactcccgtcgactgtgggatattcgctttctaccccaaatccctggaaggtcattgagtccacctcgctggaaataccgcctgcggggaaggactttgggcatggggccatcccagtgcgtgggacggggaggagagttaagagctggggcggatccctgagaaccacaacaggggaggcgcgaactctttaaaagagtgataactacttagttaatagagttgggatgggggatttaagaggaattaaggagggcttagaaggctagattttgcttagctggctatcttctagatatcatattctctatctaacctctctctgtctcttctgtctctgcttttcggtttagcatatttcacatatat

SEQ ID NO: 8816 - DNA, 848 bp, Artificial sequence
  DNA replication origin
ccgccccctgcggacccggcactctgtcagttccgtccccggtcctgggaaccgctctttaccccactctgcgtgtctgccggaacctggctgggaagcgctacttgctgccctgccagcccgggtgagggcggagccaggcctccagccgcgaggactggagtcgcgggaggtggagccccagtccggaagccggggatccgcggccatgacggtgccggtccgcggcttctcgctgctccgcggccgccttggccgagcgccggcgttgggcagaagcacagcaccctccgtaagggcaccgggagagcccgggagtgcgttccggggctttcggagcagcggtgtgaggtacgagggctgcgggcgccgggtgcggagccgctggcggtgggaggtcggcgggggcgcgggcggcgctcgcgcgcgtggggcccaaggctcgtgggcggccgcgcggcggcgggctgggtcgaggacagccttgtctgtgaggtggccttgccggtcgcgcgggcgagtcgcagttgcctcagcttggggaacgaaaacgtgctctgctctgggctctcgcaccagaatgttccatctttgcagcaggtgcacttgatttaggaagacatttgaggcactaagaaaaggtagtataaaaacacgtggtcggcttggtcaaacatttgtttttactttggttattttagtgtttcgtaaataaaggagtaggcgttgtgcagatgacttactaatgtttgcgtttctgaattcctttgttaatagtgttgtctaagtcttttccaactctaaaattatttatggtttcacaaaaccaaatatcaatccagatttct

SEQ ID NO: 8817 - DNA, 1881 bp, Artificial sequence
  DNA replication origin
ctctcaggcgcccgaggcccgggaagggggcgaagaaggagggagacttgtctaggggctgcccggcccggcagagcggggttgatggaccgggccgcccggtgcagcggcgccagctccctgccactgctcctggcccttgccctgggtaagtggccgtgctgggcactggaaaccaggaggaaagtctggggctggagtcgcggggagggcgaaccctgaaccgagctggcatctggacaagagggcgcgctggggctggcaggcgcgggttggagaactttgaaggctgggagagcgcgaggttaaagatctggcaattgggcacctggggctgcacctgctggaggcagtccctagacgcgtgagaaggcccgagggcggaagcgattccgaggtcctcgctgccagtgctgcgagcaggccgccagctgctgacttgtgcgcacagcagagggcctggcggcgccggcgggctgtccaccggggtgaggcgctgtgctcgcaagtgagggtcggggggtgggggcaggggcgagcagggaaacccactaaagaagctcacgtggtagtatagaccaagaagcatatcctgcaggaggcagaagaacgggaactctttgactgaaggtgtgatcacctggcgttagggaagagtgccagcgggaggaggagtagcaggatgcctagagccctccagagggtctctcctgcctccttaggagtcagaactcacaaagcagagctggaacttcagatgtggctggaagcaggcttccccttcccctccaccgagggaaggtagtgagaaggcttctaagtaggaaaaaatcccaactcttcaaagcttgctctctgcatcatggtcattttgcggggcagagaagggaagggaaaccagtaacattttctaatcttagctgggctgtagacacatctgggtttggagcatttatgtggtaggaggagagtctccacagctgaagtgtcaccacgatatcactcctaccttcaagcctgggaaggggacaccacaaatgaaaaagaatgggaattcctcttattgaggaaagagagggggagcctaaatgaaaactttcatttgactgtgtccttggagtaagagaggtggctaaaaaggtacagtgaacttgcttggaggtggatcagacttaggaccaaggttagagaaaataaacttatttaacaaacgctgaagaggaaggagtcagtaacaatttagtggtagagtgaatgtgtacattcatgaagaagagcaatggggttgagacttaaccctagaaatagtactgatgcttttgccagcattgcttgcaagtagctgacattctcttcctccaccgtgtctaaactatccaacagtcaaagtattccctgagaatctgtcgtagtcagcaaggtgctgaggtatgtagcaatggaggtggggaaagggctcatgagattcctaaaataaaacatgattcctgccctagaacttgcactgaatttggatatgcaagcccagcagggtaacctgtggaaaaattcacggaatcagaaaagggagaaagagctcaacagcgggggctggaatagtggggaaaggctgaatggaggacacgaatgcgtgccttgaggcttgggtagagtttgcaatagtagagaggaaagagggaacagagacaagggaaaaagcatttagtaaagggttggcgatgcgaatgagcatgctttactggaaagagtagaatttctgagaggcagacagattatgaagaactgaaaaagccagattagaatatttggaacagaatcaataagctattaaacacacaccatcacagggcttgactgggagtgatatgatgcaaacaatgg

SEQ ID NO: 8818 - DNA, 1359 bp, Artificial sequence
  DNA replication origin
ttgttcctaatcacatagattaccctagaaaccggaagggccttgaagtcaaaagcattcagagaacatgctgaacaaattgaatttgcagtttatctggccagggaggatggagaggggatgggcacttggtctgagtattttttgtttctcattccaacagaaattactagatttaccaaaacaaagagaaaaaaatatgatccaaatttaatctggttgtggaagtgtgagcaaaatctacaagtggtagtgtgatagagtcaggcagaggaattgaccatagataaggtgctcaggactcctagagtcagcttctggtatgtgagaaagaagtgagaacagagcccatggcatatgaagaagatattacagaaaaaagaaagctgccttccacgcaaatcatttctttacaaaggcttgttaactcctgcagtgccccagctctagtgactaggggaccaataggttcattaataacagaattgggagagaacctggcatctgctttgatcgaagtgtgagaattaagcaagcctaaagtgtagcaagagcagggagggaactgaatgaaaggtcagttctaatctgtaggctttggagaagctttgggctcttgagagggagtagagtacagaggctgagcggggtgcctgggcaggcatcttatcattacttgcgagttgtgtgaactcgggcaagttaaacttctctgtgcttctactttctcccctgaaaacgaggatataatctccaaggattgttgtgagaactaaatgacttggttgattcctgaacagcacgttgtccagtgcctagcacatagcaatcactcaggaaacgtcagcctttattatgggcctagtgcacaaactattcttaccagttatgcgaccttgagaacattgtcttctctgtgccttcattttctcacctgtaaaatggaataataataattcttagaaggattcatgaaacaacgcctagtagggtgtctggcttagttatccccccgacagtattttcttctagtaagaagctgaatgcagcggcagacatcctggttcgggccccaggaagctcagccgggtttaatgtggatgagggtttaatgatgtacacgcagaagtgttttgacaaatgaagaaggtcctcattcttggaacatgtgccggttctccgagggaactcctaaaatggcataaggtcacctttttaaaggctgtaagctcatgtaggaaaagctgagctagattcctaagggcagagatgtgctcacatttctttgcatccctagttcccagcacagtgcaaggcgctgcaaacatttgctgaacccagggtctcgtgtcttgactg

SEQ ID NO: 8819 - DNA, 1135 bp, Artificial sequence
  DNA replication origin
gaccggagaaaggcagcctgcttgtgacgtcaaatcagcggactcttatcttggctttaggccggttccggttccccggctttccgggcgcgagcgtgtgcgagcgcggcagcgtactgcgcgtgctccgcagagggacacgggaaggttgggtccggctctggaggagatgcgtgattggctgacgctgtgctcgggggttccctggccctttcggcaggggtaaaacaataagagggggcggtggcaaagggggcgggacgtccgtggtccttgtcgcacgtcgcagcgcctggcgcccgggaagaggtggttgtgaggcagacgaactcgcggctctccggcttccgaggcttccgagttgtcggaggaagggggcggcgagcaataagaacccgccgcacccggtcctcagcgactcttctgacctccgcgcgacgtacccgccgccgccgttggctggaggtgtgtacgggcgccgggaggggaggtcggtgtggtggtcggaaagggacattccattcgcgctccgcggcgcgaggcaatcgtccggtgtgtgagcccgggagccggaggtgtagcggcagagacattgttcttgccggctccctacggtgccgtgtgtgcgtgagagaagaccagtctttcctctaggtgaggggtgggaggccgcctgggaagggaggtgacccgcgagcgtcttgcgggcagagggctccgagtgcacaggtggggttgaggtttattggggatgaggtggcgaagtggggggggaggcacgcagcagctcccgaaggcgcgctgatggaagcttaatacaggaagtgtgggagcaggctttctggaggggatgttttagggtgggtagcccaccgttcctgtttccgaatcgttttcggctcttgtaccttgttccttcggagcggagaggccgtcgccaccccgcccgtggggggaggggaaaagaggttgtgtcgacggaggcagaagcgacgcagatgcgaaagtggcggcctccgggcaccatttctgtgcacggaaacagaatccgggtttgaaggcagccgccgcttcgcttacccagtacctagtgttccgtcgtgtttgaccaacccccctctccctgccaccgcgg

SEQ ID NO: 8820 - DNA, 998 bp, Artificial sequence
  DNA replication origin
aaaatggcaagaccttgtctctacaaaaaatataaaaaattaaccaggtgtagtgctacatgcctgtaatcccagctccttaggaggctgaggtgggaggatcacttgagcccaggagtttgaggttgcagtgagccgtgatcatgccactgcactccagcatgggcaagagggagagggagagggggagagggggagagggggagagggagagagggggagagagggagagagggagagggagagagggagaagagggagaagagggagagagggggagagagagggagaagagggagagagggggagagggggagagggggagagagggagagagggggagagagggagagggagagagagggagaagagggagaaagggggagagagggagagagggagagagggggagggggagggagagagagagacagagagagagggagagacctatctcaaaaggaaaaaaagaaaacacatacttcagaaataattaaggaatctgaagtaacatggaatacagccaacaaccaggtctgagtggaaaaagttaagatgtgtaagatgatatctagggggtgtcttaatagacaattagccctgtatctaactactgacagcaagtacagtacatttcaacattaactgttacagaatacttggagggagtaatcagagtgcagaggaaaaggaatgatattaattatgcagcaggatacatttttatgcctctggatctttgacttgctgttttacctgactgaaatcccactattctgccttaggaagtcttaaccttacagggtaggttaaaatctcactattttattaaagcatcccaatcagaattaatcccataattgtctctatcataattaatcattctatgccactggcttacatttacatgttacaagaaagaggttaagattgtgcaagacatattttagcacatccacctgcacacatcaccttttacagaaactttccaatgccag

SEQ ID NO: 8821 - DNA, 1363 bp, Artificial sequence
  DNA replication origin
ggcgctgggagcggccaggccgggcctggctcaggcgccgcagccactcagggccaccggggaccggccggggagggcgcgggccgaatcactgccgccgccgcagggcacatgactgcggcctccgcccccgcccgcctccccgcgcagtcgccggcggttgcctcgcggggttgcggcgagcccggcccgcgaacgtcacgtccctgcgcgctccctgcactctcccgagctgcgctaggcgggcgccacggctgcccggcgaaggaaaccgaaaccgagtccgggcccgtccctccgcggccccatccgcccggtgcacccggggccgcgctcgccaggccgcggagcccagagctgcgcgcacgaaccgtgcgccgggagggcgtgggcgtggcgccgaagggtcccgggtcttcgacgcctctgcggcggctcctccctccttgcagttggatccctggcgggtgcggcccggcccggcccgtgagcggcgcacagaatgggccgatgctgcttctacacggcggggacgttgtccctgctcctgctggtgaccagcgtcacgctgctggtggcccgggtcttccagaaggctgtagaccagagtatcgagaaggtgaggcggggcgggctgtgtgtgtgttgtggagtcgtccagctcaccctcccatccctgctgctacatcttgtatgggaaagaccagcactcaggcagaccctccgcgctagagctcttcttgcgtccctgtcttccagggcttggtaggcgagggttaaagaaggatgaggaaggatggagccgactctgttccctttacagtgataagtaaggctatggatcctgacttttaaaaaggccttcggttgtgttctgtcgtttgcatctctccccactccttccgtctacaccccaatctcaggtgggcccaaacttgtttccttcccacttcatgaagaaacagaactgaatgaaagacaccgcagaagaggcaggttatgttgtctgcttgctgtagcctttgaagtggtgtgcgcctggggatgagacgtgggtgtgcggtctattgtgttcttgccctcttgggctgggcaggggcagttggtagctgggccagtcctttaggctgggtgacaattcatccatcagtctttgctgaacgctgacttagtggctttgtatcttgtaccaacagtctgtgttgctttgtctcaccatgaattcttgtttttctcaaacggccataattttcaggcacagatgcatttagataccctacaagaatctgaacttgtctcttcctctagatgattgggctggagagccagtcctttaagaagacttcatcttttgatttcactg

SEQ ID NO: 8822 - DNA, 1250 bp, Artificial sequence
  DNA replication origin
ccttcggcgccacgcccacgccctcccggcgcacggttcgtgcgcgcagctctgggctccgcggcctggcgagcgcggccccgggtgcaccgggcggatggggccgcggagggacgggcccggactcggtttcggtttccttcgccgggcagccgtggcgcccgcctagcgcagctcgggagagtgcagggagcgcgcagggacgtgacgttcgcgggccgggctcgccgcaaccccgcgaggcaaccgccggcgactgcgcggggaggcgggcgggggcggaggccgcagtcatgtgccctgcggcggcggcagtgattcggcccgcgccctccccggccggtccccggtggccctgagtggctgcggcgcctgagccaggcccggcctggccgctcccagcgccctgcaccgcaggcccagcgctcgccccaccgaaattgccgaacctggttcacacactcatttactcattccgcagataggtctgagggcctcccatgggccacgcgctggggattcaaggtggctgggacattcccctgctctagaggcgctcgcaagttagcggggacaccgttaccgcaattacaacacaatgtagcaagtgcttctaccaggtgcctgctgagatcatgccagcaagcatgttctgcctggatgacctagggccccacattgaactggggcctgggggatgcataagtttgtcacgtaaggggcatgtgcaagaatggaagatgtgcaaaaaagggaggaggaggcatttcacggagaaggaaacggtgagcaaaggcattgggggtgaaagagcaaaacctgtaggaagcaagaaggaagttccttttgactgtaggctcaggtgttcagggggtggagtcggaggtgttgaggccccaagaggtcagactttgaagggctcttggtatcctgttaaagatgtggaagttgggaaggagcttaaagcaggcatcgctggtgttcttgcctgctttgctcactgtggtgtcccagacacccaggaccaagacctgcacacagccaggactcaagaagtgttcgttaaatgagtgtttcttctacgccagccctttactagtttctttgcacagttctactcatttaatacccttggcagtcctatgaataggaggttgtgtttgtcccagtcctccagaaacagtcccagatgggggtactatgcaagagagttttgagggaaaacagggagctggacctgggatgcaggt

SEQ ID NO: 8823 - DNA, 1394 bp, Artificial sequence
  DNA replication origin
agcggcagagggcgccgggtgcaggtccgaacccagggtagtttctggggcagggctccaggatttgactccgggctgggtacacccccactccttagggcgcccgggcggtggtggggacttcgacgctcggatgccccagcgacggcgtccggcgggcggagtcgcaggcgcgggaggggtccccgccgggcagctgccgagcacccccctcctcccctcccccaactacgaagcctcgcagagcgtcctaaccgtcacccacgcggctcgcgcggactgggcagcgccccgagcgccacagccgcgaggagtgacgggcgcgggcagcttccggcgccgcagccgaggaggaggagccgccccgcagcctccgcggggcctaggggcgaagagtggggagccgccccgtcccagccgccaggtcgacgtaggtggggccgctgcgcccgccggcgccccgcggagatgtggccggtgtcttaggattaggtgttggttgcaggtacaagcggggcgcggcccgggagacgaggatggtggggtgggagtggggttcttctgaggacccggagcgactcgtgttcatttctggaatcttccggtgcctcgtgtttgttctgcacatggaagatgcccaataaattgtttctttactggaatgagctgctgttgttttaggggattgcaagacccctggggacggtggcgctgaaacctggaccttgaagaacacaggggcctgcgcaaactgatttgatttgtggggaagagaatcaccgagtaacctgccccaacgtgactgctgactctgtgtctaccgcgctgccgcgaacagggggaggagatggggaagacttggtggtagagaggacagcctcgcatccaagacggaatggtgttaaatgccggcgcaagggccctttcagcttgagccctgtctttaaaccacatgtgggggtcagagctttccctcattatcagcatcaatcagcaacacaatgagttctggaaagtctccatccttttccacagcactctgctccaggccccactcaggctgctccaggttttgtttgtgcctcatgctgaactccaacgtcaggggaaagtagaagtgaggtcggctgttgcccaggttttttgactggcaaccagttcttgctgcttctctcagcaggagattaaggcgttgtggccgggtatggcgggggcgtgtggggaaaggaccagggcttccacatatcccagagacatgctaggtaggactgtttctctgtgcggaagctcatcaggtaagggtgcaggagtgctgagagagatgtggtcctcctatctctgtactgcgctcattgcttttaatcttagtgcggttatcttacttgtgttgtggg

SEQ ID NO: 8824 - DNA, 1212 bp, Artificial sequence
  DNA replication origin
aaggtcacagttcaacaggatcccaaggcagaagaatttttcttagtacagaacaaaatgaaaagtctcccatgtctacttctttccacacagacacggcaaccatccgatttctcaatcttttccccacctttcccccctttctattccacaaaaccaccattgtcatcatggcccgttctcaatgagctgttgggtacacctcccagacggggtggtggccaggcagaggggctcctcacttcccagtaggggcggccgggcagaggcgcccctcacctcccggatggggtggctggccgggcggggggctgacccccccacctccctcccggatggggcggctggccgggcagaggggctgacccccacctccctcccggacggggtggctgccgggcggagacgctcctcacttcccagacggggtggctgccgggcggaggggctcctcacttctcagatggggcggctgccaggcggaggggctcctcacttctcagacgggacagttgccaggcagagggtctcctcacttctcagacggggcagctgggcagagatgctcctcacctcccagacggggtcgcggccgggcagaggcgctcctcacaccgcagacggggcggcggggcaaaggcgctccccacatctcagacgatgagcggccgggcagagacgctcctcgcttcctagatgggatggcggccgggaagaggcactcctcactttccagactgggcagccaggcagaggggctcctcacatcccagaagataggcggccaggcagagacgctcctcacttcccagacggggtggcggccgggcagaggcagcactctccgcactttgggaggccaaggcaggcggctgggaggtggaggttgtagcgagccgagatcacgccactgcactccagcctgggcaccattgagcactgagtgaaccagacaccgtctgcaatcccggcacctccggaggccgaggctggcggatcactcgcggttaggagctggagaccagcccggccagcacagcgaaaccccgtctccaccagaaaaatacgaaaaccagtcaggcgtggcggcgcgcgcctgcaatggcaggcactccgcaggctgaggcaggagaatcaggcagggaggttgcagagagccgacatggcagcagtacagtccagcttcggctgggcatcagagggagaccgtgg

SEQ ID NO: 8825 - DNA, 880 bp, Artificial sequence
  DNA replication origin
tcccatctaggaagcgaggagcgtctctgcccggccgctcatcgtctgagatgtggggagcgcctttgccccgccgccccgtctgcggtgtgaggagcgcctctgcccggccgcgaccccgtctgggaggtgaggagcatctctgcccagctgccccgtctgagaagtgaggagaccctctgcctggcaactgtcccgtctgagaagtgaggagcccctccgcctggcagccgccccatctgagaagtgaggagcccctccgcccggcagccaccccgtctgggaagtgaggagcgtctccgcccggcagccaccccgtccgggagggaggtgggggtcagcccctctgcccggccagccgccccatccgggagggaggtgggggggtcagccccccgcccggccagccaccccatccgggaggtgaggggcgcctctgcccggccgcccctactgggaagtgaggagcccctctgcctggccaccaccccgtctgggaggtgtacccaacagctcattgagaacgggccatgatgacaatggtggttttgtggaatagaaaggggggaaaggtggggaaaagattgagaaatcggatggttgccgtgtctgtgtggaaagaagtagacatgggagacttttcattttgttctgtactaagaaaaattcttctgccttgggatcctgttgaactgtgaccttacccccaaacctgtgctctctgaaacatgtgctgtgtccactcagggttaaatggattaagggcggtgcaagatgtgctttgttaaacagatgcttgaaggcagcatgctcgttaagagtcaccaccactccctaatctcaagtacccagggacacaaacactgcggaaggccgcagg

SEQ ID NO: 8826 - DNA, 1450 bp, Artificial sequence
  DNA replication origin
gggcgagccgggcctgtcccgccactcgggctccctctctggctcgctggagagctggaaggtgctctggctacggaggagccgagcgtccggcctctgggggccacggccgctgtccgacgctcctccgctcagctgctgaccgcagggctgccgggaagcctcttccaacttcagctccccgtttttgaagtgctgctccccgttgcctaggggttcagctgactcagagaaacgaatgtgtgcttttgtctcctcgaagtcattcccagaagtactggaagttgagacggtcctgtggggcctatagttatggccaaaaccagagccgcccacactcggtctctggctcccttgctctcgctgctcgaatttggagaccttctccagcaccgagcagtggggcttcccgtactgaaagccctgaagagccgaggcgctgcctgggccgggccccctccggcccagactggatgtgtgcgggtgcgagggggcaggcggctcttcgggacttgggtctgtgctgttgaaagaagccgaggcaccggtcctcccctcgggccgcgggtaggaaacctgccggtccagatggctcccgaggtcaggagcggctttcctcccagggtcttctgccttggtgttgactgcacaggtgggcctgcccccggggtaaccctcctgggttccccggcctagctccaggctgctgtgtcttctcagactctcaggaatgttctggagagatgagaaggctgacttggtcttgccaaagttgcctgacaggctctggcctaggccttctctctccagcctcctccagaggttggcattgtggtcttcctggaaatcgccctcccagggctctgagagcctggaagatctcttgtcttcacccgcttgccaggcctgagcctgagggcatttgaggctgtggggatgagaagatggtttgttactgtgggtgctctttctctcattggaatgtgggctgttgccttggggaggtgtgagatgtctcttcagggaggcatcctcctcattttcaggcactgaacagaaatggactttggaggggacatacttggctgtagcttctggtttcttctccactggggacagcaagtcatgttctaagggctggcagaaggcaaacccaggcctgccagatccattctggttcccattctcatcaatggtagccatcttgttgcatgctccctgaggggctatgtatccactctccttggccagtgcagggtagagcataccgttgctactcacagaaggctgaggcacctgggcaaagtgtggctccagggaaggtaccgggtagatgctggtcggcagcagaggttggccaggttgggccttctgggtatagttatgcttgggcttcactggggggctgttctctggactcttctccagcacagtatgcagctgctcctct

SEQ ID NO: 8827 - DNA, 1143 bp, Artificial sequence
  DNA replication origin
caatggactcccgggcagcgactcccgtagggcgcccgggaagggcggcggatcgaagggcagtcccggacagaggccgccggtgcccgcagctgcagcggcaggggcccaggcgagagcgagctgcgcggcggcgaagacgcagggccgctgctgctgggaatgcctccagaacaacctggctgtactgccgggagagctcggcgcactcccgcactcggccaccgcggaggagaagccggcacgggctctgcctgcccaggatgaccgcggggcttccagggagcgggaagaaggcgcgctagctgagccggcgcctgtgcctgcagtggctcactcgcctcccgccaccgtcgaggctgcgacaagcagggcttccccgcctgctctcctgcccggccccgctccccgcggagaccggccggagctgctgacccccagctccctgcattattcgaccctgcagcagcagcagcagcgcactcgagagtgggtggccaggcacccgcaggtgcccgaggcccgtgatcagggccctatccgcgcctggtcggtgctgccagacaacttcctccagctgcccttggaacccggctccacggagcctaattcagagccgccagacccctgtctttcctcgcactctctctttcctgttgttccggatgagtcctgggaatcctgggcggggaacccttcattgactgtctttcgcagcattcgttgtcagctgtccctccaagatctggatgactttgtggaccaggagagtgatggcagtgaggagagcagcagtgggcccaaagactccccgggggcttctgaagaggggctgcaggttgtcttgggaaccccagatagggggaagctcaggaatccagctgggggcctttctgtatctcggaaggagggcagccccagccggagccctcagggtctcagaaacagaggggatggtcacatctctcagcaggtccctgcaggggctaatggccttgcaggccaccccctgaagcctttgccttggccagttcctaagttaaggaggtccctcaggaggagctctctggcagggagagccaaattgtcctcctctgatgaggagtacctcgatgagggcttgctgaaaagaagtcggcgccc

SEQ ID NO: 8828 - DNA, 915 bp, Artificial sequence
  DNA replication origin
aagtccagtagtgcctcctggctcagctctcgggccatcgctgccttgtcctccgccccagaggtgtctgagtctcgccctcccggggctctccccagccagaggaaaccctggccgggcgagtgtcacctgcgcccggggcggcactagccgcccccatcagccgcggaggccagcgctgcccgcagcccgtgagcgcgccaggagggccgtgggtcccctccgggtggccccaaggctgagtccccgcggcagtctgcgtgagagagggcggctccgaggccgcccctgcgcgactctagcctctcgcaacgagtcctcacagcgaaagttcccgggatagggccgagtcggtttcacctgcgccctggcggcacctcctccctgcctctgggggaagggtcaggcccgcctcctcgtgtccctccgccccctgaggtctcccccaccccctgccacccatcccagaagagtcaggccggagagccagccggtaggtgaggttggcggcgaaccgagccggcagcgaactgctctgcggccggggaagtggaaggcaggtaggcgaccggccgttcctctaagtctccgccacgcaggaaacaaaagcgatagaaggtccgttcctgtcctccggtgctttgatgagttcaggctgaagccgatgggggaggaggagaagctgcaagttaacaggcaatctgagttatctttctttattaacgctgtagaggagtacttcagatttctcgaggctgtattgaggtccgcaaaactcactttgcatccaaactaaatttttcttaatatagaaatactttctgggccgcttctccggcgccccctccaaggggtccgaatacatccaagtctatactgaaaagagaaatcactctgaaaattactactgggcaa

SEQ ID NO: 8829 - DNA, 1610 bp, Artificial sequence
  DNA replication origin
ggcagaggctgcaatctcggcactttggggggccaaggcaggcggctgggaggtggaggctgtagcgagccgagatcacgccactgcactccagcctgggcaccactgagcactgagtgaacgagactccgtccgcaatcccggcaccccgggaggccgaggctggcggatcactcgcggctaggagctggagaccagcccggccaacacagcaaaaccccgtctccaccaaaaaaaaaaaagaaaaccagtgaggcgtagcaggctgaggcaggagaatcaggcagggaggctgcagtgagccgagatggcagcagcaccgtccagccttggctcggcatcagagggagaccgtggaaggagactgtggagggagagggagagggagagggagacgtcaattgtttttttaagacataatgctatcacatacttaatagactacagtatactgtaaacataacatttataagcactggaaaaccaaaaaatttgtgtgacttgctttagtgcagtgtcctggaactgaatgtgcaatatctctgagatatgcctgtaaataaattgccctcaactacttggcactccgtaagcctgttacagtttttccataactttgtccctttttttggtttgtttgttttttgagacggaggctcactgtgtcacctaggctggagtgcaatggcatgatctttgctcattgcaacctccacctcccgggttcaagcaattctccctgcctcagcctcccaagtagctaggattacaggcatcaccaccatgcccagctaatttttgtattttcagtagagatggggttttgccatgtcagccaggctggtctcgaacgcctgacctcaggtgatccgtccgcctcagcctcccgaagtgctgggattacaggggtgagccaccacacccggccagatttgtattttgttgctgtttttctctcagtctggtttctcttctccatttggcagaatcctaatgatagttcaagccttctccaatatccagagacaccaataatcactctcctcactcttcctttagaacatacctctattatggcacatctgcccttgggttatactggtcttgttgatgtctcctctggtagattacaagtttctggagggcaaggatcacttttagtcatcattttatccctgatgccatgcagtcacaagtagtgggtatacaatcagtgttcattgaatttaatcatctcagaacatttaatgccctaagcttcaaactggtattgtgatggttaatactgaatgtcaacttgattggattgaaagatacaaagtattaatcctggctatgtctgtgagggtgttgccaaaggagattcacatttgagtcagtggactggggaaggcagatccatccttaatgtggtgggcaccatctaatcagcttccagcgaatataaagcaggcagaaaaatgtgaaaagccgagatgggccttgcatctttctcccatgctggatgcttcctgccctcgaacatccaactcccaagttcttcagttttgagactcagactggctctgctttctccttaagcttgcagacgacctattgtgggaccttgt

SEQ ID NO: 8830 - DNA, 1259 bp, Artificial sequence
  DNA replication origin
ccggccgggcggggggctgacccccccacctccctcccagacggggcggctggccgggcagaggggctcctcacttcccagtaggggcagccgggcagaggcacccctcacctcccggacggggcggctggccgggcggggggctgacccccaccacctccctcccggacggggcggctggccgggcagggggctgaccccccctcccccctcccggacggggcggctggccgggcagaggggctcctcacttcccagtaggggcggccgggcagaggcgcccctcacctcccggactgggcggctggccgggcggggggctgacccccccacctccctcctggacggggcgactggccaggcagaggggctcctcacttcccagtaggggcggccgggcagaggtgcccctcacctcccggacggggcggctggccgggcggggggctgaccccccccacctccctcccggacggggtggctgccgggcggagacgctcctcacttcccagacggggtggctgccggacggaggggctcctcacttctcagatggggcggttgccaggcagagggtttcctcacttctcagacggggcggccgggcagagacgctcctcacctcccagacagggttgcggccagcagaggcgctcctcacatcccagacagggcggcggggcagaggtgctccccacatctcagacgatgggcggccgggcagagacgctcctcacttcctagatgggaaggcggcggggaagaggcgctcctcgcttcctagatgggatggtggccgggcagagacgctcctcactttccagactgggcagccaggcagagaggctcctcatatcccagacgatgggtggccaagcagagacgctcctcacttcccagacggggtggcggctgggcagaggctgcaatctcggcactttggggggccaaggcaggcggctgggaggtggaggctgtagcgagccgagatcacgccactgcactccagcctgggcaccactgagcactgagtgaacgagactccgtccgcaatcccggcaccccgggaggccgaggctggcggatcactcgcggctaggagctggagaccagcccggccaacacagcaaaaccccgtctccaccaaaaaaaaaaaagaaaaccagtgaggcgtagcaggctgaggcaggagaatcaggcagggaggctgcagtgagccgagatggcagcagcaccgtccagccttggctcggcatcag

SEQ ID NO: 8831 - DNA, 954 bp, Artificial sequence
  DNA replication origin
gggggggtcagccccccgcccggccagccgccccgtccgggagggaggtggggggggtcagccccccgcccgaccagccgccacgtccgggagggaggtggggggatcagccccccgcctggccagccgccccgtccgggaggtgaggggcgcctctgcccggccgcccctactgggaagtgaggagcccctctgcccggccagccgccccgtccgggagggaggcgggggggggggtcggccagccgccctgtccgggagggaggtgggggggtcagccccccgcccggccggccgccccgtccgggaggtgaggggcgcctctgcccggccgcccctactgggaagtgaggagcccctctgcctggccagccgccccgtccgggaggatggtgggggggtcagccccccgcccggccagccgccccatccgggaggtgaggggcgcttctgcccagccgcccctactgggaagtgaggagcccctctgcccggccacgaccccgtctgggaggtgtgcccagcggctcattggggatgggccatgatgacaatggcggttttgtggaatagaaaggcgggaagggtggggaaaaaattgagaaatcagatggttgccgggtctgtgtggatagaagtagacatgggagacttttcattttgttctgtactaagaaaaattcttctgccttgggatcctgttgatctgtgaccttatccccaaccctgtgctctctgaaacatgtgctgtgtccactcagggttaaatggattaagggcggtgcaagatgtgctttgttaaacagatgcttgaaggcagcatgctggttaagagtcatcaccactccctaatcttaagtacccagggacacaaacactgcggaaggccgtagggtcctctgcctaggaaaaccagagacctttgttcacttgtttatctgctgaccttccctc

SEQ ID NO: 8832 - DNA, 969 bp, Artificial sequence
  DNA replication origin
cacccggagaagccggcctggaaggggctgcggaccaccaggcggagcggtgggcgaccgaagtgcggctgggctggcctcctcgtctccgcactggaagaattgcccttccgcaagtcttcccttcccacatgggggccctccaggccgcacctcggtcgcccaccgcttcccttgagaagggagactaaagacaggcatctggaagctgtcactgtggcgcgcgggcagacaggggatcccattggagaggaagagccgtagtagtcgctgctgccttcggccgacccaacggccgcctgcttgggaggaagaaaaagaacgcccccgctgaagaattaaggcagccattggttgctctaggggtaaggaccgaggcctcccctgggtgtcactggagcagccacacgtgggggatcagccgacttcattcgatcgctggcgacagacccggcgacccgtaggaatgcgcgctggggctgcggctggagggcgtggcgacggcaacaggcgggtggctcgagtgggtgcgactctgggcgcgtgggactgagaactcctccgccgtggggaagatttttttcccagcagatgttggggtgttactgcgtgtctgaggggccggcggaatggaggggtcccggtgcgtgcagggcagcgaggtgtgtcagatgagctgtggatccctgcggccccacgtgggccggagaggggggcccacgacaacaagcgattgaggacagcgatggacagggcggggaaccagctgggtggaagcacagggagtgtggtgaggagggaagggctgtgatctgccctcggtacgacgccccaagggacagcctggcctcctgaattagggaaaagacaaccggtctctttagacgggcgcctcagagtctgacctgagtcttcaaacgcccagatcccctggggccttgagtctccctgtcccgctggccctgcctc

SEQ ID NO: 8833 - DNA, 1294 bp, Artificial sequence
  DNA replication origin
tgcgacccgtctcccccggtcgcccttccttctcccggcggccgctggagctgcccgcttcgtggagccggtggcaggccccggggctgggagctcgcgcccaggcttttactcagattccagcacctgatggagcagggggtggcggccagcgcacaggctgtcggcatctcatggcagcggagacggtcgtttggggacggaggggcgagccccgcggccggggccagtggagctgggctcggagcccgcccaccatcctcccgcccaccaccgcggccgggcgcgcaggctcacaccccttcctggggaagcgaatggtcccttccaggcgggtggccatgttgctctaataaagcgggaggggcggcggcgtggggggagcagatgccgctggctgccagcgggacgccggcgagcagagcgcagccgcgagggaggcgcgagggaggcgagccggagcccgagcactagcagcagccggagtcggcgtaaagcacccgggcgcagccggagccggtgccgcagctgcgatggccgtggccgtggggagaccgtctgtgagtgctggggcctcgcctgctgctcctcgggcgccgggtggtctctgctctggggcgggtgcggtgaggaccacaggggagccgggcgggtgctcggccccgcggcggcggcgacggctgtgggtgtgtgcacgaatttgggcgcgcgtctggggtcggggttaggagcccaggggctcagttacgtgatgcaacagtggatcgcctcgtcgcgcccctcttctgggaatgcgaaagaaaaaggacccctctcctgttccctttaaaataattctttgaggcgcggcgtgtctcagccgcctccctctgcccgcgcacctcttccctcgtgacagccagaagggcgccgggttcggggctttcctccagtctcccccgcgccgagggggcgctcagggcatgggaattgcgagctgaagtgctgcgtgtggcactgctgtagaagcaggtcagaggggtgggatttccgtggtggcctccccagcgcattgtgagatcccggacaccctcgggcatccacccggctgagcgggccctgcccaggatgtggacaaagccccagataacacacacaaagttttctggaggctcccttgtggtgtgggtggaaggactgaaatgttctgcggctgaaaggccgggggcggcgggctgaggaggctgggacgcgaggaagaggaagggcgggcgggtgcgtgaagaatcgagtgccccacggcgggagggaggag

SEQ ID NO: 8834 - DNA, 986 bp, Artificial sequence
  DNA replication origin
tcagggcatgggaattgcgagctgaagtgctgcgtgtggcactgctgtagaagcaggtcagaggggtgggatttccgtggtggcctccccagcgcattgtgagatcccggacaccctcgggcatccacccggctgagcgggccctgcccaggatgtggacaaagccccagataacacacacaaagttttctggaggctcccttgtggtgtgggtggaaggactgaaatgttctgcggctgaaaggccgggggcggcgggctgaggaggctgggacgcgaggaagaggaagggcgggcgggtgcgtgaagaatcgagtgccccacggcgggagggaggagagtaggagggaggagatacctttgccccgagtgtgtgggccaaggcgccgcgcctactgggttgcaagactcggtccgcgccccggggccgggccggaggggagcgggactccgagggtgcggttcagtggccgctccgcatccccaagtgaaaggcggaggaaggggcggcggcggcctttccttttttttgaaaggagcggagctgggtgggaaaggcggagtcctcctgttttccctttccccttttcatcgtcgatgttcacagtccactcgccttactggctttgggggcgcctcgggcgatgtctttccctgtctatcacctcctcttccctttttcttcttccctttcccacagctgtgcagctgcaggtggtggctcgggagattttgtagttacagacgaaagacttactgagatactggaagctcggaaatcccagaaatgcaaggctgtgctctcaggctcccggctcttccccctctccccgcctaactcctccccagatacgcgcgccttttgcaccctaccccctcgggagaagttcatgggtccctttgcggattctaattcgatttggtggttcggctgcccgcggtgctttcaaagacgttttctgcagtcagaaaacacagcggtcata

SEQ ID NO: 8835 - DNA, 2026 bp, Artificial sequence
  DNA replication origin
ggccccgctgctccccccgcgccgcccccgtggcagcgcccttggccgcgcgctgctcgccggagacccaccctcccgcatcccccagcccggggaacctcggggccgccctcttcgtcctctccggcccagacagacccgtcacctgcccacttgaaaacggcactactgtgttccttttcgggccagtttttctgtcagcgagtaacttttttttgtggcagcggcaaattagctactctatagtgcgtgttggaggctctacgagcccgtgttaatacacaaagaaggggacacacccccaccctcaggttgaacgattctccggggacaccaggaggattactaactttgcacggcagactgaatgccaaatgaatggggtgaacctccggtgctgtgaaattcgggggagggcaacgttacccagggcttggggcgggtgggtggggggaatccgggggaggtgagatttgagttgtgctctaaaggctagattaaataactggaatttgaaaggaggacagaggagcctccgctggagctagggggctccgttacagatccttttggcagaagttgacaattgggtatcaaaacagtggaaggtgtttcgggaggtaggatggattcagactctgaaggggtttgaactaaaatgtttatgttttattctgtcagtggggagccactcgacttagagcagcagagcattacagtaatgacgttaaataacaacatttgatgaggcttattatctgccaggcattctcctaagtggcttgcaattcacttaatccccccaaggctggtagtaggagcctcattttacagatgaggaaaactgagactccacaagattaactttctccttaggtaacgcggctaaaacccagtagccagaattaagtctgattctacgctgtgtggtctctgtcctgaaaatgagtttgttgaaatagcagtgttatctgctgctagcttttccaggtcatttgtggcagatgaaatagaaaggattggacaaatagattaagaaataatggacggaatagatgtagattggctaatctgggaccagagaatctccgagagattctgagcccctctactagaaatttcttgataccgatgaagggcagactaatacagtcagcatgtgttagggaagttcagtaaaaatgatctgcagttacaggtagtttatgtggtaatgtgacatcctagtaggttagaatggagcttagcatgtgtgttggtcaagattggaagctgagtgtgtccgtgttttgttttgattgtgtaatacattaaaaatgaatattcatcttcctatgtatgtttcttcgtctttaaaatgggctttatggctgaaatgggggtgtagtaagaaaaataaaaaactagaaaaaaagggctttccacagtttcatcaaattgtgggaacattacatgagttaatatggcatagcgctttgaacaataggtagtcaaatagtaagcactcagtgcttttacttgttaagctgtttacaagtgaagctattaggcatatgctcaactctggagattaacatcaaagaattcattattaggaaaggcaagtttaccaatagtctcaaagcaactaaatgtaaaggtagaattatgtccaagtacagatgttggaaggcagggcacaactgcacaaatccagagagtcttacagactgatggctactttaggaagggaagtatgagctagaggacatttcaagttgaaacagcagtgcttgtacagccagggagattgggaaagagcatacacttggaattgcaaatacctttaattcattgtttctagtgcataaagtcaaggagggaatagtagaacttcagtttcttgtatggccacgttaatccctcctttcagaagaggaactaagattcagaagtcagcactagtacaggattattaatggaattggtgtgatgatgatagcaaatacaataatacatattagtgaagttgtttatattgtatacc

SEQ ID NO: 8836 - DNA, 1496 bp, Artificial sequence
  DNA replication origin
cggccaagggcgctgccacgggggcggcgcggggggagcagcggggccccagcgcgtcgacgccggccgcggagacgcgtcgagcccccgcccccgcccccgcccctcaccttctcctcctcttcctcctcctcctcctccccggcagagctgtaggcctcacagtggtgacgcggggtcatccgggggcccgttaccacctcattctcataggcgcgcggaggcggtgcgcgcgggacgactcggccaactgaggagggagaaaggggaagcggatcggggggcgcgggcgcgggcgctggcgctcgagcgggacgcacggctgcggccgctgggtcggtcagcgaattagttccatgatgacccccggcctgaggccgccgccgctcgagcccgggttgggagggggctccctctcgccatagggcggcgggggccggggagaggcggggggtgagaccggctctgcccctgcccggggaaagcgcctccgaggggaaatggtgaaagggggggaggggagaaaagaaaagaaaaaaaaaaaaagaaaggggaaaggggggaaaaataagaaaaagcgagacagaggcgctgccgcgtccgctcgcggggaaggctggggagggaggggaagagaggggaagggaggaagaagtgccggcttcctcggctccgccctcgcggaccgattcctagactcgcccactccttgtaaactacgcggacttggtctttcacccttcctgttcctccccgccgccttcccggtccaacgaaagtacagagaagtgcggccgaaaggagacgggctggggaagtcgttggcactaggatggaaggagggaggacgttttctcgtggctaagaaaagccgaaggtccgtggactcattttccttgaaggagcggaagggttgcttgcagaccgcacggtgacgtcagcgtctctgggcccccactgagggggcgtgcggtggccggagagtgcgctgcgcatgcgcctggggaagaaagaagcggccgagcgctgcgcttgggggaggggatttcacgatccgctcctgtggtccagctttacagcagcttggttttatctagccctactcgtccccaggctcttagaaggattcactgggaaggggctactgatctcttgggtggagatcttgcagatttgttgacctagcaaagtattacgtgttcttaccgttgacatgtaaatagaattgcggtttttctcactgccacattgtgtgggtggagggagattctaaagggttttaggaatcggaaaattagggagaatcaaatcatgggtgcttaaggcctcagtgaaacactgtaaattatactgctgacggcgaggaacctgcttggcaatgtggcaaggggattttatccactcaaccaacacgtctgagtatttccgaataggttttattaccaggtgcttaaagaatgtgtggtgacataaatgggttttatttggggttctgt

SEQ ID NO: 8837 - DNA, 986 bp, Artificial sequence
  DNA replication origin
ggtccactcaccgtgccggagacgcgcctccacccgcccgcggcctcgcggtccgcacggactgggcgcagcgggggcttccaaacctgtctcgcaggtcggggacccaccgcctcagcggtgcccccggtccggcatccgacccttcctcccaggcaccgccgcctcggcctcacagccccggctccatcccgctccccgcgcgcccaccctccgccgcggcgcaacgccggccgcggaagaccagcccaccgccgcacccccgccgcctcagcggaaacctccccgagccccttgtttttgttaagagtttcgacgcccccaagggggcggggcacgtgactccccgcggagggatcctgcacttcctccacggactttaaaaaagagtcccgcccctaagctgccgtctcgagcctctctcgcggcctccctagctctccttggctttgccgagccagtcctcccgcctggcgctagggcggagagcggaatctgggcgtcgggcttattccgcgattgatctgcgttggggaacgggggaagacagaggggcggaaggagatcgtttctggtctcattacgccttttaaaggtccccgatttgttttgttttcgctgttttgaaaagtccgcccaaagtagccggctctctgattggatgcgggtggggcgatgggcatgctgaggacctgattcaccctcgaatctggattggctaacttatcagtcttggagccctctgattggctttctccgtagcctgagcctctctctgccttggggccttagcaactccagggtctggattgcgcatgcctgggtgtgcagcggagaaggtattcagttacctgccctgcggggctgtgccttctcgcctggctgcctccgcctttcttgggggaatgtcacgctcgcggcgcttctcctaacagctaacctttgtgacagccttttcagccacgggagagttttctacattcctt

SEQ ID NO: 8838 - DNA, 911 bp, Artificial sequence
  DNA replication origin
tctcttgcgcgcctggggtcactgtcctcgaagcccggcggcgcggccctcgtcccccttcccgacccccggtctgtctcctcgctcccttcagccgccttccgcgccgccgcctctgccgttcgtcaggcggcccggcccggcccgcccgccccgcatcccctccggccggtgcctctcccctccggcgggctgcctgcatgtctttgctgccctcagccccgccgccaccgccgccgccgcctcccccgccgccgcagcaccagcaccagccgccccgtcgccgccgccgccgccgccgcccggaccccggcgcgctgaatgcaggtgaggagggggcgcgggccccccgagaccccgggcccgggttccctgcgcgcccgcccgcgagccccggttacgggccctgtgtgccgccgcggcttcccctcggggcgggcgggagcgaggcccgccgtgggtgtttgtgtttgcgtctgcgtctgcggccgcggctctggaggggaagcatctgtgggggcctggtgcgcgcgcgcgcgcgtgtttgtgtgtgtgtttcccctgccgcggggaaatggctgctgttgcttctgggccagaggaagagaatgaggtagagtgttcttttgcctccgagtaggaccgagagtgttgggaagaggagcgcgtccccggggaaatgaggtgggagagggacaaatgtgcgtgtgggtgtgcgagttgggactttggcgggcggggaggcggcccgaggacccacggcgagtgggtgtgtgtcgggtgactggagggggcggcggggctgacccgcgtctcttcagaggcgggcgaaggttccggggtgtgtgtgtgtgtgtgtgtgtgtgtcgggggtggcccggggccgggaccccagagtggcgtgtccctcc

SEQ ID NO: 8839 - DNA, 754 bp, Artificial sequence
  DNA replication origin
tcggggggcccgcgccccctcctcacctgcattcagcgcgccggggtccgggcggcggcggcggcggcggcgacggggcggctggtgctggtgctgcggcggcgggggaggcggcggcggcggtggcggcggggctgagggcagcaaagacatgcaggcagcccgccggaggggagaggcaccggccggaggggatgcggggcgggcgggccgggccgggccgcctgacgaacggcagaggcggcggcgcggaaggcggctgaagggagcgaggagacagaccgggggtcgggaagggggacgagggccgcgccgccgggcttcgaggacagtgaccccaggcgcgcaagagaggccccgcggccgcggccgccggcgcgaaggccccagccgaaggaagctgcgcccccgcagggccggagccgcggctactgctccgagagccacgcagagcctggccttggccttggcctcctggtgctggggctgccgccgctgcgggggttgccgctgcgccgggtgctgctggggccgaggttgaacagagacgccagctttcggtgccttcgctcccgctcacacacgttcacacccccgagggccgggggagaggcgtccgggcgatatcggtattgagattaataacaaggtgcagagagtgcgagaacgaggagggttgattgacgtggaggggctggcgggagtcagtcactccccggcgcggagggttggggtgaggggaaggaggcggggc

SEQ ID NO: 8840 - DNA, 1482 bp, Artificial sequence
  DNA replication origin
cccaggcgcgcaagagaggccccgcggccgcggccgccggcgcgaaggccccagccgaaggaagctgcgcccccgcagggccggagccgcggctactgctccgagagccacgcagagcctggccttggccttggcctcctggtgctggggctgccgccgctgcgggggttgccgctgcgccgggtgctgctggggccgaggttgaacagagacgccagctttcggtgccttcgctcccgctcacacacgttcacacccccgagggccgggggagaggcgtccgggcgatatcggtattgagattaataacaaggtgcagagagtgcgagaacgaggagggttgattgacgtggaggggctggcgggagtcagtcactccccggcgcggagggttggggtgaggggaaggaggcggggcggtgacggggcggagctcctacgcagcgccttggccccgccccccgtgcgccgcgttttgtcgcggtgagcgcgcggaggcccgggcttcttaatggttttctgttttgctctggctgttttctcactcttttttcctggcctgagcgaggagcggggctgagaagagtggtagagtttcagaaacccacatccacagagccttggcgaagagacgggaaaccgcctcaccccgggttcttgtgtgggcgctgtttactgcaccctcctcgcccgaggcgacctgacagcgaagcagagcgtaggtctaggtggctgagacgccaggggaggtgaagtgaccgaaggaaatgtttcctgacatattcggtggattttttttaaaaacatatagcatctgtaagttgtatcgtcaaaggtaaataaaagaacctgtgacgctcagcgataacccggtcctattttctaattctcccttctcgttgtagactttagtttgttgtttgtagcttatccatgccatctacagaatgaaaacatccaaatgcaaactagaaatagtagtgtttacttggtgaacctggctgtgatactttaagtttctggggtttgtttttgtttttgtgggccagcttcagcttttttgggccagcagtccaaaaagcaaattacaccggctgtggaggcagagtactgctgttgcagttttgcacaattttaatctctttctcaatgcatgcccgggctcgtgtatttaccagtgttggtcaagggtatattagcaatgttcagtattttttcccccacaggagtgtttagcacactaagcacgttgcgttggttgcaattcatcttaggccttattactgaatgtaaaatgccttcatctcttgggggaaaaggtgcggtgaaaatgcaaatcatcatttagctaaaactgaacagctgttacaagagtccataattgcagaactattgcaccactttcatcttggcaccaggatgggtgaatgagtgagtaaaaaagcccctcagttcacaagacgacagactattttcttttct

SEQ ID NO: 8841 - DNA, 799 bp, Artificial sequence
  DNA replication origin
ctctgcctggcaaccaccccgtctaagaagtgaggagcccctccgcccggcagccaccccgtctgagaagtgaggagcccctccacccggcagccaccccgtctgggaagtgaggagcgtctccgcccggcagccaccccgtccgggagggaggtgggggtcagcccccgccaggccagccgccccgtccaggagggaggtgagggggtcagccccccgcccggccagccaacccgtccgggagggaggtggggggatcagccccctgcctggccagctgccccgtccgggagggaggtggagggtcagccccctgcccggccagccgccccgtccgggaggagaggggcgcctctgcccggccgcccctactgggaagtgaggagcccctctgcccggccaccaccccgtccggtagttgtacccaacagctcattgagaacgggccatgatgacaagggcagttttgtggaatagaaaggggggaaaggtggggaaaagattgagaaatcggatgattgccgtgtctgtgtagaaagaagtagacatgggagacttttcattttgttctgtaataagaaaaattcttctgccttgggatcctgttgatctgtgaccttacccccaaccctgtgctctctgaaacatgtgctgtgtcaactcagggttaaatggattaagggcggtgcaagatgtgctttgttaaacagatgcttgaaggcagcattctcgttaagagtcatcaccactccctaatctcaagtacccagggacacaaacactgcggaaggccgccgca

SEQ ID NO: 8842 - DNA, 1431 bp, Artificial sequence
  DNA replication origin
aagaatttttcttattacagaacaaaatgaaaagtctcccatgtctacttctttctacacagacacggcaatcatccgatttctcaatcttttccccacctttcccccctttctattccacaaaactgcccttgtcatcatggcccgttctcaatgagctgttgggtacaactaccggacggggtggtggccgggcagaggggctcctcacttcccagtaggggcggccgggcagaggcgcccctctcctcccggacggggcggctggccgggcagggggctgaccctccacctccctcccggacggggcagctggccaggcagggggctgatccccccacctccctcccggacgggttggctggccgggcggggggctgaccccctcacctccctcctggacggggcggctggcctggcgggggctgacccccacctccctcccggacggggtggctgccgggcggagacgctcctcacttcccagacggggtggctgccgggtggaggggctcctcacttctcagacggggtggctgccgggcggaggggctcctcacttcttagacggggtggttgccaggcagagggtctcctcactactcagacggggcggccgggcagaggcactccccacatctcagacgatgggccgccgggcagagacgctcctcacttcctagatgggatggcggcccggaagaggcgctcctcacttcctagatgggatggcggccgggcagagacgctcctcactttccagactggacagccaggcagaggggatcctcacatcccagacgatgggcggccaggcagagacgctcctcacttcccagacggggtggtggccgggcagaggctgcaatctcagcactttgggaggccaaagcaggcggctgggaggtggaggttgtagcgagccgagatcacgccactccactccagcctgggcaccattgagcactgagtgaacgagactccgtctgcaatcctggcacctcgggaggccgaggctggcagatcacacgcggttaggagctggagaccagcccagccaacacagcgaaaccccgtctccaccaaaaaaatatgaaaaccagtcaggtgtggcggcgcgcgcctgcaatcgcaggcacttggcaggctgaggcaggagaatcaggcagggaggttgcagtgagccgagatggcagcagtacagtccagcttcggctcggcatcagagggagaccgtggaaagagagggagagggagaccgtggggagggggagaggcagaggcagaggcagaggggcagaggggcagaggggcagaggggcagaggcagaggcagaggcagaggcagaggccaattttaatattaaggtcagcaaacaccattaagcgtctagctgtaagaactaaaataacaagggtgagtgattaatg

SEQ ID NO: 8843 - DNA, 1638 bp, Artificial sequence
  DNA replication origin
attctccaaaatcaatcagatttcttaagagtccaagagaggagaaaccaggatggacagaattatcatacttcatttggtaaaatattaacataaatacaacttgtgtgtgtgtgtgtgtgtgtgtgtgtgtgtgtgtgagagagagtgagagagagagagaagggagagagagaggaagagaagagaggagaggaggggggaggggaggggaaggggaggggaagagaggggaggggaaggggaggggaagagaggggaggggaaggggaggggaagagaggggaggggaagggaggagaggggaaggggagggcaagagaggagagggggaggggaagagaggagaggggaaggggagggcaagagaggagaggggaaggggaggggaagagaggagaggggaaggggaggggaggggaggagaggggaggggagagaagggagggggagatatcttgtaggttcatgagttagagggaataggagtttgccatagctaccgtccattgaatgaatgctgaaaatctggcacagtactggggaaaattattcataaaaattgcagtgagcgacaactgccaacaacagattttgcaggccttgaggaagtgacttaagagctaacaaaataaaaataggtataagcagactaaacatgggagatgaggaaagcaatctcttatctccaaaatgaatctttaagctgtccacatctcttgggctcctctgacacctctggtccagggcactctcacctcttagctgggctgaagctctggcagtcccgcacagaacagtcctcttccagacatgccccccaacaactttgcctacagcaaccagatcataccattctcatatgtcatggttaattttatgtgtcaatgtgactgggctaagggatgcccagatacctggaaagtattctttttgggtgtatctgttaggatgtttctagaagaaattagcatttgaatgagtacacagtaaacaagatcaatgagggagggcatcatccaatccttggagggcctgaatagaacaaaaaggcagaggaagggcaaattctctctctctctccttcagctgggacatccagcttctgcccataccaaccaactccataataaatctcctatctatctatctatctagttatctagctatcttttattggttctgtttctctggagaaccctgactaacacatcatcctaaaaacacatcagtgtaatctcactgactaaaaaaacttaaatttctcatcaggtctgccaggcccctgactttgctccagtcttatcccctacgtgtccttagtcatattggtcttctagcatctccttgaaaatactctcctgtggccataaaggtttcttttctctgacacagtctctcccttcttctcctgacccacttcctctcactcttaagattccacctcctcatccaagtcttccctgactactctatccaatgtaggcccatattattctctatcatggctttccatttcgcttcatggcactaaaaacaactggaaaccattctgtttacatctgcttcactccctggaagataaggccctaaaagtaagaacggtttactgctgaactgccagggcccacaactgca

SEQ ID NO: 8844 - DNA, 1274 bp, Artificial sequence
  DNA replication origin
aatcctttccccacctttcccccctttctattccacaaaaccgccattgtcatcatggcccgttctcaatgagctgttgggtacacctcccagacagggtggtggctgggcagaggggctcctcacttcccagtaagggcagccgggcagaggcgcccctcacctccctgacggggcggctggccgggcagggggctgacccccccacctccctcccagatggggcggctggccgggcagaggggctcctcacttcccagtaggggcggccgggcagaggcacccctcacctcccggacggggcggctggccgggcggggggctgaccccccacctccctcccagacaaggcggctggccgggtggggggctaacccccacctccctccgggacggggtggctggcctggtgggggctgaccccccacctccctcccggacggggtggctgccgggcggagacgctcctcacttcccagacggggtggctgccgggcagagggggtcctcacttctcagacagggcggctgccgggcggaggggctcctcactgctcagacggggcggttgccaggcagagggtctcctcacttctcagacggggcggccgggcaaagacgctcctcacatcccaaacggggcggcagggcagaggcgctccccacatctcagaccatgggctgccgggcagagacgctcctcacttcctagacgggatggcggcccggaagaggcgctcctcacttcctagatgggatggcggccgggcagagacgctcctcactttccagactgggcagccaggcagaggggctcctcacatcccagacgatgggcggccaggcagagacgctcctcacttcccagacggggtggcggccgggcagaggctgtaatctcggcactttgggaggccaaggcaggcggctgggaggtggaggttgtagcgagccgagatcacgccactgcactccagcctgggcaccattgagcactgagtgaaccagacaccgtctgcaatccccgcacctcgggaggccgaggctggcggatcacttgcggttaggagctggagactagcccggccaacacagcgaaaccccgtctccaccaaaaaaatacgaaaactagtcaggcgtggtggcgcgcgcctgcaatcgcaggcactcggcaggctgaggcaggagaatcaggcagggaggttgcagtgagccgagatggtagcagtacagtccagcttcggctcggcatcagagggagaccgtggaaagag

SEQ ID NO: 8845 - DNA, 917 bp, Artificial sequence
  DNA replication origin
aagtgaggagaccctctgcctggcaaccgccccgtctgagcagtgaggagcccctccgcccggcagccgccctgtctgagaagtgaggaccccctctgcccggcagccaccccgtctgggaagtgaggagcgtctccgcccggcagccaccccgtccgggagggaggtggggggtcagcccccaccaggccagccaccccgtcccggagggaggtgggggttagccccccacccggccagccgccttgtctgggagggaggtggggggtcagccccccgcccggccagccgccccgtccgggaggtgaggggtgcctctgcccggccgcccctactgggaagtgaggagcccctctgcccggccagccgccccatctgggagggaggtgggggggtcagccccctgcccggccagccgccccgtcagggaggtgaggggcgcctctgcccggctgcccttactgggaagtgaggagcccctctgcccagccaccaccctgtctgggaggtgtacccaacagctcattgagaacgggccatgatgacaatggcggttttgtggaatagaaaggggggaaaggtggggaaaggattgagaaatcggatggttgccgtgtctgtgtggaaagaagtagacatgggagacttttcattttgttctgtactaagaaaaattcttctgtcttgggatcctgttgatctgtgaccttacccccaaccctgtgctctctgaaacatgtgctgtgtccactcaggtttgaatggattaagggcggtgcaagatgtgctttgttaaacagaggcttgaaggcagcatgctccttaagagtcatcaccactccctaatctcaagtacccagggacacaaacactgcggaaggccgcagggtcctctgcctaggaaaaccagagacctt

SEQ ID NO: 8846 - DNA, 956 bp, Artificial sequence
  DNA replication origin
gaggtcagatgggtctgtagaaagggaagattagaaagactcagcgacgcttggggttggtactgaggggacaggcgggagggacagaaggaagatttgggaagagttgcactgggcacagagactaggaagggactgatgtgtaaaagaatgcctggacgtcaggcacctcagaccgtttgcctattttacggcaagaattatttagatcttgcaggatggaaaaattcaaagtgccattttctggctatttggaactactgtcgagtttgtattggggtcaagcggcattgcagaagaaaataaggcatttaggttttaggtcaggtgtgagttgaagaggttttaagtttttgagaacacaggccaagggagtagaaggaggaatggagggtggaaggttgatgataatgaaggaagcaagcctagagaaaagagagagtagagaaatggagggaaggggttcgggggttcttaccttccagaaaagtgggaaaaggggttggggcacagagataggaggtcagggcatggaaataagggatggggtgcagaaataaggggttggggcacagaaataagggatcagggcatggaaataagggatcggggcatggaaataagggattggggtgcagagataagaggtcggggcacagaaataagggattggggcacagagatataagaggttggggcacggaaataagggattggggtgcagagatatgaggttggggtacttgcccctcttctagaaaagcgggacttgccgctaagaatgaaggagaaggggttgaggggtacttgcccctcccccagaaaagcagagaaggggtagacacaaggagagaaggggttggggtacttgccccttccccaggaaagcaggacttgctgctaagggtgaaggaccaaggcaggcgtccctgcgtggtctggcacctttgaaacat

SEQ ID NO: 8847 - DNA, 1145 bp, Artificial sequence
  DNA replication origin
attccgcgctccccaagcgcacagcctgggccccgccgcccgctccgcggctccgctgcagctgcccggctcccgcagagggcggtggggagggcggggacggggcggggcgcgagggggcgggtccgaatccaggggcgacgccgccgcctccgccagtgccccgggcgtcccgccgcctcactaagcgcctggagcgcgagccggggtagaggaagagagcgaaagaggctgggcggccggcccctccagggagtgggctagacgtctcaggccacaaacccgcaggaccgcagcccgtcgcgccgccgccgccccggccgaacccgcgccgcccgccactcgtggccgttggcggggggggggggggggcgctgctgccaaccgctcactgaggccgggcgacccgcgcaggcgcgctgcccgcgccgccggaagtgacggttccggctcttgtcacgtggagggggaccaagggaggtgattgtgggggttggggactagggcaaagtcgggggtcccgggtccggggttgcgccgggagggtactggccaggcccgacttcaagcagggaggtggcccgggactggctcccgcgctggtcacgcaccggggtccgtcatctcgaccgggagtcgctgtgccactctaggggcttaaaaatgccgccaacaactttacccctgctgaggaacttctcgcttcgtttcttagccagttttccaggccttctcccttgagagtctccttccgctcgcccaccctgagcgtaggaggtgggagcaggacggaactggagtggattccagtaactggacttctaaaccggctcggtgtcgtcgcgctctgtagcggacgcttgtgctgggaagcgttttgcagtttataaattacttaggagtactttaaacatctcacgcctgctgtaccacagccatgtgggggtattcagaacaggtattaaggtcgttttgcagaccattcatcactcttggctaaaagaacttaacggagtcgcccaaggtcacacagctggctcgtggtaattggggaccattctttgattcataattttgtgcttttggccaccctgaaaaagtaaggtcagatcgttgaaaaacgggcagatttaaggctgtttgga

SEQ ID NO: 8848 - DNA, 1235 bp, Artificial sequence
  DNA replication origin
agcctctttcgctctcttcctctaccccggctcgcgctccaggcgcttagtgaggcggcgggacgcccggggcactggcggaggcggcggcgtcgcccctggattcggacccgccccctcgcgccccgccccgtccccgccctccccaccgccctctgcgggagccgggcagctgcagcggagccgcggagcgggcggcggggcccaggctgtgcgcttggggagcgcggaatgtgaggcttggcgggccgcagcacgctcggacgggccaggggcggcgacccctcgcggacgcccggctgcgcgccgggccggggacttgcccttgcacgctccctgcgccctccagctcgccggcgggaccatgaagaagttctctcggatgcccaagtcggagggcggcagcggcggcggagcggcgggtggcggggctggcggggccggggccggggccggctgcggctccggcggctcgtccgtgggggtccgggtgttcgcggtcggccgccaccaggtcaccctggaagagtcgctggccgaaggtacgggcgcccggggaggctcggacaggcaggtgagggagggttggggtgtggcggcggcttctccgggtcctcgccctccggactgactcttataccccattcttcctctgctgccgggccagcgggggctcctaaagagtggctcgggctttctctcttaagctggcttttcttgccgctggctgccccggccggtgcacagttctctcatgcctagtttaaatcattttctgtgctttttgacgcgagaaaataggtagtagacgggctaggaagtgggttggtgttacgattgggccagtgactcattagagggtcagatcgaacagggttgaagctccgttctgccagctgtggctcagacgggtgtcatgcgttggccttttcatctaagcctccacccgcgctgcagggcataggaccctgcagcccctggtgtcaagctgggctttgctgcagctcagtcatctgttgaaaaacaatgtatttgtgtgcatgtgtgcgtgttggaggtgatcctttgctctaaattcagttagtaggttgcactgaggagcaggtaaacttggagcccatttatctttgttatttagaatcttctctgttggacaaggtgctattcatgccctcccagtatgtctctttgatagtagtttaaaaggtgatataaaagcaggttaactttcactt

SEQ ID NO: 8849 - DNA, 813 bp, Artificial sequence
  DNA replication origin
ccgggcagaggtgctcctcagttcccagacggggtggcggccagatagagacgctcctcacctcccagatggggtggcggccgggtagagacgctcctcacctcccagacggggtggcggccaggtagagacgctcctcacctcccagatggggtggcggccgggtagagacgctcctcacctcccagacggggtggcggccgggcagaggcgctcctcacttcccagactgggtggtggctgggtagagatgctcctcatctcccagacagggcggccgggcagaggcgctccccacatcccagatgatgggtggccaggcagagacgttcctcacttcctagacgggatgatggcccgggaagaggcgctcctcacttcccagactgggcagccaggcagaggggctcctcgcatcccagatgatgggcggccaggcagagatgttcctcacttcctagacgggatggcggccgggaagaggcgctcctcacttcccagactgggcaccgggcagaggggctcctcacatcccagacaataggcggccaggcagagatgctcctcacttcctagacggggtggcagccgggcagaggctgcaatctcagcactttgggaggccagggcaggtggctgggaggtggaggttttagcgagccgagatcacgccactgcactccaacctgggcaacattgagcactgagtaagcgagactcccgtctgcaatcccggcacctcgggaggccgaggcgggcagatcactcgaggtcaggagctgagaccagcccagccaacaccgcgaaaccccg

SEQ ID NO: 8850 - DNA, 1087 bp, Artificial sequence
  DNA replication origin
tgaagtcaagagttcgagaccagcccgaccaacatggagaaaccccgtctctactaaaaatgcaaaattagccgggtgtggtggtgcatgcctgtaatcccagctactcgggaggctgaggcaggagaatcgcctgaacctggggggggcggaggttgtggtgagccaagattgcaccattgcactgcagcctgtgcaacaagagtgtaactccatctcaaaaaaaaaaaaaaaagatgaaaaaatcttcaacgaaatactagcaaactgaatccaacgatacatttttttttttccctgagggagaagcaaccccacatttaggattggatttttattaatatgtagtatctatgaggtttccaagtccagaaatcaattcgccagttctgtacagcattctgtagggagatcaaatctgggatgtctaaaattaagaattcaggccttggtaatggattagattagatctacttgagcttattttgcaaagaaagagaggaagggagatagcgagagagagagagagagagacagagacagagagagacagacagagagagacaaagatacacacagagagaaagacagacagagaaagagagagagagacagagaaagacagagatggacagagagagacagagagaaacagacaaaaagagagagagacagagagagagagaaaaacagacagagacagagagacagacagagagagagacagacagacaggcagagaaagagagtaagacagaagacagatacagagagagagagagagagacaggtagagagagagagagacagagaaagaaagagagagacagagaaagaaagagacagacagagaaagagacaaagacagagatggacagagaaagacagagaaaaacagaaagagagagagagagacagaaacagacagacagggacagagagagagacagagacagagacagacagagagacagagaaagaaagagacagagaaagagacggagaaagacagagatggacagagagagacagagagaaacagagagagagacagagacagagagagagagagacagacagggacaga

SEQ ID NO: 8851 - DNA, 1012 bp, Artificial sequence
  DNA replication origin
gagagagacagagagagagagaaaaacagacagagacagagagacagacagagagagagacagacagacaggcagagaaagagagtaagacagaagacagatacagagagagagagagagagacaggtagagagagagagagacagagaaagaaagagagagacagagaaagaaagagacagacagagaaagagacaaagacagagatggacagagaaagacagagaaaaacagaaagagagagagagagacagaaacagacagacagggacagagagagagacagagacagagacagacagagagacagagaaagaaagagacagagaaagagacggagaaagacagagatggacagagagagacagagagaaacagagagagagacagagacagagagagagagagacagacagggacagagagagagagagagagaaaaaaccagacagacagagacagagagacagacagagagagagagagatacagacgggcagagaaagagtaagacagaagacagacacagacacagaagcagagagagacagagagagagaaacagacaggcagagagagagagagagaaaaacagacagacaggaagagagagagacagacagagagagagggacaaacagacagaaagagagagagacagacaggaagagaaagagactaagacagaagacagacacagagagagagacaggcagagagagagagacagaggcagagagagagagacagagagacagagagaaagaaagagagagacagagagacagagaaagacagagacagagaaacagagagaaacagacagaaagagagacagagagagggagagaaacatacagacagggtcagagagacagagagagagacagaagacagaaagtcaggcagaggaagagagtaagacagaagacagacacacagagagagacagagagagagagagagagagacagagagaaagaaagagagagacaacaatacattaaaaaga

SEQ ID NO: 8852 - DNA, 1072 bp, Artificial sequence
  DNA replication origin
ttctgatttgggataaggaaaaaggagcattaaccttgactctatgcctttagctccagccacctttttaagagtaaattgctgggcaggagggggagggctagtcacggaacgaaactgtaatccggaccaggtgtgaggaggggaggtgataaaaggattatagggtggaggagcagaggctgaggaagaattgggacctagctcggcctggcgaggagcagcctggggaggaagggagaggtcagatgggtctgtagaaaaggaagattagaaagactcaacgacgcttggggttggtactgaggggacaggtgggagggaaagaaggaagatttgggacgagttgcactgggcacagagactaggaagggactgatgtgtaaaagaatgcctggacgtcagccacctcagaccgtttgcctattttatgacaagaattatttagatcttgcaggatggaaaaattcaaagtgccattttctggctatttggaactactgtcgagtttgtattggggtcaagtggcattgcagaagaaaataaggcatttaagttttaggtcaggtgtgagttgaagaggttttaagtttttgagaacacaggccaagggagtaggaggaggaatggagggtggaaggttgcccatagtgaaggaagcaagcctagagaaaagagagtagagaaacagagggaaggggttcgggggatcttaccttccagaaaagtggggaaaggggttggggcacagagataagaggtcggggcatggaaataagggattggggtgcagagatacgaggttggggcgtggaaataagggattggggcacagagataagaggtcggggtgcggaaataagggattggggcacagagataagaggttggggcgtggaaataagggattgggggttcttgccccctagaaaagcaggacttgctgctaagggtgaaggagaaggggttggggtacttgcccctgccccaggaaagcgggacttgccactaagggtgaaggaccaaggcaggcgtccctgcgtggtctgacacccttgaaacgtcagtgtat

SEQ ID NO: 8853 - DNA, 994 bp, Artificial sequence
  DNA replication origin
gagaggaactcctttcgcgagctgtcgccgtgggcccgcattgtctgcaggaactctccggaatcgggagggggaggactggatcgcgcttccactgggattcgtcaagagttccggcggcagctgcggcggtggcggagactccctttgtcctctcaggacctccctctctccctccctgtcagctggtgggtcccgctgccgcaggcgccggcgtctcagctgctcgccgccccccaccccagagtgcgtgccgggtgactcccgccacctttgcgaccctcctgagcttaggggactgcgagcgggagggagtctcaggcccccggccgcaggatggtggcggagcggtccccggcccgcagccccgggagctggctgttccccgggctgtggctgttggtgctcagcggtcccggggggctgctgcgcgcccaggagcagccctcctgcagaagagcctttgatctctacttcgtcctggacaagtgagtgtgcgagggaggtccagggtctcctggtgagggcggcactggatcagctggggctgaggctgagatgcgtgtgcgcaccccggggagtggtgttggaaacccgcggaggggtgccctgttgctgtcttctttcaaagggcaagcgcgttcggatctgtgtgggcggagatcagccgggtcgggggtagtgattggagccccgggctacttggctctttggggagttggggtattcactgtttgccagtcttttggcctcttgggaaatgggagtgtggcctcttgcgggccacgctccatcggccacagagtccttacccacctcctcgaccctgctcgtacgcaggctaaagtttgcctggttttatcctaatcatagcgctttcattggagccaggaaaagcctagggttaacatgcccaatgtggtttgcatttcctgcgaagaaaggcttttgtgtttactctgaagagctgggttccactctaaacaattaggca

SEQ ID NO: 8854 - DNA, 841 bp, Artificial sequence
  DNA replication origin
agccattctccctccggggatggagagctgggcgaggacaacccaagcactcctacacgctcacacacccgctgtccgtcagaagtggtttgctcattttcctctcttcccaccttgtccatcccactccaggaaacattgctccccaaacggcacggatttctggacgcctccaccttaagacagctacttcagccagaacgtgggacaggcactaacgggatatcacccttggggataaacacgctccagtttcctgtggacggtggaagaggaaagaacaggagaagctgccaaagggatggggtgtaggaagctcatccttgcacgtttagactagggaagaagagaatattagggatgggggaggggggaggatgggaagtgtagtttttccccttccttcctttcatttcagatcccatttagtgcttttatttctttaattttgaaaactatttccctttcctgaatctggatgcgggcagggagcgaactcaaggaaatgatgagcatggatgagagccaggggacaggagatatgtcctgggaactcaaactctgctgcttcgccactgtctccgagatgccctgagccttagcccaatgtaaagggagctgattgggtgtatgggcagtggcgggtggtctgagtaagaaataaaatgagggcaagccagatctactcccatcccaaagcattaaaagacacacctccccacccctcagctgtcttgtgtccggcagaatggcattatgtaaaagatctggcatgtcacccagtggcacatctggtaggtgtagatggcattcattagcacggggcttctactctgcagca

SEQ ID NO: 8855 - DNA, 1063 bp, Artificial sequence
  DNA replication origin
gcgccctcttctggctgctgtgcggccgctccctgcttctcgcgggtgctctggtccagaaactgttccgccctccgcgcccaggatgaaggggcagaggggaggaaggtcaagaaagagagagggttgggtaccggaacgctcaggctcctccttccccgcccttcgcctgccccgcggcttccttacctggggactgtggggctccttccccgggagcgcagctactgcgggcccctcggcggccgctctcccaccccaatcggagcctgccgaggagcccgtccgcctcgcgaaatggccccggtctctgctgcagcagctgggagggagggagcgaccgccggctgctgccgggcggcgtctgggggccgcgagccgagcgcaaggagaagccatctggagcctcggcagcgggcgggggtgggggtacaagagaaggggccaggctgctcggccccaggcgggcgcggggcagggctctggcgtgggagtggcgcccagtcgccccaagtactgcgtgtgtgtcgcgggaggggtggtgtggggaggtgtgtgagggtcatggcccctggggaggaggagcggaggcctgccgttctcaagtcccgccgattacagggcagcccggtacccgcaggtttagcaaaagagaggggatcctcctggcaaccaccagcccccctccagccattctccctccggggatggagagctgggcgaggacaacccaagcactcctacacgctcacacacccgctgtccgtcagaagtggtttgctcattttcctctcttcccaccttgtccatcccactccaggaaacattgctccccaaacggcacggatttctggacgcctccaccttaagacagctacttcagccagaacgtgggacaggcactaacgggatatcacccttggggataaacacgctccagtttcctgtggacggtggaagaggaaagaacaggagaagctgccaaagggatggggtgtaggaagctcatccttgcacgtttagactagggaagaagagaatattagggatgggggagggggga

SEQ ID NO: 8856 - DNA, 1560 bp, Artificial sequence
  DNA replication origin
ggcgtggaggagccgccgccgccgccagcgtcctggtcctcggaggcgactcccgcgccgtcggctgtcccctcctcctgcaggctggccgcgcgggcagccttcttcacctccacgaaggcgctgcgcttcgcctcgcccgtctcgggacttggcggcgcgaagaggcggccgttctcttccaggccgaagtagctgcccgaggctcggtactgctgcggtgtgcacaccagatcctccttggaggccgggaggggccgctctacgaagcggccccggccccctaccagaccagcgccaccgccgccctccgccgcctcctccgggaatttcctctttcctttgccgccgcccgtggcgatgccgtcgggactcagctccgcctcctggtggccgccgccgccgccgctgccgctaccgctgctgaggctctgggctggggagcagctgctgcctccccgggagttttccagctccctggccaggttgtggaagtctgtggatggcttcgcgctgctgccgccggcggcagcggatgggttgctgctttccggggagggggatgggtagtggtggagggggccggctttgcaaaacttgggacccgggcctaaaggtgcctcctgctgctgctgctgctggtctttgccaccgccgccgccgcccccgtggtccttggtgcccacgccgccgccttgttcgtcttggggacttatatcagcgctgtgaagtctcttggggcagcggaaacgcagatgcgccacataggggaactcaaactggaaacgttggctgcattccaggcatgtgtaaggggacgaccctgcttagtgagcaaacaccacacacacgcacgcacgcacacacacacacacacgcacaccacatgattactcagcatcgcccccaagccagtttgccaccatccccttgacaaatccaccttcatttctcagggcctgagtgcctgagaaaagaatgaccaacctgatctaactttccctcctgatttggagggaatacagcaaacaagcaagtttcctcgctttatcctcacctatctgtttaacttcattccagactacatctcagaatcttcctatgagacacccgaagggaagaaaggcgcgccaacgcgccgggtgagcccctgccgctccctgcgtctctcccccgctagttaagggcccacacgccggtcgcgagccaacctaccattcattttgttgtgggatctagaggggcagagcaagagtaactcagtcagttctttcccgtaccaaactagtaactcctcgtctttggcaatcctgcggagagagcggtagaacagctgtccgttttttatgtaggcttcaaggttctgctcttccttatctctggccgattggaccaaccgcagccacatgagaccttctgaggaaccatttgctgctgaggtgtctacctgcggtttgaaataaatgaaagaagacaagaaggagagggggagagggaccctcatgagggaatgaaatcagaagaatcaagaccatttcttctatgttagtcttttccaaa

SEQ ID NO: 8857 - DNA, 992 bp, Artificial sequence
  DNA replication origin
tgcgaggggcagcgccttcacttcggtgccgcagctgggcagcgcgggcagcaccagcggtgggggcggaacgggcgccggggccgcaggcggcgcgggcgggggccagggcgccgcgtcggacgagcgcaaaagcgccttctcgcagccagcacgctctttctcgcagctgtccccgctggtgctgggccagaagctgggcgcgctcgagccatgccaccccgccgacggcgtgggccccaccagactctatcccgccgccgcggaccctctagcggtgaagctccagggggccgcggacctgaacggaggttgcgggtccctgccgagcggcggcggcggcctgcctaagcagagccccttcctgtacgccaccgccttctggcccaagagctccgctgccgctgcagccgcggctgcggcggcggccgcggggcccttgcagctgcagctgccctcggcgctcacgctgctgccgccctccttcacctcgctgtgtctgcccgcgcagaactggtgcgccaagtgcaatgcctccttccgcatgacctccgacctggtgtaccatatgaggtcgcaccacaaaaaggagtatgcgatggagcccttggtgaagcggcggcgagaggagaaactcaagtgccccatctgcaatgagtccttcagggagcgccaccacctctccaggcacatgacctcgcataattgactcggaaaggaccccagctttccacgcgcgcgcaagcacagttaagccacctgcaggaataaacacgcgagaacatccaccgcttccttgcaccccgaaaccctgcacaaagacacatacattcaccgcccccccgcccccccaacgcgcacacacacgtcctctcctcccaggaacctcattcaaatatttacccgggacacacacccccccccacacacacacacagacacactcacacacaagagccaggatggtggagttttgattgggtgggttgttt

SEQ ID NO: 8858 - DNA, 934 bp, Artificial sequence
  DNA replication origin
acttgagtttctgagcctttggcttccctgtagcttccaggagtcccctggtacctttagcccgtggggtcttcagcattggtggagagtcaaagatggccacggtgcccccggtggcactggtcatggggcagcagggtttggtcctttgggtgtttgccagggctgtacactgtgggggtggggtatactggagcctccacacactggtttggcacctccaggggtgggtagggctgcatcaccagtgcctggatctccaccattccactcccagccaggagtgcagcagcactgtacaccttcaccacaccattcccaccaggattgggatgcccaggggggcccaggctgtggggtggaggtggtgagggcagtggtggaggagggggtgaaggctaggtgaggtggctgggcacagaatgcatgttcaggctgctctgcacaggtcgcgggccctagggcatgggctggtccagggatgtgaagcctgaaatggcagacatgagcaagtcattgcttaccaagatgttcccctggatcagtggggacaggggcactgtgatgtatgtagagatctggcaattggcaggaggcgaggcctgctggaccgctgtgggtgctgccgaaggtgtgtagattgtgtagatgctgttggtgaccagcgagactgtgtccaggtcgggggcatttctttggcactgttcccgcttgtgggtcataaacactggcagcgagttgaattgcttcttacacttcccacagagaaagacatcctcatcatccaatggctggatagcaggggacgcattgacactctggcctctgggatcagggactgctccttggccatccagtaatgatgggacagctagaatggtctggttgtccattccctccagggccttaaagatcacctgcaccatcttggagc

SEQ ID NO: 8859 - DNA, 991 bp, Artificial sequence
  DNA replication origin
gggctagtgtgcgtgcgggcgcgggtgaccccacctttagggaagccggcgcccaactatccaggcagtagccccggctgaccccctccctcctccttccctcctctcttccctccctccctgcgtgtctcctctgcaccggcccccgccgcggagccaggcggcagcaccgacgccgccgcagctcctgcccgcatcgcgctaacccgcgcccccggctcacacgtagccggagcgactgagccggcagccccgggcccacgctgcgcaccgtgtgcacggcggggctggctgagctgacctgcgctgggctccggcgccgcaggcggctggggagggcggcgtgggagaggacgctgagacgcaggggcggccgcgccgaggtgacaagctgcgcacctggaaagttacccggctgtctggtgaggttcgtgggccgggggtcttgggcgccggggtgtgagggcgcgcggggagggacggggtcggggtgcgcgcgtgtgcatgctgtgaatgcgttgcgcgatgtgcgcctctattccacacccagccggtctcttgcttgtgctgttcgagtgtggacgtgtgtacgcgttgcattcgctcggtgtggcagcgtttcgtgagctcctggaggcagggaaaggctacttgtgtttagaggttctgttgagggcgggaggggctcagccccagtggggagtcctcagggttctctaggtttagcgaggagaagcggtggaggctgttgctccgagctaggggcttggcggtgctgtcagggcttgcgctcccggctttgcttcgtcgagctctgggtagttgctaggggacagtcctcaggcaaggacttttaggagtcctggtaaacttgtgtgggtgtccttttgtcactctgggcaccgtgaggcgctttcatatttctgtatttctcggtgatgaagaaacaagagcaaacaaagcccagaaaccagccactttggggatgaga

SEQ ID NO: 8860 - DNA, 1233 bp, Artificial sequence
  DNA replication origin
taaatctctttaaggttgacagtacacagaacaacttgtgaatttttaatatgcattttgactctggtcaccatactgaacctttaaaacattaattctgatgttttattcagtctcctgggctttctaaagagatgtatactctgtatagctagaaataaaatatctagaaaagagataaaatcaattgcactttttatattttgattggaagactttccaggaaagtttttataatactggaaaacaatagccagctcatagctaattatggaacaccagagatattcctatctaatgctgatgtcattaagaccactttttatggcagacacattgcaaatatcatttaatattctcattaacttagtaagggaggcatcactaatacagaatacatttaaccttgattaaatacatagttcatcaatgatgctatattttagatgaggaaatcaaaacatgaagtggtgaggaccttgccaagggttaaacaggcagtgggatttgaacccaagtctgtgatgttccagtcttgtgtccggaattggtgggttcttggtctcactgacttcaagaatgaagccgtggacccttgtgagtgttacagttcttaaaggtgatgtgtccggagtttgttccttctgatgttcagacatgttcggagtttcttccttctggtggattcgtggtctcgctggtctcaggagtgaagctgcagaccttcgctgtgagtgttacagctcataaaggcagtgtggacccatgagcagcaaagagcgaaagaacaaagcttccacagtgcagaaggggaccagagcgggttgccaatgctggctctggcagcctgcttttatttatatggccccacccacatcctgctgattggtccattttacagagagctgattggtccgttttgacagggtgcagattcatgtgtttacaatccctgagctacacacaaaagttctccaagtccccactagattagctagacacagagccctgattggtgcatttacaaaccttgagctagatacagggtgctgattggtgcatttacaaaccttgagctagacacagagtgctgattggtgtatttacaaaccttgagctggacacagagtgctgattggtgtatttacaatcccttagctagacataaaggttctccaagtccccactagactcaggagcctggctggcttcacctagtggatcccacaccgg

SEQ ID NO: 8861 - DNA, 1055 bp, Artificial sequence
  DNA replication origin
tacagaacaaaatggagtctcccatgtctacttctttctacacagacacagcaacaacttgatttcaatctgatttttctttcctttccccacacttcccccctttccactcgacaaaaccgccatcgtcatcatggccctttctcaacgagctgctgggtacacctcccagatggggtggcggccgggcagaggggccccccacctcccagacagggtggccgctgggcgggggctgccccccacctccctcccggagggggcggctggccgggcgggggctgtcccccacctcctggagggggcggctgcggggcggagacgctcctcacttcccagatggggtggctgccaggaggaggggctcctcacttctcagactgggcggccaggcagagccgctcctcacctcccagactgggtggcggttgggcagagacactcctcagttcccagacagggtcgcggccgggcagaggcactcctcacatcccagacggggtggcggggcagaggcgctccccacatctcagatgatgggcggcggggcagaggcgctccccacatctcagacgatgggcagccgggcagagacgctcctcacttcctagatgggatggtggccgggaagaggcgctcctcacttcccagactgggcggctgggcagaggggctcctcgcttcccagacggggtggtggccgggcagaggctgcaatctcggcactttgggaggccaaggcaggcggctgggaggtggaggttgtagcgagccgagatcacgccactgcacttcagcctgggcaacattgagcactgagtgagggagactctgtctgcaatcctggcacctcgggaggccgaggctagcagatcactcgcggttaggagctggagaccagcctggccaacacggcgaaaccccgtctccaccaaaaaaatacgaaaaccagtcaggcgtggcggcgtgcgcctgcaatcccaggcactgggcaggctgaagcaggagaatcaggcagggaggttgcagtgagccgagatggcggcactctacag

SEQ ID NO: 8862 - DNA, 874 bp, Artificial sequence
  DNA replication origin
gtcacgtgaccgggacgcgccgttcttccgtcggccattttaggtggtccgcggcggcgccattaaagcgaggaggaggcgagagcggccgccgctggtgcttattcttttttagtgcagcgggagagagcgggagtgtgcgccgcgcgagagtgggaggcgaagggggcaggccagggagaggcgcaggagcctttgcagccacgcgcgcgccttccctgtcttgtgtgcttcgcgaggtagagcgggcgcgcggcagcggcggggattactttgctgctagtttcggttcgcggcagcggcgggtgtagtctcggcggcagcggcggagacactagcactatgtcggaggagcagttcggcggggacggggcggcggcagcggcaacggcggcggtaggcggctcggcgggcgagcaggagggagccatggtggcggcgacacagggggcagcggcggcggcgggaagcggagccgggaccgggggcggaaccgcgtctggaggcaccgaagggggcagcgccgagtcggagggggcgaagattgacgccagtaagaacgaggaggatgaagggtgagtaaggggcatcccaggatagtcaggcccaactagtccccctccccctctttattcccccgccattaggcctggttcccgctctcagcccgttctccgggcccccatgcagcctccttgcactggtctccctttttctatgttgggttccccggaccttcatttccttcttcctttgcctgcttatcgcccccctcccccatcacacacgtttccacctttagccgtcaccatgctgctcctcggcccgccctcctttcctccctcgccatgggtctcctcccaccgacttagcc

SEQ ID NO: 8863 - DNA, 794 bp, Artificial sequence
  DNA replication origin
cccagaaggcacgcggggaatcgactctgagaaagaatgggggcagcgcgcggctcacgaggaacgaagggcgcgtgcggcgcgctgggggagggggagcgggggaagaagcgtgcggtacccgtcatcctgctgattcttgctcgcgttgatcttggatccctctgcgaattcctctatattgctgtactcgttcatatcctccatagtgacggagctgtcggcaggggggtgctggcgcgcagtccgggtcgcggcagcagcggcggcggagcgttgtatggagctggatttaaaatggcggcggaagagatccgggcgccgcctgcgccctccctttatagccgccccgcccgccaatcgggagggctgctgggcggtgacgtggcgctgggcccggcgcgccccctgccgggcggagctgggagcgagcgaagggaggagcggggctagctgccgcggcggccgcggccgccaatgggagaggctgcgggaggctaaagtagcgggagcggaggggaacaatggcggcggcacatgggaaagcctgggcgggacctccatcgcggccctcccggcaaggagagaggccacgcgtgaggggacgcgggcttgggagaagagaagaatcagaagagaaaaacgaaggggcgtaaattcctggggtcagcagtcccgagcagagccgacgcagggccacagtccctcttgccttgggagcctttgtctctggcgtccggtccagcccactcctaccaaaaagccgtcaaccccgcctttttctgccctcggtt

SEQ ID NO: 8864 - DNA, 1094 bp, Artificial sequence
  DNA replication origin
cagtagagggcaaggggcactcacatccccggcgcgccactcgcggggctcctttctgcacgtgccccgggcctctcccgctcgctcaacctgtctgcggagggcgcgctctcgcgcaccctgctcccgcgttcgcttctttgttcccgcccacgcgaggcccattttgacggatccagttcgaggcctgacggcggccaatcggcgctggcgccttcaccctccccgccccgccgaacccgtcaagggccgccccttttcctgcccacgtggtctcgggctcctgccccgtcctgctcacgagttcagggctcctgggcggccgccttttccagttccaggtgtgcagaagtgtcctctccccacgcgcggcgggctgcacttggtcgctggctccgagatcgcgcggggccgccggaagcccaagacggtaccgggggccgcagccgcagccggcgccgccctccgccctccccaacagcaggccgagtcccgtagcatccggtagggaaatggtcgtgctttcggtccccgccgaagtcaccgtgatcctgttagatatcgaaggtaccacaaccccgattgctttcgtgaaggtgaggggcggaagggagcggggatgttacttttccttaaaaacagttattattttttctaagtatttcaggccttgcattggagacgagggttaggagaggcggtgtggctgcctcttgtgtggaatggggaggaaggagagaaagcctgcggtgggttgcggggatgcttttcctcgcgacactagcttctccctcccccgcccttgcgcttggttggatccagatgggtgggaagggatggaagttgacgctaaaaatcaccgaagggcaggtaagccggggcggggtgtgacggtgcgggcctcgccacccggcaggtgtgcacccggtcgcttccgcaggtgagcgcagcctttctgctccgtcgggcctggtgtggcagcggcagcgatttaatggtccttaaagcttccgatctcaaaatggaaagactgaagtgtcaagatgacttttcaggtggccctggtgtcgggcaatcaaggttcctcttcgccc

SEQ ID NO: 8865 - DNA, 1059 bp, Artificial sequence
  DNA replication origin
agatcccaccccttcctgaaggaagcgccctacccgccgctactgctgccgccgccgccaccgcagcaggtcacagcccctcgaggcgacagcggccccgccgcaccagagcaggtaggcgcggcgccccctcccctgcctgggcccgtcgcgcagccagggggcgtccggcccggccccgtgcgcagcccgcaggcggagaccggggacggcgggggctgcagcgcggctggggcggctgggtccgcccggctgcggggccctgctcggctgcggccccctcccatagcgtcccgggcgcggggccgcccgcccgagccctccgcgggcgcacgctccccggcaagtccaggagtcggtgccggctctgccccgcgacctgcgaacgcccgagccggcgcgcctcggtccccgccgccgcagtgccgccagccagcccgcccgctgcggccccggccccggccccggccccgtcctttgacaggtgtccccacccgccgccccatcatctcgttatcgggtggactcgggtgagaagcgaccccaagtttgacctcccggtccctgtgccattctccctgcactttgcggttagccaggtcaggctggctcgggaagcaggggatctgggaaggaggcactaacttgctttgccctgtgtaccgccctccactctaaatgcacagtcttccttcctttcctgggcgcacacttgggaagaaatgggatttttggtttttcggcgggaggccgtggtaggtgggttacctaggctctttggtaatctgctgcaataaaaaagtgattagctttgggttctggagagagtccttgagtggttttcccctccttaaatgaatcaaatggagtatgagagggttttcccattttaaattcatgctccttttttctctactcattcctttcctccacccctacccccacagcactttatgatgtcccacacatttcactgatctttttggtcaggtttattccggccagaccgcctttcacggttgggccaggattgtgaccgcatgtgggaacatagctcag

SEQ ID NO: 8866 - DNA, 1109 bp, Artificial sequence
  DNA replication origin
gcgtgcgcccgcggagggctcgggcgggcggccccgcgcccgggacgctatgggagggggccgcagccgagcagggccccgcagccgggcggacccagccgccccagccgcgctgcagcccccgccgtccccggtctccgcctgcgggctgcgcacggggccgggccggacgccccctggctgcgcgacgggcccaggcaggggagggggcgccgcgcctacctgctctggtgcggcggggccgctgtcgcctcgaggggctgtgacctgctgcggtggcggcggcggcagcagtagcggcgggtagggcgcttccttcaggaaggggtgggatctgctcacccgcccgcccggccccctcctgccgcgccggggcccgcccccgacttattctggggtccccgctgctaggccttcggggagagttgatcccctgggtctcgggcttctgccacccccccggggcccctaatagtcacccggggcaggagccgggtgtgggcgggcgagccgcttccttccgaagcctttgtggacgcgtttgcctggcgctcctcatccaacaaaaggaaggacagaatcttggatcctccgcctggtggttatttattcctgacctgttgtaaccttctgcctggctctctttcgtccgcacacctagggtttttgcacaaagcagctaaaattcattttcatgcccattgactgaatgtagttctcctccactcagcgctgtcccgcggtttttggtttttttttttccatcctattgaacaaacacagagccaacttcggaccctggcaatgaacagcagacaccaaggccgacctcccagcgccagcttgcagctttcctccctgggtctcgtctgagtccgtcataaactgtgttcatcagcgttttgacagcttcccccatcccggacccccaacctaccatgggaccccatggcaccatgtcagtgacctctagcagcagcatggatcaatgccatttttatcttaggctcatcatgagcctgggttccaaacacaacctctctggcctccaacaggtggctctctatcaaccggcctttgtcagtctgccctctattcttttgggggct

SEQ ID NO: 8867 - DNA, 1341 bp, Artificial sequence
  DNA replication origin
attagaggcttagaaagattctcccaagtgttgaggagatgtcagacgttgcctgctctaatgatttgtatgagaatagtggcagcagttcctgaagttggaaggctttggtacctttcttcctgctgctagactttgataaccagaggacacctgccaacctgtaattgattcatttgatgaaatatttatagagtacctagcattggattctgtcaaaagcatccatcatgctggtgaaatacatgcccatccctgtgaatgtccattccttgtttcttgtgatagatttgccacaaataaaggctaatattctgaattctcccaatggcaagctgcttattttcacccacactcttgttatgtgtgtgctatgctcagggcactgtgttaggtgttgaagttataaaaaggaatgaaccaggcacaggcccttccttgggaagctgacggtctagatagggggatgaattgtggtgcggcaagaatgaattgccatacaaggtggcgtatgccccaaattaatggtccagacaatgagctccacaggaatccaaaagggcagccttgtttccagggatgggggaggttctaatggggatcaggcttgaatgggcttgactgagggcaggacttgggtaagatggagagtggtagggtcttgaaaacaagtgagttagagaccagcctgggcaacatggtgaaaccctgtctctacaaaaaaatacaaaaattagccggatgtggtggtgcgtgtgtagaaccagctactcgggaggctgaggtgggagagtcacttgaacctgagaggcaaagattgcagtagccgagattgtgccactgcatttcagcctgggcaacagagagagatttcgcctcaagacaaaataaaacgggtgagaaggagagtggcaggagaagaagtgcaatgacaggagtgagtgtgggtggctgttcaggggaaaggagcagacttattcaggggaaaggagaagaagggttcagggcatggatggtggaaaatcaaatcagcaagggagggtaggggctcaggttgtcaggactgtgaaggttaacacagggagtttagacaatcctttaggcagtggaggactgagaaaagttttagagcaaaggaggcgtggggtttcttgcaaaataatgctgtaggatgcttaatctggtagctgtgcataggttggattgagggtaggcactagagacagggagatggaatgggaaattgcttcaggggttatggaggttgaaggagtggaaagaaagtgatgggtagaatggatgggcaccatagatgctgggaaggaacagactgggactgac

SEQ ID NO: 8868 - DNA, 1053 bp, Artificial sequence
  DNA replication origin
gatgaggacaagtaagggagttggaccggggaggagagacccggcacaggatagagtcttggtttacgcgcaccagatggaagataccggttcccctcttgcctctccaaggcccctgtccctgccccctccgcaatcttctatgcccatttgcagttctcggtgaagtttctcggtgagcaaaccgatcccatggcgagagcggtctgaccctagcacgaagctccgactgtggctgtgcagagccttctccaaaccctgttcccatgtggccagtgggaacctgtggctctcctggtaccctccttccgtgcacccccactcctgccagtagggaagggagcccgggcgccgaccaccattccccttcccctgggccccagggactgcgtgcccaccctacacgaccccagtcgttgatctttgaaccacttcgcagccgccctggccgcaataactggttttggcctcctttactgaagcggcagtagccaggacaaaaggcacaggcattgatatgctgagtgagaatttgacgaggtaatccaagatgcccttccagctcccgtttccctgatctctaggggcgggcaggagaaacacaacctacttttatttccagaggggaagaggaaggaagaaaataagacctctttctacagggcttttttggcatggtgccagctgcaaatgcctaggtagataatggggccactatggttccaagccttcccttgaaatcctgcagtccctgctcttggaagtaaacccatccagaagtgggtacctcttagggggtgtggctcagggagggcatagcagagttgacggatggtgagagaggtaggatctttggggatccctaaagcctttaaagtctccccaaagctctgggaaatctcctgcttcatctttccttctctcagtgcacctcctcatttctgtgtccttttcaccatcacctttatgtgttggtttaattctccaactgactgtagactgtatgatgttcagctgttgcttcatcaacacactccgacactgccaaccaaa

SEQ ID NO: 8869 - DNA, 1001 bp, Artificial sequence
  DNA replication origin
gcggggaagatccctttctgcgacgccaaggaagaaatccgtgccgggctcgaaagctctgagggcggcggcggcccggagaggccaggcgcgcgcgggcagcggcagaacatcgtctggaggaatgtcgtcctgatgagcttgctccacttgggggccgtgtactccctggtgctcatccccaaagccaagccactcactctgctctggggtaagtcccgccggcgccccctgcgccccggcctccgtggccaggccgcgctggggcgcgcgaggtcgccgctcgcccctcggctgcgggcggtgcgcagcgacccccggtctcccctcgcctcccgctgcgcgccgcggcccccttggcatccagttttccgtcccttgggacgggcaggtgtttctgtcccagtatttcaacttccgccccccccccgcccccaccccgccgcggtctgcctgaggaagcgcatttgccggcttcccgatggagagccgggggggacccggagtcctgcggtgccaccgctgtgcgcagaggcgcgcgaagggagaggctcggcacaggctgaatcggctcccagcgagggaggacgggcgggcgattgtgtcacctctgcggtccctggggctctcctatcccccccatcacctccgcgggtcacggaccttggggacagagatgaggacaagtaagggagttggaccggggaggagagacccggcacaggatagagtcttggtttacgcgcaccagatggaagataccggttcccctcttgcctctccaaggcccctgtccctgccccctccgcaatcttctatgcccatttgcagttctcggtgaagtttctcggtgagcaaaccgatcccatggcgagagcggtctgaccctagcacgaagctccgactgtggctgtgcagagccttctccaaaccctgttcccatgtggccagtgggaacctgtggctctcctggtaccctccttccgtgcacccccactcct

SEQ ID NO: 8870 - DNA, 853 bp, Artificial sequence
  DNA replication origin
tagggatgcagatcttggcggccggcgtctgttgctggcgtatcccccatatggctgcccgggctgaactcggccgcgagaaagaggaggcgcgcgcggggcgggaggggcgcgcggccggggaggaggagctgtgaaaatggaacggggccggcgacgctggagggagcgctccgaaggagcgcggaagaaagccctgcttagctacagccaatcaggagcgcccgtgcggcgcttatagacaaaggcgcccccctttcggcttttcggggccgaactggggagcccgctgggcgggagttggccgcctccgcccgggggcgggtggaaggtggctcccggggcagggagcctgcagggcggctcacagcgcttctgctcttgtgtgtgtgtgacccccaaaatgccttttatggtatttttccagtcccccccccaaaaaaaaacttcccgaaactgtcatccctttgagaagccttttatttcttctcaagcctcaggccacctgggttggagaattttaaatacttgcttggagtcgcgaccctagttaaggccagacccacgatgagaatcagaagtccctcaatctgccagttagtagggctcctcgggccaggggagggttggaaggcagctgctcgttcttaattaggcagctgtggattacccaggcacacagtaagtgctcagttggtgcttgtgaggtgatgcacagatgatttgggccagttcgctgcccaccctttgcccatccgccgcgccactctgtttatggtcaattctagctaatcagcgcacttctgcaacgcctccttagctctcagtgaggaacactaccctgaaatcaaca

SEQ ID NO: 8871 - DNA, 854 bp, Artificial sequence
  DNA replication origin
tgtgcgtttgaaggttggcggggcggcgggaggcttccccggatatgtgggtgtgcgcctcccgggtggggcgggcggggaggggaggaggaggaagggggaggttactggtggtggcggcggcggcggcggcccgggctccggctgtcggggaagctgctgagctgtgatggtgatgacgaggtgaaaatggcggatctttcgaaatacaatcccggcccctgacataccagaggcggcggcgacggcgacgtcgccaccccggctcccttctcggtccccgggtaccctggagcgctccagtttggacaaactgggaaaggaagctgctggccagagctatcgtgcacgggcaaaacaagccccgccggggctcgggattgcccaggaccttctggagcccctacctcggagcccgagggaggagaaagcggcagccgctggaggtagaggaggatggggtacccgagggcttctctgtccggagatctctttatttggggggatgggggtgggtggggaaagaattgcgcggtggatcaaggaatgacttgtccggagtgcgaagaatcagtagcctcgtcatgacatcaacattattctttgagtgttaagagggctccagtttgctcttatacctaaggctgctgctgaggcctagaggaaccgctagcacttatcatgatttcctgatataatgtttaaaacagccactctggcgggtgttgctttgatggtgttcagcagttcttggggttgtacgtttctttagggaggcagagcattggcattttatctgcatttaagatctgtgtcttagatcctagtctgtaacttgttgggttgtggatgtt

SEQ ID NO: 8872 - DNA, 1011 bp, Artificial sequence
  DNA replication origin
cggggtgcggagcgcaggggcgggcagagaggggcgcgcgggcggggagggcccagcgtattatgggatgcggcggtggaatggggctgggcgcgtgattttgaacaaaccctggtctgtgtctcggaggcgccgccgccgccgctgctgctgggagcccagggagcgccgcgcgaccaggaggcggcggcgccgccggctttggtgagtgtcagcccccgggatgggggctcctgggcgggctggcgggaagggggaaccggcccccgctgcgagtgcctgcgcgggcggagagcgctggaccgctccctccgggagcccgggccggtgggccttggcggggagcgggaacccgccagcggggtccgccgcgccccttccctgaagctgggttgcggggggcgaaggatccttggggctcggtctcttcccgtcggctcccgagagggtggctgtcacccggcagggccagcgctcggccagccgcctgcccggcggtctggagtaagggctcctgcggctgttgacacgcacactgcgcgacccaacaagccacccgtggcggccccaggtttctgggaaccggttttgctgctgtgtcattttgtgccagtccctcctctccctactgcccgccgccgcgttcttcctatgcccctttgtacaggctcttgttcgtgcgtgtccgttttcctcgcgaagcccaccagccaaatgtcataatgttcccgaggtgcacgggggaagggagcgggccgggacttagcttggccagcaacggtaaacaaccaagcagagtgcggatggacggggccgtcagtggggaaatgaagtttaaagatgaagtaattgagaacactttatactctcagcatctggtagtctgcatataaaaacagcaattggggtgggtggtggacagcccttgttgaaggctgaatctaccgacttttatatggagttgccattgaaacaaggtagggaaatgaaatgactttttcaacttcaact

SEQ ID NO: 8873 - DNA, 1301 bp, Artificial sequence
  DNA replication origin
aggcgcccctcacctcccggacggggcagctggccgggcggggggctgacccccccacctccctcctggacagggcggctggccgggcggggggctgacccccccacctccctcccggacgtggggctgacccccccacctccctcccggacggggcggctggccgggcggggggctgacccccccacttccctcccggacggggcggctggccaggcagaggggctcctcacttcccagtaggggcggctgggcagaggcgcccctcacctcccggacggggcggctggccgggcggggggctgacccccccacctccctcccggatggggcggctggccgggcggggggctgacccccccacctccctcccggatggggcggctggcagggcgcctgagccccccacctccctcccggacggggcggctgccgggcggagacgctcctcacttcccagacggggtggctgccgggcagaggagctcctcatttctcagacggggcggctgccgggcggaggggctcctcacttctcagatggggcggatgctgggcggagggactcctcacttctcagacggggcagctgggcagagacgctcctcacctcccagacagggtcgcggccgggcagaggcgctcctcacatcccagacggggcggcggggcagaggcgctccccacatctcagacgatgggcggccgggcagagacgctcctcacttcccagatgggatggctgccgggaagaggcgctcctcacttcctagatgggatggcggccgggcagagacgctcctcactttctagactgggcagccaggcagaggggctcctcacgtcccagacgatgggcggccaggcagagacgctcctcacttcccagacggggtggtggccgggcagaggctgcaatctcggcactttgggaggccaaggcaggcggctgggagatggaggttgtagcgagctgagatcacaccactgcactccagcctgggcaccattgagcactgagtgaaccagactccgtctgcaatcccggcacctcgggaggccaaggctggcggatcactcgcggttaggagctggagaccagcccggccaacacagcgaaaccccgtctccaccaaaaaagtacgaaaaccagtcaggcgtggtggcgcgcgcctgcaatcgcaggcactcggccggctgaggcaggagaatcaggcagggaggttgcagtgagccgagatggcagcagtacagtccagcttcggctcggcatcagagggagaccatggaaagagagggag

SEQ ID NO: 8874 - DNA, 908 bp, Artificial sequence
  DNA replication origin
tctgcccggcagccaccccgtctgggaagtgaggagcgtctccgcccggcagccgccccgtccgggagggaggtggggggctcaggcgccctgccagccgccccatccgggagggaggtgggggggtcagccccccgcccggccagccgccccatccgggagggaggtgggggggtcagccccccgcccggccagccgccccgtccgggaggtgaggggcgcctctgcccagccgcccctactgggaagtgaggagcccctctgcctggccagccgccccgtccgggagggaagtgggggggtcagccccccgcccggccagccgccccgtccgggagggaggtgggggggtcagccccacgtccgggagggaggtgggggggtcagccccccgcccggccagccgccctgtccaggagggaggtgggggggtcagccccccgcccggccagctgccccgtccgggaggtgaggggcgcctctgcccggccacccctactaggaagtgaggagcccctctgcccagccaccacctcatctgcgaggtgtacccaacagctcattgagaacgggccgggatgacaatggcggttttgtggaatagaaagggggaaaaggtggggaaaagattgagaaatcggatggttgccgtgtctgtgtagaaagaagtagacatgggagacttttcattttgttctgtactaagataaattcttctgccttgggatcctgttgatcggtgaccttacccccaaccctgtgctctctgaaacatgtgctgtgtccactcagggttaaatggattaagggcggtgcaagatgtgctttgttaaacagatgcttgaaggcagcatgctcattaagaatcatcaccactccctaatctcaagtacccagggacacaaaca

SEQ ID NO: 8875 - DNA, 968 bp, Artificial sequence
  DNA replication origin
gagggaggtgggggggtcagccccccgcccggccagccgccccgtccgggaggggggagggggagtcagccccctgcccggccagccgccccgtccgggagggaggtggggggatcagccccccgcctgaccagccgccccgtccgggaggtgaggggcgcctctgcccggccgcccctactgggaagtgaggagcccctctgcccggccagccgccccgtccgggagggaggcgggggggggggtcggccagccgccccgtccaggagggaggtggaggggtcagccccccgcccggccagccgccctatccaggaggtgaggggcgcctctgcccggccgcccctactgggaagtgaggagcccctctgcctggccagccgccccgtccgggagggtggtgggggggtcagccccccgcccggccagccgccccatccgggaggtgaggggcgcttctgcccggccgcccctactgggaagtgaggagcccctctgcccagccacgaccccgtctgggaggtgtgcccagcggctcattggggatgggccatgatgacaatggtggttttgtggaatagaaaggcgggaagggtggggaaaaaattgagaaatcggatggttgccgggtctgtgtggatagaagtagacatgggagacttttcattttgttctgtactaagaaaaattctcctgccttgggatcctgttgatctgtgaccttatccccaaccctgtgctctctgaaacatgtgctgtgtccactcagggttaaatggattaagggcggtgcaagatgtgctttgttaaacagatgcttgaaggcagcatgctcgttaagagtcatcaccactccctaatcttaagtacccagggacacaaacactgcggaaggccgcagggtcctctgcctaggaaaaccagagacctttgttcacttgtttatctgctgaccttccctccactat

SEQ ID NO: 8876 - DNA, 1226 bp, Artificial sequence
  DNA replication origin
cacttcccagtaggggcggccgggcagaggcgcccctcacctcccggacggggcggctggccaggcggggggctgatccccccacctccctcccggacggggcggctggccgggcagaggggtcctcacttcccagtaggggcggccgggcagaggcgcccctcacctcccggacggggcggccggccgggcggggggctgacccccccacctccctcccggacggggcggctggccgggcagaggggctcctcacttcccagtaggggcggccgggcagaggcgcccctcacctcccggacggggcggctggccgggcagggggctgacccccactcccccctccgggactgggcggctggccgggcagaggggctcctcacttcccagtaggggcggccgggcagaggagcccctcacctcccggacggggcggctggccgggcggggggctgacccccccccaccccgctcccggacggggtggctgccgggcggagacgctcctcacttcccagacggggtggctgctggacggaggggctcctcacttctcagacagggcggttgccaggcagagggtttcctcacttctcagacggggcggccgggcagaggcgctcctcacatcccagacagggcggcggggcagaggtgctccccacctctcagacgatgggcggccgggcagagacgctcctcacttcctagatgggatggcggcggggaagaggcgctcctcgcttcctagatgggatggcggccgggcagagacgctcctcactttccagactgggcagccaggcagaggggctcctcatatcccagacgatgggcggccaggcagagacgctcctcacttcccagacggggtggcggccgggcagaggctgcaatctcggctctttgcggggccaaggcaggcggctgggaggtggaggttgtagcgagccgagatcacgccactgcactccagccttggcaccattgagcactgagtgaacgagactccgtctgcaatcccggcacctcgggaggccgaggctggcggatcactcgcggttaggagctggagaccagcccggccaacacagcaaaaccccgtctccaccaaaaaaatacgaaaaccagtcaggcgtggcggcgcgcgcaggcactcgcaggctgaggcaggagaatcaggcagggaggctgcagtgagccgagatcgcagcagtacagtccag

SEQ ID NO: 8877 - DNA, 1217 bp, Artificial sequence
  DNA replication origin
agtgggggtcctggttggggaccccctttgcaccagtaggctgggcaggagcttggtgatgaattgtatcagcgtatacctgagctagggtccagatatggtcccagtcttctggggtgagggtggaagagaggataatgtagaggtcatgccaggttagttcataagactgcataaggtactgaaactcccaaatataagaggtcgggtcttctgaaaatgaactgagtcttttgttaatttgagagagatcagtgagggagaagggaacatgaactctaacaataccttcagttcctgctacttcctgaagggggcactctagcacaggagctgaagtaagaatggggcatgggccaaagatggcgcctgagccagtatgggcaggagagaaggaagaacttggaagtggttcctgctgagggtttgaagggggaaggggagttaacaggcagtggaggatagataggggcgtaaggtggtggaatgggtttacaaacctcaggagagggcagtagaggaggagaatgggtacaggcaatactagaattgccctgaggaggggatggtgtaggaaaagaagtggatacagctgactgggaagatggtggctgggaagatgatcactgggaagacgttggctgggaaaatggcagctgggaagatggcggctgagaagataacaaggaggcttggggggttaaagaagatgattgagaggaaggggtaggggctgggaggggtgaacagcagtcagctagattgaacgagggaaaaagaggtagggtcgggaggagaaaggctatcagggcggtgagaatggaggagaaggatttgaacagataagcaagaattgcagaggtcaggttgtgagctgaatgcaaaaaggcctggacataaggaatttctccccatttctccagacgttggcaataattgcttaagtcagttaaaactgtaaactcgaatgttccattgtgggccatttggagaggcagcctagagggttgttttttggaatgtaggaccaggagtttcccataactgagggtaggctcgggagaacagggaaaagtagaccatcctggacagccggagggagacaatgaaaggagcaatcatcaccgctgcctttttcgtttgggaacaggatcaaatggcttagaggtgtccccctaagaccagatgatcagcaagtgcctggcacacatgggagc

SEQ ID NO: 8878 - DNA, 907 bp, Artificial sequence
  DNA replication origin
ggagcccctccgcccggcagccaccccgtctgggaagtgaggagcgtctccgccagaaagccgccccgtccgggagggaggtgggggtcagccccccgcccagccagccgcctcgtccgggaggtgaggggcgcctctgcccggctgcccctactgggaagtgaggagcccctctgcccggccagccgccccgtccgggagggaggtgggggggtcagccccccgcccggccagccgcctcgtccgggaggtgaggggcgcctctgcccggccgcccctactgggaaatgaggagcccctctgcccggccagccatcccgtccgggagggaggtggaggggtcagccccccacccggccagccgccccgtccgggagggaggtgggggggtcagccccccacccggccagctgccccgtccgggaggtgaggggcgcctctgcccggccgcccctactgggaagtgaagagcccctctgcccggccaccaccccgtctgggaggtgtgcccaacagctcattgagaacgggccatgatgacaatggtggttttgtggaatagaaagcagggaaaggtggggaaaagattgagaaatcagatggttgcagtgtctgtgtggaaaggagtagacatgggagacttttcattttgttctgtactaagaaaaattcttctgccttgggatcctgttgatctgtgaccttagcccccaacgctgtgctctctgaaacatgtgctgtgtccactcagggttaaatggattaagggcagtgcaagatgtgctttgttaaacagatgcttgaaggcagcatgctcgttaagagtcatcaccactccctaatctcaagtacccagggacacaaacactgcggaaggccgcagggtcctctgcctaggaaatccaga

SEQ ID NO: 8879 - DNA, 1318 bp, Artificial sequence
  DNA replication origin
aatgagctgttgggcacacctcccagacggggtggtggccgggcagaggggctcttcacttcccagtaggggcggccgggcagaggcgcccctcacctcccggacggggcagctggccgggtggggggctgacccccccacctccctcccggacggggcggctggccgggtggggggctgacccctccacctccctcccggacgggatggctggccgggcagaggggctcctcatttcccagtaggggcggccgggcagaggcgcccctcacctcccggacgaggcggctggccgggcggggggctgacccccccacctccctcccggacggggcggctggccgggcagaggggctcctcacttcccagtaggggcagccgggcagaggcgcccctcacctcccggacgaggcggctggctgggcggggggctgacccccacctccctcccggacggggcggctttctggcggagacgctcctcacttcccagacggggtggctgccgggcggaggggctcctcgcttctcagacggtgcggctgccaggcggaggggctcctcacttctcagatggggcggttgccaggcggagggtctcctcccttctcagacggggcagctgggcagagacgttcctcacctcccagacagggtcgcagccgggcagaggcgctcctcacatcccagacggggcggcggggcaaaggcgctccccacatctcagacgatgggcggccgggcagagacgctcctcacttcctagatgggatggcggccgggaagaggcgctcctcacttcctagatgggatggcggccgggcagagacactcctcactttccagactgggcagccaggcagaggggctcctcacatcccagacaatgggcggccaggcagagacgctcctcacttcctagacggggtggcggccaggcagaggctgcactctgggcactttgggaggccaaggcaggcggctgggaggtggaggttgtagcgagccgagatcacgccactgcactccagcctgggcaccattgagcactgagtgaaccagacactgtctgcaatcccggcacctccggaggccgaggctggcggatcactcgcagttaggagctggagaccagcccggccaacacagcgaaaccccgtctccaccaaaaaaatacgaaaaccagtcaggcgtggcggcgcgcgcctgcaatcgcaggcactcggcagactgaggcaggagaatcaggcagggaggttgcagtgagccgagatggcagcagtactgtccagcttcggctcggcatcagagggagacc

SEQ ID NO: 8880 - DNA, 1246 bp, Artificial sequence
  DNA replication origin
gggggcacagcctttgttggcggcccctaatacggccatcaaaaccgatacaatagcgtctccctggcacccccaccaggcccggctgccacagtccccgggcttcccaagagaacctccacttggctttcgcaacttcccgcagttactgccgctcagccgcactaaggaggtccggagacttggaagaaacttcggagactcgctgaaaggcgaagaactgagcgagaaaaggaccccaggctgggccctgaagtccacctggaaggctgggagcctccgcggcgctgcggcctactaccccgaagactagcgtgatcttggggcaactcagtttgcctcaagcaaggtctttgcgggatggtacattttccccaggccgtgtcccttcatctcactcttctcctggctcgctcttgtgttagggtgttgagctccacgatgtccccaaatgtgcccggacgcagcgtgtgccagcccccagagtggaggcaggtgggaaagcgcgggcccagcgctggtgagcggctggaagcgctcgccctgccctggggacgctggactgtcttcaatgggctcacccaggccgagtgtactcgggcggcgagggcgaagaggtgaggtggggacaccccaggcggagacgtgcatgcaaatacactcacttcccgggcggtggagggctcaccgctgccgggcctcactgcttcgaagagaggcagcgggttaggctggcgaaggcggaatggggcgctggacgacagggaggagccgggaaagcagagatgcagtggcctctcctcccctctcctccccatctttctaatccaggccaggcctgcggtcctggccaggccgtttcaggaacagccagggcctcggacgagacacacgtccctcaccgcgttgtggtccacacgaacacacacacaccggctcagcccaggcgtactcaagacttagagagagggaggcgcttggatacagccacgcgagctcagaaaagcgagaatccctttctggaagccctggcccaacctaactggtgtgattccggcgctgtcaaactactggggcgggccacaggatggactgagcggcatgcacaccaggggccgcgacccgggagtgggcagaacaggcacggcaggcaggcatcggggcgcgggtggtagtactcacgaggggtacaggccaggcgtgcgtccctccagggcgggctctgcatcactccgggccagaagat

SEQ ID NO: 8881 - DNA, 1468 bp, Artificial sequence
  DNA replication origin
ggggataggatgacgcgagcgggctagtggggaagcaagggaagaatatgaactgcttttccataaaagggctgagttttcattattcctctctttaaaaagtaataccctcttcgtctctgcttccccctcccctttctcattttatttagcacaattaattgaggcggccactggccccagcgcggaaccgcaccactcaccagctcccgcccctcctggccccgcccacaggagaaagaagtagggagcgggaggggactaggcgggcgcggccctacgcctggcccgcctcagccaatcagagggtgcggcgcccccgagtgggcgagccccaggggcgacgcaaggatcgaggcggcgagctattggacacggtggttacgcccccggcctgcgcccggctcgccggcccccgcagcctcggagtgacgtccctcaaagttctcattttggtcccccacttccccctccctttcgtcccccagctaaagaggggtagggagtgatgcaaatgttttattacctttgagagcttcatctgaactgtcaggcccggagggagagaggaaaggagagaaagagcggaggagccgcggagagggtcagtttggccagaggacaggacttagaagaccgaagcctgggaagccgcgaagaaaatgccagagaggagagtcaaaggctgagagtgagagggagagagggagcgggggtggggcgggggtcgccgggcccgtttgcagaagtggactgacgagcggcgccgaaacccagccgtcagacttttcacacttagtcttttgtttttctgtgtttttcctccccctttttcttttcaatattgcaactccagtgccccgtgggccagagggcaaggcgggtggaggtgaggacctgggagccgcggggatccgtggcactgccctttctggcgcagcagcccggggcagcgtgggcggaggaagcccgcacagaggctagatctcccgcgggctggatgcgctttctccccgggcacagtgagcgtcgaatgcgaatcagccgcgcgaccgaaagagcagagcatcccagtaagatcagaggagcgccacgggctgcacaaggcgtcctttgaacctccccaaagaaagcaagccacccccaccctccaacttcaaagtggagattcggcaactaactttgctacaaactctccggagccagcctgggttttgttttgcttatttcccgggggcagaagatgagaagtagcgcactttgaacagctaggaaaagtgaggaagagagaatagccagggatcgaatctaggactcgcggaacgaaaggactgcctagcccgccgggacgcctgcttttctcggcgagctgccgcctcccgcgtggagggtttggacatctctgctgcgcagctaggcgagcaactcccggcagcggcatttttggttcagttggcagctcgcctcc

SEQ ID NO: 8882 - DNA, 1692 bp, Artificial sequence
  DNA replication origin
taaagcgggtcaagcgtcctccttttctccccgccccttctcctcctcctacctgggcctctgcgtggagacgcgcacctggcaaccggaggccgcgtctccgccttctctgctcgcgcctggcgcccggagcctgcccgggacctccgccggagccgcgctcgctgcaggcggcctcgagcgctctctcgttgatgccgttttggaggtgaccggcgcggcggccgctctatggtggggccgcgttagtggctgcggctccgcgggactccagggcgcggctgcgaggtggcggggcgccccgcctgcagaaccctgcttgcagctcaggtttcggggtgcttgaggaggccgccacggcagcgcgggagcggaagatgttggagctgaggcaccggggaagctgccccggccccagggaagcggtgtcgccgccacaccgcgagggagaggcggccggcggcgaccacgaaaccgagagcaccagcgacaaagtaagtggagccgagagaggcggacgccgcgccctggctgggtcctggttggaagcgggacacttgagagcaagggtggggcccgtccagcgtcaggtgaggctgcacgctgccggtgcaccttcctccctgcctggcactgcttcctccttctccagagggggtcgggacccgggatcccagtggcggtgaggttcccaggatgaccgcggccgctgcccgggagaaatgggccactcaacccggcttacagtttagcttcatcctcttccggtcccttcttcaggatctggggccgacgctggaatcaggagggaacctgtcctcctaggggctgcagtgcagttagtagctgccacctcacctctcttttcagtagagggaacaaagttagtaaggactagagacgtgccaccgtcggctgtatcatttcatcggatcctgacgcgggaggcttggcttctcgcgctgccccatatgcacttacattttctccatcctttttcagtatgatagattttggaggttttagagtatcatgcacgtgacataatagtaatcttccagcttcttttgagtacacgacagacagtgcaattcttctgtctaccagtagatttcatataacccgacgttaattcatgaagacttttcacttccttttctatagattactcttctttcacatttaagaataagtagatgcgatattactatctgtttaaagctagaaaaggaattcgggcgtgtttggtaatatagtggtgcaagtaagaacttgtgaagaaatgcagttttatgatcttatggactggatggtttgggaaattggaccagagaatagattgttgtatcaaaccgtctgtttagaaaattccattttatttgagaaacccaaaacacgtaaactgtttctagaagcatactttggaagcaggcattgcagtttgaattacagaagtgaggtggattgcccaaggtcaagttcgtggctcttgaaactagaatctaagtttcctgattccttttcttctggtttatgtggttgctgagactggctggcagttctgatttggggaggattccacctgaaagttgatgttgatgagtttgatgtaacccaaattacaaagccctaataggaacatatcacatgatatcacgaaataaacgtaaacgtgattcttagtactaaaac

SEQ ID NO: 8883 - DNA, 1052 bp, Artificial sequence
  DNA replication origin
gctgcctagcaccgctgcctggcccggcggaccggttcccatacctcgcggccgcagaatcgagctcgggccccggcccccggcccgcggcgcggggctcccgggccccgccgcggacgtcgcgccggtcgccccttccccgtagcccgtgcgccctcggcgcggagccccggcccgccgcggtcccgtctcctgggcctgtcccgcccgcgccctccgccggccctcaggtgagtacccccgccatcctccccgccccccgcgctcccggagaggcggtgctgcctcggcccggcgcgcctggccgctttgttcgtgcggggcggaggcgctgcccactcgcggccctgcgcccgctccccctagggacaggccgcggcccagctgctgtcctccccagggtccgccttggccgggagccgccgccgccgccagggtgggcggcctggccctagtcctccgctgcctcctggggagggcgccgtcgcggacgggtcggggtcggggtcacgggcggcgagcggagcggagcggaaccgggatatttcgggggataggggaggagagggctggacgttacctgtgggaagcagtgggggcgtaggcggccctggctcgcaggggtaggggatcaggccctggcccccccccgctgcatcctgcggggtctcagctcccggagccacccggacctgagcgcagccgagcgcggcctccatccctcgggcgctgtctccagggcttcgggcctctccccctacgccctacgctggaagcccttcgattatggaaggagccagagatgctccagttctcttgtactggggatgtggtggcatcgcaaacattcacagttacggcgggatttaagaagcagatgagacctttccaaccaaaggccatctggctagtgtttgagcctcaggtgcagtttttcattgatttttaccatttaattgtgagatctgcaatatcaggtcttcctttcacagaaacaatgtgatacaaccagattgaaaggatatttactgcatatgtgaacccttgcatgg

SEQ ID NO: 8884 - DNA, 1596 bp, Artificial sequence
  DNA replication origin
attaaggttacttcgtgaggattaaatattagaattctgctccgccccccaccaaaggataccggtatttttactaaaatatatttttaggtttgttttggcatattcttttcaaagagatttgaaactcttaaattgttataattacaaaatcttatatttgaactttcaaaacattactcattttgaagtagaatctaaaactacatttaaaaacatttctgcccacatttggtctgtttaagggactaacctttgaacacactagtcttattttgaaagggcaaggtgttttttttttttaatagccagtgccccacagaagaaaaactgtgacaccccccccccacaaagtgctcatatatatcacctgtgtttgttagcaatgttacctccaactttgttatcttggagtaattgacgagtaaatcattacaaatgggtccaactctaaaggcaaaatcgtcaaaaagaagaaaacagcaaatccaacttgccttatgtttattagaggaaatcctgaaacttctgtagattgcagtgttaggaaaaacaagtttgtgattacagcgatgttatgaccacttccccactctaactctgttgtttaagggagtccactcctaactgctgactcagtttgtctttactgccagaactgaagcgtgacccaaattgtctgctgggttgagtaggaacaaacgggcaaaatgatgatcacttggcagttctaggtttactaaaggatacttatttggtctaaacactgtttgtgggactgcaaaggtataaataatgcccctcccaggaaggaaaaggaaaatctaaaatcttaggcaaccgactcaaggtcactgacggaaggcaccatttgagaccgagctcctcaactacagtcccatcacggacgggagccacacaggagagcgtgcaggagtttcgaagctgcgtagtacaatagctggcgtgggcagttcttttatactctggctagagtaaaattaacgcacctttgcgtttctccatcgcctctgacagcatccagctaaagggtgtagggttaaggaaagcggaacccagttgtcctttctcagctgagtcctttcagaaactgggactgaggagggtgagcgccgcggagaggggcaggggtgggagaggagagaggggcgcggggcggggaagaggcgcgtctggaaggcagtggggagagggactgagaggagtggggttgaagtccagctgggagcatccagcggcgctgtctgcagacaggggcgaaggcagccgctgagagtgaggcaagagcgggaagccgagggaagggaaggaagtaaggaaagaggaaggaaaggcaggagggggtagaagctgagcggctgcaatttctgcggccggctcagtaggaggagcaggaggggaaagaggaggatccagtcagtcagtcagacagccagcgggaggtggagaaagcaggaggaggaggaggattaaagatggccaccaacagctgcgggaaacggcaacaacccctcactttccgggatggtccctgcgggtcggcccggccttgatggagagaagaaacccgaggag

SEQ ID NO: 8885 - DNA, 1138 bp, Artificial sequence
  DNA replication origin
ggaggcaaggaattgcaactcagaaatacattgctacttggctgcctctactctattattgtacaccttaaaggtgaggttaattaagtcctgttgtggggtttgagggccagaatttaatttttggagctttatttcatgtcaggaacagattgggtaataaaataaaatgcatattgagaataagacggccttctgacctttcagggtctagggctttaaagcgtctcagggttgctgccaaatgagccatgaactgggctgggtttttcatatttgatgaaaaagagcctaaacactaactgattttgggagatgtcagataaagaaaaaggagcattaaccttgactatgcctttagctccagccacctttttaagaggaaattgctgggctggtgggggaaggctagtcacagaacgaaactgtaagctggactgggtggaaggagtggaggtgataaaaggattatagggtgggggagcagaagctgaggaagaattgggacctggctcggcctggtgaggagcagagaggtcagatgggtctgtagaaaaggaagattagaaagactcagcaatgcttggggttgggactgaggggacaggtgggaaggaaagaaggaggatctgggataagtcacattggtaacagactagggagggaacaatgtgtaaaagaatgcctggacgtcaggcatctcggaccgtttgcccattttatgataagaattatctagatcttgtaggatggaaaaatcaaaagtgccgttttctggctatttggaaccactgtcgagtttgtattggggccaaacggtattgtagaagaaaataaggcgtttaggtttaggtcaggtgtgagttgaagaggttcttgagaacacaggctaagggagaaggaggaatggaggggtgaaggctgcccatagtgaaggaggcaagcccagagaaaagagagagtagagacatggagagaaggggtggggggttcttgccccctagaaaagcggtacttgccgctaagggtgaagaaggggttgggaggttcttgccccccagaaaagcagtacttgccgttaagggtgaaggaccaaggcaggcgtccccatgtggtcagacacctctgaaatgtgggt

SEQ ID NO: 8886 - DNA, 1124 bp, Artificial sequence
  DNA replication origin
cgaggtggagccccagtggtgcgagtagctccagcggccacgctgaggcgagggtgacacaccatgctcacggcccctggagaccgtcgtgctggcgagccgtgctccgtagctccccggtccgcctcggcagcggtcagagtcgcctacaggagttgagccgcccgcgccagaaggttttggcgaagctcttggagaggcgtcgagcacagtagggcggcgggggtgcgttgagcgctcgggggtcaggcagtcggccgggatcgccgctggggagcgtttccgaggcgaggaggaggaggaggagatgctgctcctcttctccccctccccaggctccttctacagctccttcagcccacgcccgcagccgcttgtgggagaagtggtggtggctctcggcgcccgcggcggctgccggcggcccgccccgacgccgcgtccctgcagccctcgcccggcgctccagtagcaggacccggtctcgggaccagccggtaaggacgagagccgccctgggctctgcgctgcatgtgcagaagtgcaaaacaaagtacattgcgctcgttctcttcctcctctctctgctttcgctccagtccctaaacccaactcctcggttgccctggtagaaggaacttttctttggttttggtggtgggtgtttttgtacgttagagtgggggtggggtgactggagtggggaagaatgagatgaaactccattgctaattaggtagatccatctcctctgcggaagaaagccggattctcgggaatgaaacccacagggggagtaagagattgtggggtaatagggagtgacattgccccgtcgtgcttgcacagctccgctctgtgcgtgcttaagggaagggctcccggagtctgtttctaatttctgcaaatgattgtggagatggtgtggttagaggccgcccagaagaatgtgtgtgtaagggctcgagaagggggtgggatggcggggaagcagaggaagagggggcagagggagagacactgtctgatgcaaggtcttttattgcttttcttctgcttgctaaagttaacactctaccctccggccccctagccccaccgctttgctcattacgtgatactgt

SEQ ID NO: 8887 - DNA, 1341 bp, Artificial sequence
  DNA replication origin
ggccggggcggaacccggtaccgcagctcgggaggtgggggtgggggcggggcctcgcgcggagggcgtggcctcggggcgtcccgggcagccggcgtgctgagcttgccagccagctagcgagcgacgggcgcgcgcggcccctgcgcactcggccgccgcctgcgcgcgttgcggccgcagctgcacctttgcctccgcggttccgcagccgagccccgggaggaggcgctcccctgcgtcgtccgcacttgcgccctttcccaccgcaacaggtcaggggagggcggaggtgacgagggcgcccgacccgggactagaggacggaagggtctggaaggtgagcgcagccctgcgccacccagggctgggggtcgatccgcccggcccccgacgccgccgccgcggacttctcggaagccgaggctctccccgcctctctgccggcttcccagcacgctgactcaagtcgctggcgttcccacttttccggtgggagccctcggggagaacgggctagggctcagagctctcaccgccctacttgcgatcccgcggcaggtagcgcgtagaaaaacaggggacggggacatgggaagagacccatgctcctccctcacgcgcagcccccaagtcagacgtttgcctgtgcaccccgcgttttgcggagagctgtcccgttgttgggacctgctacttgagttgcgtaatgagtcccagaagtttctcggggggagggggcggggaaaagtggggttcttctctcctgcaccccgggacccttccctgtgcctgtcgtggagagagatgagggcttcccgccgcgtctcgctgagagcaggagggaggcgtgtgtcggtggtccgtagcctccggggaggagttggagccaccttctgagacttaacttcagggacagagggagaggcgtctttagtatgggactggttaatttctcttgataatgcttttttccctcgggtgtcccatcctctgtggccgtcgcaaccccaccctccgacggtgcgagcgccggagccagcgaatgagaggggagagaaggtggagagtgtgaatcacacgttaccttagtgtaatggtagttgcattaatggagctgcgacgggcctgcgggcggttcgataccgtccggctagttttctcttcccggagcttctccaccaccagcacccgcaaattgttatgcagatcatcccgggaaggcacttggctttggaggtggagatgtgtccgaatctcccttgaaccagtctctgttagggggaaaggccttgcagccaagtgatttgttttaagggtggagccggagataattttaaa

SEQ ID NO: 8888 - DNA, 1082 bp, Artificial sequence
  DNA replication origin
catgtttcagagagcacagggttgggggtaaggtcacagatcaacaggatcccaaggcagaagaatttttcttagtacagaacaaaatgaaaagtctcccatgtctacctctttctacacagacacagcaaccatccgatttctcaatcttttccccacctttcccccctttctattccacaaaaccgccattgtcatcatggcccgttctcaatgagctgttgggtacacctcccagacggggtggtggccaggcagaggggctcctcacttcccagtaggggcggccgggcagaggtgcccctcacctcccggacagggcggctggccgggcgggggcctgacccccccacctccctcccagacgaggtggctgccgggcagagacgctcctcacttcccagacggggtggctgctgggcggaggggctcctcacttctcagacggggcggctgccgggcggaggggctcctcacttctcagacggggcggccgggcagagacgctcctcacatcccggacggggcggcagggcagaggtgctccccacatctcagacgatgggcggccgggcagagacgctcctcacttcccagatgggatggcggccaggcagagacgctcctcactttccagactgggcagccaggcagaagggctcctcacatcccagacgatgggcggcctggcagagacgctcctcacttcccagacggggtggcggccgggcagaggctgcaatctcggcactttgggaggccaaggcaggctgctgggaggtggaggttgtagcgagccgagatcacaccactgcactccagcctgggcaccattgagcactgagtgaaggagactccgtctgcaatcccggcacctcgggaggccgaggctggcggatcactcgaggttaggagctggagaccagcccggccaacacagcgaaaccccgtctccaccaaaaaaatacgaaaaccagtcaggcgtggcggcgcgcgcctgcaatcgcaggcactcggcaggctgaggcaggagaatcaggcagggaggttgcagtgagccgagatggcagcagtaccgtcca

SEQ ID NO: 8889 - DNA, 929 bp, Artificial sequence
  DNA replication origin
tgggaagtgaggagcgtctctgccaggccgcccatcgtctgggatgtgaggagcccttctgcctggctgcccagtctggaaagtgaggagcgtctctgcctggccgccatcccatctgggaagtgaggagcgtctctgcccggccgcccatcgtctgagatgtggggagcacctctgccctgccgccccgtccgggatgtgaggagcgtctctgcccggccgccccgtctgagaagtgaggagcccctccgcccggcagccgccccgtctgagaagtgaggagcccctccgcccagcagccaccccgtctgggaagtgaggagcgtctctgcccggcagccacctcgtctgggagggaggtgggggggtcaggcccccgcccggccagccgccctgtccgggaggtgaggggcacctctgcccggccgcccctactgggaagtgaggagcccctctgcctggccaccaccccgtctgggaggtgtacccaacagctcattgagaacgggccatgatgacaatggcggttttgtggaatagaaaggggggaaaggtggggaaaagattgagaaatcggatggttgctgtgtctgtgtagaaagaggtagacatgggagacttttcattttgttctgtactaagaaaaattcttctgccttgggatcctgttgatctgtgaccttacccccaaccctgtgctctctgaaacatgtgctgtatccactcagggttgaatggattaagggcggtgcaagatgtgctttgttaaacagatgcttgaaggcagcatgctcgttaagagtcatcaccactccctaatctcaagtacccagggacacaaacactgcggaaggccgcagggtcctctgcctaggaaaaccagagacctttgttcacttgtttatctgctgaccttccctccactattg

SEQ ID NO: 8890 - DNA, 886 bp, Artificial sequence
  DNA replication origin
ggagaggtcagatgggtctgtagaaaaggaagattagaaagactcagcgacgcttcgggttgatactgaggggacaggcgggagggaaagaaggaagatttgggacgagttgcactgggcacagagactaggaaggggctgatgtgtaaaagaatgcctggacgtcaggcacctcagaccatttgcctattttacgacaagaattatttagatcttgcaggatggaaaaattcaaagtgccattttctggctatttggaactactgttgagtttgtattggggtcaagcggcattgcagaagaaaataaggcatttaggttttaggtcaggtatgagttgaagaggttttaagtttttgagaacacaggccaagggagtagaaggaggaatggagggtggaagcttgcctatagtgaaggaagcaagcctagagaaaagagagagtagagaaacagagggaaggggtttgggggttcttactttccagaaaagtgggaaaaggggttggggcacagagataagaggtcagggcatggaaataagggatggggcgcagaaataaggggtcgaggcatggaaataaggggttggggcacagaaataaggggttgaggtgcagagatataagaggttggggcacggaaataagggattggggcgcagagatatgaggttgtggtacttgcccctccgccagaaaagcgggacttgctgctaagggtgaaggagaaggggttgaggggtacttgcccctcccccagaaaagcagagaaggggtagagacaaggagagaaggggttggggtacttgcccctttcccagaaaagtgggacttgccgctaagggtgaaggaccaaggcaggcgtccctgcgtggtctgacacc

SEQ ID NO: 8891 - DNA, 1275 bp, Artificial sequence
  DNA replication origin
agccaaggagagaggcctcagaagaaaccaactctgccaacacctcgtgagaaaatacaatttttcttttctttttccttccttccttctttttttctttcttctctctctctctttctttctttatgagacagagtctcactctgtcacttggagtgcagtggcccgatcttggctcactacatcctctgcctcccgggctcaagcgatcctcccacctcagcgtccctaatagctgggaccaaaggcacacaccgcaaagcctggctaatttttgtattttttgtagagacaaggtgagcaaataaatttctgttaagccacccagtctctggtactttgttatggcagccctaacaaacaaatacaggagcagattatgagaatttactaaaccaaaccacagaaattaaattttatcctttcagctgccagaagcccacagaggtgtctaagcatcaacgtgacaaataagcagctttggttctgcaatataacctggaaatagtgaggacaccgacgtggagaatagagatgggagttgacagggatcaattgttctaatgcggaataatgcaagacataagatcaagccagcaggagtgagaaacagagatcatatcagggtgatatctgtggggcaaaagtaacaagaagataaggtgtaggcggtggagggtaaaccgcgaggcttccatgaagaagagtggcctgggaagtgaggaggacagcgaagccccaaacctcaccttgggatacgggaagtgaagcaggttccagagaaggggacaagataatgacttagggtaggataaatttcagacaattgcagagcatcacattagatgtgttcagaagagtggaaataaagttctgtgcctaggccctcatgcaggattctgttgctagaagtcagtgctggccgcagggagaccggagatcacagtggaggcaccagcgatccgagagtcctatgacgaatccctgggatccccacaatgtgtggagacagaagccaaccaaagagcgagaaagcatctccaaaccagcagaatcaggggcaggaggcccgccaaatgcacagcaagtcagccttggtagtttgcaaatggaaagatttctttgacccgctggagacttcagctcaggctggatgtcgctaattcacaccatctcaccaaaaggttctttccctgccctttggtgaatcgaggcagaagtggctggtggataactgggacccaagagttatctcagcgtcgggcaggcatcgac

SEQ ID NO: 8892 - DNA, 1565 bp, Artificial sequence
  DNA replication origin
gctcaatgtaatggttatgagtgctgtctctaagagcaggcttctaggatttgaatcctgcctctattatctggctgggtgagcagaggtgcattgacctctgtatgctttagattttccttgaaaaatggggatagtagtacttattttgaacagagcccagcacatagtaaactctgcctaagtatctgttagataaaatgaagtgggatatctataacacacgatgtgggatatctatagacttgaaacccttcatgcaattaattaacaagtgtttgctgccagttttggaagcctacactatactgtgctagagactatagtggctcaggagttttagagaactgtcagctcatggactgggtgtgtgttggggggcagttcaggacaatgaagacactgattagtagcatgcaaaggatgccacagaagtagaggtgggcgattatttggcttggtggaaaagggaagttggggcagcttccaagtggaggtgatgctggctgattgggtgcaggtgatgctgattgattgggtgcaggtgatgctggctgggtgcaggtgttgctggctgattgggtgcaggtgatgctgattgggtgcaggtgatgctggctgaatgggtgcaggtgatgctgattgggtgcaggtgatgctgattgactgcgtgcaggtgatgctagctgattgggtgcaggtgatgctggctgactgggtgcaggtgatgttggctgattgggtgcaggtgatgctgattgggtgcaggtgatgctggctgattgggtgcaggtgatgctggctgattgggtgcaggtgttagctgattgggtgcaggtgatgctgattgggtgcaggtgatgctggctgactggatgcaagtgatgctggccgattgggtgcaggtgatgctggatgactgggtgcaggtgatgctagatgactgggtgcaggcgatgttggctgattgggtgcaggtgatgttggctgattgggtgcaggtgatgctggctgtgtgcaggtgatgctgattgggtgcaggtggtgctggttgactgggtgcaggtgctgctgattgggtgcaggtgatgctgattggatgcaggtgatgctgattgggtgcaggtgatgctggttgattgggtgcaggtgatgctggctgactggatgcaggtgatgctgattgggtgcaggtgatgctgattggatgcaggtgatgctgattgggtgcaggtgatgctggctgattgggtgcgggtgatgctggctgattgggtgcagatgatgctggctgattgggtgcaagtgatgctgattgattgggtgcaggtgatgctggctgattgggtgcagatgatgctggctgattgggtgtgggtgatgctggctgattgggtgcaggtgatgctggctgactgggtgcaggtgatgctgattgcttgggtgcaggtgatgctggctgattggatgcaggtgatgctgattgtgtgcaggtgatgctggatgactgggtgcaggtgatgctgcatgattgagtgcaggtgatgctggctgattgggtgcag

SEQ ID NO: 8893 - DNA, 1572 bp, Artificial sequence
  DNA replication origin
acttgagcgcaggagttcaaaaccagcctgggcaacatggtgaaaccccaaggctattgacctagaaagctaagcttcaagaccctcatgcctgatactacaaaaaatacaaaaattagctgggtgtggtggtgtgtgcctgtgagcccagctactcgggagctgagattccagtgagctgagatcacaccactgcactccagcctgggcaacagagtgagaccttgtctgaagaaaagaaaagaaaaaagaaagaagagaagggaagaggacagaagggaagacaggggaggagaggggaagggaggggagagggggaacggaaggggagaaggggaggggggagtggaggggagaaggggaggggaggaagggggaggggagggagggagagaaggggaggggagggagagaaggggaggggagggagaaggggaggggagggaagggaaagggaggggaaaggagtggggaggggaggaaaagggaaaggaaaaggaaaggaaaggaaagaaaaacttagctaatgctgaaatggtgaaatgaaacaaggtataagtgctcagcatgggactggcacaggttaggtgttaactgtatgttagctgactgtaaggaattgaatagaggaggatggagtttgtggggagtacatcttgacgagttttgtgttcagaggaactggttgtttagagaagttttcttttgcctagaggaactggttgtttgacctaatgttagcagtctcctagtccagcagtttctaaactttgctgcaaattggcatcaactgtgaggtctctaatgacgatggatgcttctgggtttcacccccagacattctgatttaataggtatggggtctgacctgggcatcgggatttttaaaggatcctatggtaggctgaataatggcctcccaaagaataatggtctcccacttcctaatcctggagcctgtaaatatgttaagttacatggcagagtgaagttacggaaaccgatggaactaaagttgttaatcagttgaccttaaaacaagggagatgcgcctggattatccaggtgagcacactgtaatcaagggtcttttaactgaggaagagggaggcagaagagtctatgtgaaagtaatgtgacttgagaaagacttgatcagccactgctagctttgaagaagaaagaggtctatgagtcaattaatgcaggtggcctttagaagctggggaaggcacgaaaatggattctccctcagagcctgtagggaagaaggtaacctgctaacaccttgactttagcacagtgagacgtgtgtcagaatcctgacctccagaactacatgatagtacatttgtgttgttttaagctgctaggtttgagatgatttgttaccgctacaacaagaaactaatatagctccctaggctattcgaatgtgtcacaagtttgggaaccactgttttaagcgttaagactgccctttgccaagttggtcttccacctggaaagaaagaatgatttactgcacaaacaagactatctccttacctgggacattacgcccactgaggg

SEQ ID NO: 8894 - DNA, 1162 bp, Artificial sequence
  DNA replication origin
atgggcccgcgccaatggcggccgccgtggcacgggctggaggcggggcggcaaggtccgcgggcaggaggaggggagaggcccaggccccagagccaggcgcaggctgcccgaggtgacaggactcgagggcccggcgcggggacagcggcacgggtgtgtcagccgaaatcggactgcaagacatagagcgttgacgctgaaataagattgcttttcactggcggggaagcgagctggaccgatcagcggttgcctattcaggttctggactctggtttttattatttatgaagaggtgaccgaaagccttgggcacgggggaaaaagctggagggtgacaattgagggagagtgcgctagtcttctgctttactccccttcgtaggactgtaggaagcgcggcgccggcccgcggcgctgcgcggtgggagaggcggggaaggaggtacgcggcagccgccggcgctcttctggagaggtggggatcgaagaccggcacggggctgcggaagaaaggcgggcctgggggaggctggagggtggacccggggggagcatagcaagaagagtctgagcaccagatcttaaaatcttgtaatctgaaagacactctgtggcctatacccagtaacggattttttaaaagtttgtcctcttccacttttccctagcgccgaatcccagagcttcctccccctccccaaggtcactagtgctttcatacttgccctagacctgatctgatccacagctaatcttttgcagaaaacctcagaaaggtgacttcatgtgtctgccccccttaaatgtaaaatgcagaacactggcacggtactgctttaatccaaaggaataactctcccagtggaagaatttctataacctggcatttgaagcaggaaggccctttgaggatagattcttaccaaggacattcaaatcacctcaggtctgcaatcgctcgtcctgagaacctaacagactgaccaagtagaaaagaaagtttcaaggagtggtgtatcctggggatgagacgttgttggctgactgacagtgttgagccctccgtgaaataatgcaaattgtccagtacactgagacaagaaagctaaaaaagcagaatctaagttatcaggtcatctaagaaaaaatccaaacc

SEQ ID NO: 8895 - DNA, 752 bp, Artificial sequence
  DNA replication origin
cctccggtcagagagccccgcgccgggaaaggcgagacaagccttcaaaatgggagcgcctcccgcccgcgctcggccgccctcccgccctgccgcccgggaggaattgcgacgcagaaagtcaaaaggaggatagtccctatgctcgccccctgcccctatttaaattctggggttccagggacctccgtgcagtgaggggcgcggacgctttcaattgaaatgggagctggcgaggccctggcattttggggaacctcagcggccgcgaggagtttgcgccgaggacgcggtgcacggcgtccgcgatgacagcgccggcagggctgcggggcccggcaccacccacttcgcggaggccgggccggctcgcctctcccgggtccgcctcctgggcggggccgggggcgagggtgtgtgcggacacgtgtgtacgggtgtgtgtgtgtgtgtacgccgacacgtcggtgcggaccgacgcgggggtgtcaggagctgggacggccgggggcaggtgagacttgagtcatttgtgaatgtgtggagtgggcaaaccagggcaaccagaccgagaggagcatgtgtaacctgaaacaggtgagcctatggagacagtacctaatgcgactgtgcacggaatatgtgtatgcagcatgagctccagggaataagtatttgaactttgctgttggtctgtcactgtttctggctgctttctgattgcattttacatcagctttcaaatgagctca

SEQ ID NO: 8896 - DNA, 1988 bp, Artificial sequence
  DNA replication origin
tttaagcaagttaagttagtcaaatgaatttaaccaaaatgtgggattttttttttaaagtctgtcacaacatccatactataggggtcaaaaggcctgttttctgcccctgcatctgccaattaagtgatacatgcagtaagatgatttcactgtatttgcttctaagtttactatctgtaaaatgagaaacatcattcctaatctcaaggcagctgtagccatcaaaagagatgatatatgggagtgagaaagaaggcagagaagatggtgagccagtaagaagatggtgagcagggtaaagaagacggttgggggaaggtggtgaagaccgtgggggaaggtggggaagaagacagatcgtggggaagaagatggtgggcagggtggggaagaagagggtggggctgcgtgggtgggtggggaggaagagggtggggctgggtgggtgggtggggaagaagaaggcggggctgggggtgggtgggaagagggtggggctagggggtggggaagaagagggtgaagagggtgaggaagaagagggtgaggagcgtgaggaagaagagggtgaagagggtgaggaagaagagggtgaggagcgtgaggaagaagagggtgaagagggtgaggaagaagagggtgaggagcgtgaggaagaagagggtgaagagggtgaggaagaagagggtgaggagcgtgaggaagaagagggtgaagagggtgaggaagaagagggtgaggagcgtgaggaaaaagttcggtggggggaaggtgaggaagaaggcagtgggtgaggaagaagggggtgaggagggtgaggaaggtggggaagaagagggtaaggagggtggggaagaagagggtgaggaaggtggggaaaaggacagtgcggcggggggaaggtgaggaaggaggcagtgagtggggaagaaggcggggaagaagatgggcagaaggtggggcataagtcagtgcgggggaggggcaggagggagggagaagatgtggtgtggaaaggtgtgaaaacagatagtggggaaggcagggaagcagacggtgttgggggaaggcagggaagacgaatgtgagcggggtgggatagatggcacatgctttaaccaagataagagggggccttggccctgggccccatgctttagaaagacttgctttttttcagccctcctcaagctttagtccttcccacaggccaaagattctgtaggatcttctagaacacacaccaggacaccgggagctctgagatttcctacccaaatggctccaaaactgcttccaggggagtcctgctgagagacgaccttgccaccaagatatatgccgctaggtgtgtgggatggccaagggggtgttgggtggacacataggtacagagcttggatatgcaagctgccctatccacacacatgcaccccaggtccccaaaggggtggaatggagccagcttgcccgttcctccactgcatggagaggaatgcggaggaatctaagaggtgatcaaacgccagctatggagagagatgcagaggaaagcgaagacatatgcactggcatttgtagaagggcctggatgggggtgaggagcacacggaaaatggtctgaggccatctatgcagttcctgaagaagcacctcgggcagctactgacactcccagcccagctctacaggggtgggtacatgggtgggctgggaacagggtgtctgtccaacaggcgggtgttgagggcccagaagatgtcagggtagcaacaggaggaatctggtgcagtatgagcacacggccgtcagctgatagtgggaagccagtcaagtgccgcgaaagcaggaggcggggccgcggccaacgtcattcccgcggccgcacgtcaccgccacttgccgcatccgcaagatctctctggaccagctcgggtgcagggcctctgcgggagccctcctagacctctgcggcttctcctcta

SEQ ID NO: 8897 - DNA, 993 bp, Artificial sequence
  DNA replication origin
agcggcgagggacgagcggagagggacgagcgtcgccgccggagccggaaggcgggggattagagagcacgcgcgcgcccccgcagaacgttgtgccggcgagggggcggggcctgcgcgggtgagcgcacgcggcccgggggaggggactccggcgagcgggcgggaggggcgggggcccggcaggggtgcgtctctaggcgctgcgtgggttccactcaccgcctggccgtttcggggccgcagtgcctccctggccggcagggggaggcacacgctcgccttgtcctggcgcttttcccagtggcccggctctgccgacgaggctcttttctccctagggggaaattttaaaatctcacccccccagtgctggggggaaagcggaggatcctcgcgtgccgggagcgggctgcgaatggggcagggcgagcgcacgtggggcgtgtttacaaacagcagccgcgccgccttgcggaggcggtccaggtgtcggagcccagagtcagcgcgcgtggaaagtgctagcccgagcgaggatcatgaggcacggtaggagccggcggacgtgggttccgggcaggagctggggcgttcgctcggcaacacccagccggacaagcccagggtgccgaggcgcggcgggctgcggtagagccgagtgtcgggtcagcgctccccggtgctgatgctccgaaactcgtcacagtcgctgtagagacggaccctttgcaaaatcgacagcacctgggagacccttgagccagtgggaggcgtcgtggtaaatttcctgccgtgcctcgacgcccggggcttctcaagtggaatcggggaattgcgctttgactgatactccctttatttgtttccaacggagacatctgcggaagggtcaccgccttcctggaggagagagtggtgcacctccaccttgcaccacctgtttcctgggaaacgcggtcaggctgccttcctttccgtcttgtgtgtgcg

SEQ ID NO: 8898 - DNA, 1098 bp, Artificial sequence
  DNA replication origin
atttaatgttgggagcagattgggtaataaaatgtattttgagaataagacggccttttgaccttttagggtctagggctgtaaagtgtctcagggttgctgccaaacaagtcatgaactgggctggatttttatatttgatgaaaaagaacctaaacgctatctgatttgggataaggaaaaaggagcattaaccttgactatgcctttagctccagccacctttttaagagtaaattgctgggcaggagggggagggctagtcatggaaggaaactgtaagccggaccaggtgtgaggaggggaggcgataaaaggattatagggtggaggagcggaggctgaggaagaattgggacctagctcggtctggcgaggagcagcctggggaggaggggagaggtcagatgggtctgtagaaaaggaagattagaaagactcagtgactcttggggttgggactgaggggacaggcggaagggaaagaaggaagatttgggacgagttgcattgggcacagagactaggaagggaccgatgtgtaaaagaatgcctggatgtcaggcacctcagaccatttgcccattttacgacaagaattatttagatcttgtgggatggagaaattgaaagtgccgttttccggctatttggaactactgtccagtttgtattggggtcaagcatcattgcagaagaaaataagatgcttagattttaggtcaggtgagagttgaagaggttttaagttcttaaggacacaggctaagggagaagaaggaggaatggaaggtggaagcttgcccatagtgaaggaggcaagcccagagaaaagagtagagacacggagaggggatggggggttcttgccctccagaaaagcagagaaggggtcagggcacagagatacgaggtcggggtgtggaaataagggatcggggtgcagagatttaagaggtcagggcacggaaataagggatgggcacagagatatgaggttggggtacttgcccctcctctagaaaagtgggacttgccactcagggtgaaggagaagaggttgggggtttcttgccccccagaaaggtggagaagggg

SEQ ID NO: 8899 - DNA, 1083 bp, Artificial sequence
  DNA replication origin
cacggagccctcaaggtagtaacgcccctggtgcctcagcgctcagcgggtcgcgcgtcgcgtcgccgctttgcggggccggccgcaggcggacgcggggatgaccgctcggcaggtgaccgcgccgtgtcggggccgcctgcgagcagcgcgcgcccaggcccggcgtgctcggcgcagagacctggccttgcgggcggggtgggaaggaggcgggcgggctcgctcaccaccggcccgcgactcccagtgcgccgcgtggccatttcctccacgctgctgcgtggtttgctgcctgcggccgcggcggccgctccagggcgatgcggagcgctggccaaggcggcgagagttggcgcaggcttcgggtcgctccccttcctcgccactcgcgtcccgcaggtagaggcgaccggtcagcgctggcgccccgggctgcgggtgctgaggcggggacggcggcgaagagggggaaggggaggagggggcggggagccaggggctcccggaggaaccgcagtgcggggccgggaccacctcttgcctccgcctgcttgtcctctggcgccagtttcctggattggaagcaagaccctgcccagaggcagcagtaacggcagcgacttagattgaaccacttgctttgtggtggagcgtcaagggccccaggttgtgtgcgtgtgtgtgtgtgtgtgtgtgtgcgcgcgcgcgcgcgctctggactaaccagtgggttggttcacctgagcagaaagtcagccgtaagctgaaaccgcatgtggccccctggccccttcgacttttggcttgtgtcccagggactcgtacacacggtgccagcaaggggtaagggtgacggagggatttgtgaatggtgcttctgcgtgcgtggaggctgagccttgctgatgtaaaggaggaggtatccagagtgagaagaaaggctatttatggcaaagagttgtgaaatttcttggggtttccttttagtgtatcctgaactgctctctttctctctctctctctctcctctccctgcctcagaattagaagcaattatgcttccccttcctctcgtgggac

SEQ ID NO: 8900 - DNA, 1200 bp, Artificial sequence
  DNA replication origin
gggataaagaaaaaggagcattaaccttgactatgcctttggctccagccacctttttaagagtaaattgctgggcaggtgggggagggctagtcacggaacgaaactgtaagccggaccaggtgtgaggaggggaggtgataaaaagattatagggtggaggagcggaggctgaggaagaattaggacctaactcggcctgttgaggaacagcctggggaggaagggagaggtcagatgggtctgtagaaaaggaagattagaaagactcagtgaggctcggagttggtactggggggacaggcgggagggaaagaaggaagatttgggacgagttgcactgggcacagagactaggaaggggctgatgtgtaaaagaatgcctggacataaggcacctcagaccatttgcctattttacgacaagaattatttagattttgcaggatggaaaaattcaaagtgccattttctggctatttggaactactgttgagtttgtattggggtcaggcagcattgcagaagaaaataaggcatttaggttttaggtcaggtgtgagttgaagaggttttaagtttttgagaacacaagccaagggagtagaaggaggaatggagggtggaagcttgcccatagtgaaggaagcaagcctagagaaaagagagagtagagaaacggagggaaggggttcgggggttcttaccttccagaaaagtgggaaaaggggttggggcacagagataagaggttggggtgcagaaataagggattggggtgcagaaatatgaggttggggtgcagaaataagggactggggcacagagatatgaggttggggcatggaaataagggattgggatacagagataagaggtcagggtgcggaaataagggattggggcacagagataagaggttggggtgcagaaataagggattgggacacagagataagaggttggggcgtggaaataagggattgggggttcttgccctgtagaaaagcaggacttgctgctaacagtgaaggagaaggggttgaggggtacttgttcctgccccagaaaagtgggacttgccgctaagggtgaaggagaaggggttgaggtgtacttgcccctctcccagaaaagcagaggaggggtagagacaaggagagaagcggttggggtacttgccacttccccagaaaagca

SEQ ID NO: 8901 - DNA, 1494 bp, Artificial sequence
  DNA replication origin
ggccttttgaccttttagggtctagggctgtaaagcgtctcagggttgctgccaaacgagccatgaactgggctgggtttttatatttgatgaaaaagagcctaaatgctatctgatttgggataaagaaaaaggagcattaaccttgactatgcctttagctctagccacctttttaagagtaaattgctgggcaggagggggagggctagtcacagaacgaaactgtaagccagaccaggtgtgaggaggggaggtgataaaaggattatagggtggaggagcggaggctgaggaagaattgggacctagctcggcctggcgaggagcagcctggggaggaagggagaggtcagatgggtctgtagaaaaggaagattagaaagactcagcgacgcttggtgttggtactggggggacaggcaggagggaaagaaggaagatttgggacaagttgcactgggcacagagactaggaagggactgatgtgtaaaagaatgcctggacgtcaggcacctcagaccgtttgcctattttacgacaagaattatttagatcttgcaggatggaaaaattcaaagtgccattttctggctatttggaactactgttgagtttgtattggggtcaggcggcattgcagaagaaaataaggcatttaggttttaggtcaggtgtgagttgaagaggttttaagtttttgagaacacaggccaagggagtagaaggaggaatggagggcggaaggttgcccatagtgaaggaaggaagcctagagaaaagagagagtagagaaacggagggaagggatttgggggttcttatcttccagaaaagtgggaaaagtggttggggtgcagaaataagggattggggcacagagatataaaaggttggggcacagaaataaggggttggggtgcagagatatgaggttggggctcagaaataagggattgggacacagagataagaggtcggggtgcagaaataagggattagggcagagagataagaggtcggggtgtggaaataagggattggggcacagagaaaagaggttggggtgcagaaataagggattggggcacagagataagaggttggggtgcagaaataagggattggggcacagagaaaagaggttggggtgcagaaataagggattggggcacagagataagaggttggggtgcagaaataagggattggggcacagagaaaagaggttggggtgcagaaataagggattggggcacagagataagaggttggggtgcagaaataagggattggggcacagagaaaagaggttggggtgcagaaataagggattggggcacagagataagaggttggggcgtggaaataagggattgggggttcttgccccgtagaaaagcgggacttgccgctaagggtgcaggagaaggggttgaggaatagttgcccctctcccaaaaaagcagagaaggggtagagacaaggagaga

SEQ ID NO: 8902 - DNA, 756 bp, Artificial sequence
  DNA replication origin
ttgcaggaggctggaggcggcggtggctgttcccctccgctgggcgtttgtagcagctcggacaaggcgttgatgtagatttgggccatctgcagggtctcatatttggacagcttcttgtcgttgttgaacgacgggataacattgcgcagctggtcgaaggcgtggttcagcccatgcatcctgcgccgctccctggcgttggctgctagccgtctctgcttctgcaccccattcacctgtttgctggaaggggcccgttggcggctgcagcccagctcgtctaccaccaccccgcctttcagcttgcacagctgttcccgcactttcaccggcccggggctcttgctgctgctggcaccgccgctgctcctccttaccagctccccccggccgtccacctcgtcccggggcgcagcggcctctgaggcacccagctccggggaatgtagcaaatactgggcggcgcgtgccgtgcagatgccctgcaaagtgggagccagccaggcgcgtgggtcggtgctgtccaggagggacagctcaggcgggtagacgggatgctctctcgcctgcaaagttgcaggtggctgcggcggcggcggcggttgcgggagatgatgcggctggggctggcgatggtggtctcccaactccttcacttcagcccactcttctgcatgcagcaggcgggacattgcactgcaaaggctcggaggctcaggatcggaggcagcactgggacaccagctcaaccaa

SEQ ID NO: 8903 - DNA, 1015 bp, Artificial sequence
  DNA replication origin
agccgccattgtcatcctggcccgttctcaatgagctgttgggcacacctcccagacggggtggtggccgggcagaggggctcctcacttcccagtaggggtggccgggcagaggcgcccctcacctcccgggcggggcggctggctgggcggggggctgacccccccacctccctcccggacggggtggctgccgggcggagacgctcctcacttcccagacggggcggctgccaggcggagaggctcctcacttctcagacggggcggctgccgggcggagaggctcctcacttctcagacggggcggctgccgggcggaggggctcctcacttctcagacggggcggctgccgggcagagggtctcctcacttctcagacggggcagccgggcagagatgctcctcacttcccagacggggtcgcggctgggcagaggtgctcctcacatcccagacggggcggcggggcagaggcgctccccacatctcagacgatgggcggccgggcagagacgctcctcacttcctagatgtgatggcggccaggaagaggtgctactcacttcctaggtgggatggcggccgggtggagacgctcctcactttccagactgggcagccaggcagaggggctcctcacatcccagacgatgggcggccaggcagagacgctcctcacttcccagacggggtggcagccgggcagaggctgcaatctcagcactttgggaggccaaggcaggcggctgggaggtggaggttgtagcgagccgagatcatgccactgcactccagcctgggcaccattgagcactgagtgaacgagactccgtatgcaatcccggcacctcgggaggccgaggctggcggatcacttgcggttaggggctggagactggcctggccaacacagcgaaaccccgtctccaccaaaaccagtcaggtgtggcggcacgagcctgcaattgcaggcactcggcaggctgagtcaggagaatcaggcagggaggt

SEQ ID NO: 8904 - DNA, 944 bp, Artificial sequence
  DNA replication origin
cctctgccccgccgccccgtctgggatgtgaggagcacctctgcccagccgcgaccccgtctgggaagtgaggagcatctctgcccggctgccccgtctgagaagtgaggagaccctctgcccggcagccgccccgtctgagaagtgaggagcccctccgcccggcagccgccccgtctgagaagtgaggagcctctccgcccggcagccgccccgtctgagaagtgaggagcctctccgcctggcagccgccccgtctgggaagtgaggagcgtctccgcccggcagccaccccgtccgggagggaggtgggggggtcagccccccgcccagccagccgccccgcccgggaggtgaggggcgcctctgcccggccacccctactgggaagtgaggagcccctctgcccggccaccaccccgtctgggaggtgtgcccaacagctcattgagaacgggccaggatgacaatggcggctttgtggaatagaaaggcgggaaatgtggggaaaagattgagaaatcggatggttgccgtgtctgtgtagaaagaagtagacatgggagacttttcattttgttctgtactaagaaaacttcttctgcaaaaaaaaaaaaaaaagaaagaaagaaagaacctggagtctgatgtccaagggaggaggagcaggaagaagcatccagcaggtaaagttatcccaccttcttcctcctgctttgtctttgctgtgctggcagctgattgcatggtgtccacccacactgaggacaggtcttcctctcccagcccactgactcaaatgtcaatctcctctggcaacatccacacagacacacccaagaacaatactttaccagccatctgggcaccccttcatccaatcaagttgacaaataatattaaccatcacagtactgtttctttcagagccagtattcatgcgt

SEQ ID NO: 8905 - DNA, 1322 bp, Artificial sequence
  DNA replication origin
aaagactcagtgacgcttggggttgtgactgaggggacaggcgagagggaaagaaggaagattagggatgagttgcactgggaacagagactagggagggactgatgtgtaaaagaatgcctggatgtcaggcaccttagaccgtttgcccattttacgacaagaattatttagatcttgtaggatggaaaaattgaaagtgctgctttctggctatttggaaccactgtggagtttgtattggggtcaagcagcattgcagaagaaaataaggcatttaggttttaggtcaggtgtgagttgaagaggttttaggtttttaagaacacaggctaagggagaagaagggagaatggagggagaatggagggcagaagcttacccgtagtgaaggaggcaagcccagagaaaagagagagtagagacatggagagaagggcttgggggttcttgccccccagaaaagtggtgaaggggttggggtgtggaaataaggggttggtgcacagagataagaggtcaggacatggaaataagggatcggggcacagagataagaggttggggcatggaaataagggatcagggtgcagagataagaggttggggtgtggaaataagggatcggggtgcagagataaggggttggggcatggaaataagggattggggcacagagataagggatcagggcatggaaataagggatcggggcacagagataaggggtcagggtgcggaaataagggatcagtgggttcttgtcccccagaaaagcagagaaggggtagagacagggagagaaggggtcagggttcttgtccctcccccagaaaagcaggacttgccgctagctaagagtgaaggaccaaggcaggcatccctacgtggtcagacacctctgaaacatgggtgaataatcagagaggcatccctgcaatgattaaacaccaagggaaggctgccttcccgagtccatgactggcgccgaagttttgggtccacggataaaacgtgtctcctttgtctctaccagaaaataaaaggaattgaaattaagagaagggagagattgaagggtagtgccaagattgaaaggagaaagtggttgagggatagtgagagaggttggagaagagagtaaagagaggctgcttacccgatttaaaattgttgagatgttccttgggctggtgggtctgagtacctgaggtcctaagtggatctttctcacggagcaaagagcaggaggacaggggattgatctcccaagggaggacccccaatccaagtcacggcaccaaatttcatgcgtgtctgtg

SEQ ID NO: 8906 - DNA, 1188 bp, Artificial sequence
  DNA replication origin
ctcaccgcgagtcacttgtcagcccttgtctgaggcggaggcagccccgcgccgcgccggacccgaggtgagtggcggccggccggcgatgcgcctctcggatctccggtgggagaagggaaagaaccggccgctgtgcgccgaacgcgagaagggaagcccggttggggacgaggagggggcgctcctcgggcagggatggctcctcaggtgctttctgggcgcggagcggcggaggtgggagagcagcttgggaaaaggagcgcccggaaaagggcagcgctggagtccgcatgaggccagagggcgagccctggggtccccgcagcccgggccgaccgggaccagcgtagcggagacggggacgcgggagggcgcccggaggtggcgagggccggcagggacgggcactgccgctcccacccacccggctgccggcgtcgcccggcaccaccgtggtgtggtgtctgagtgcccagtcctgcgccagtctcttggagggtaggaagcgggactcaaaggaaaaggcgcgttagtttttctttgctcccaggctactgagaagcatttatttctcccccagatatttacagttttgtgtaacctgtttggggaaaacttctgcgcgtccagaaataaagctcgtttaagaaacacatttgtcatgaacacgagatttgttaacacttgagtacttgttggggcttttgtaagactgtgccttcggtgcgttttacaataagtggaaaaaggaagggcgtgtggacagggcagagcttggaaggaaaattcgtggcggcgctgggcagggcagatttagggtgtgatcgccagatcctatcccaagtccgccttcctgacggggaggacgtctgaacccgcctgccacggaaacggcccgttcggtagccttatttggccaacaaggctaggcgcgaatccctcctggaaaactgtcctgtcggctgctttcatcctgtgcctgtggctttagttcttcagctctacctacattctctctccattgcggggaaagagaatctcaagatatttctctttaatttcaggcctttttttttgtcactctgtgtagttcatcttgagttctcctttctcccctctcacccactaatgaagctgagatacaagtgtgggaaataccaagcttccttccctagtactagagca

SEQ ID NO: 8907 - DNA, 1029 bp, Artificial sequence
  DNA replication origin
ggccgagttcccgagcgcgcgggaggcggccgagccggcgagagccgggcagagcgaggggcggcgcgggacgggtagcggctgggtgcggagctgggcggcggtcgccctaggcaggacggagcgcgcgagggagagggcgagagcgagggcgggctgcgcggccgtggggcggtggcggcggcggggagggggtcaggcggtggccgcctcggctttgtgcgcgggcggctctgccgggaccccgaggcctcgtgcctgcgcaggcgaggagtcggggcagcggcggcggcgggcgggacacgtgcttcgggctgtagggacgccccaaggcagggagtcggacctgcgagcggagggatggggcgggagggcgagctgagggcagtcgcggaatccgggaaatgggagggagcccggcggggcgggggcccagggccagcccaggcgggacccgcaggcacccacctgccccggacgcctcccgagacccagccttgccgtgggggaaagtgcgcagcgggctggtcccggcgccttggactgggctccgtctctgcttcagttgcctgtctcttctcctctctctcctgcttctctctctctatgcctctctctcaagttctgggtctttcattctctcccttttcttcctttctcccttcctctccttattgctatcctttgcctctccccccggtctctctttccttccgtgcgtctgtctccctctccccaccgcctgctctggctctcccagtgtgtccctcctctgtcccttcatcctcttccctctgtcactttcgcacaatcttttggtctctctctctctctcaagaggctttcgctcccggtcttcctggctcccctgtctcttgctctctgcgcccatctctctgctcgtccctctttctgtccaggctccgtgtttccgcctgtgtttggcggtgttggagaagagcctctggaagttgtccgctgtggtgcgggtcttacttctttagagctgcacccctccagctgggtcct

SEQ ID NO: 8908 - DNA, 2209 bp, Artificial sequence
  DNA replication origin
cttctgtgctgtcctctccatgtagcgatctcagcgactttccctcagtagctacctccacctgctcatgcttctgctgctgatgcctggcctcgtggcagcagtaaatccagccaatgcatggttctgtgtttctctcaaacatgaagactgcctggagaaataacatccagaaacaatataaagaaagaagctagcagagtgaaacacatcctggatttcatcgccttccagccttcccttcaagagagatttcagtgggttatatgagacttaactttaatcatttctttcatcctttctttagcctgtatggtttctaaaaagggaaagaaaagaaagacagaaaagtagttggagagagaacaagagagaggcagagagggagagaaagaagctatggatcatataatccacaaatagcataactgccccttgaaaaactggaaggcataacacatgccttgaggaagaaggtggtgcaattttggggcactggagtgagagaggggcaagttgttatgcagggcaagggtgagcagaggaagaggtgagcagagaagtagggtgagcaggggaggaagtgagcaggggaggagggtgaacagaggaggtgagcaggggaagaggtgagcagaagaggtgagcaggagaggagggtgagcaggggagaaggtgagcagggaaggaggtgagaaggtgaggaggtgagcaggggaagaggtaagcagaagaggcgaccaggagaggaagatgagcaggggaggaggtgagcaggggaggagaggtgagaaggggaagaggtgagaaggggaggaggtgaacagggaaggagatgagaaggggaggaggtgaacaggggaggaggtgagaaggggggaggaggtgggcagaagaggtgagcaggagaggaggatgagcaagggaggagtgagcaggggagaaggtgagcaggggaggaggtgagcaggggaggaggtgagaaggggaggaggtgagaagaggtgggcagaagaggtgagcaggaaaggagggtgaacaggggaggagggtgagcagaggagggcgagcaaaagaggtgagtagaggaggatatgagaaagggaggaggtgagcaggggaagaaggtgagcagaagaggtgagcatgggaggaggatgagcaggggaggaggggaggaagtgagcaggggaggaaggtgagcaaaggaggaggtgagcaggggaagagggtgagcagaggaagtgagcagaggaggaaggtgaacagaagaggtgagcaggagaggaggattagcaggggggaggggaggaggtgagcaggggaggaaggtgagcagaagaggtgagcaggggaggaggtgggcagggggaagggtgaacagaggaggggagaaagggaggagggtgagtggggaggaggtgagcatgggaggaggctgagcagaggagaaaggtgagcagaagaggtgagcaggggagaaggtgagaagggaggaaggtgggcagaagaggtgagcaggggaggagggtaagcagaggaggatgtgagaaagggaggaggtgagcagggaaggagggtaagcaggggaggaggtgattggggaggagagtgaacagaggaggcggcgaacagaggagcaggtgagcatgggagcaggagaggagtgcgagcagggaaggagggagagcaggggagaaaggtgaatagaggaggagggtgagcacaaagtggggttggtggggagggtgagcagagggtgtaggcaacaaagccagggtccggagcactagcccaccagatccgctgtgggaccctagcacctcacaatttttggcacaaaatcaccactgtgcagggctctgtaacccagcttcagcctggaccctgggggcagacttgtcatactctaatagatatacttcaaagcatccaagtatatgccactctgttgcctgggggctcccagtgagcaatagctgtaagcctgatacttaatggaaatttgcccaagcatggaaggaacaggcagagagacaacaagagaagcagatgaggcagatgaaatctaacccggacataatgcagagtgggaaactcgggggctggacagaccagagtggaggagtggcttggctcgcagatgtatcctccctcctgcctctctgtcaagccttaacgaggggagatcctctcatctaagagcctg

SEQ ID NO: 8909 - DNA, 833 bp, Artificial sequence
  DNA replication origin
ggtagcacgagcatttgcagcaagtatcccagtcccagtccgcagcgggccgctgtcgcccgcagacctttcctcatcgtagacagaggtgtgccggggggaggggagggggacagagagacgcgcaaacagctgaaagccccactgggcagaagctgaatccgtgcaccgcgaagcagtccgaagaaataacgacaaccaagcgccacactccactttctccaaaggcaggggccaaaagggggaggagaggagacgccgaggaggagtttgaaggtccctctttcccaatgccttctaactgacgtctcccgcgagcgactgctctgcccccacttgggaagtccagggaggcgcaaggcggccacctccgccgctccccccagcagcaggagcagccgcagctccgccgcacgccgaagtctggactgctctccgggtcccctcgcctgtgaggaacacacacagacaccgggggtgggggtgggggtgggggttgaagtggggggagttggaggaggagggaacggagggaggaagcttgggcaccgtcaggcgctctggtctccaatctcagtgttctcacgccggcggagagatgtcccggctgtcgctgctgggtggccaaggaggttcacatcctagagtagggcgcacgggtgcgcgaaggcgctcgccaaggaggcgtagagggcgcagcacaactcctctggggggtaaccgggggcgggagcacgcccgcccgccttatgtaagcaaggattgcagggagatcagcgcccaggagaccagctgtgggtttgcccgctgaagccgaggcgagacagaccagg

SEQ ID NO: 8910 - DNA, 1397 bp, Artificial sequence
  DNA replication origin
aggcgctctggtctccaatctcagtgttctcacgccggcggagagatgtcccggctgtcgctgctgggtggccaaggaggttcacatcctagagtagggcgcacgggtgcgcgaaggcgctcgccaaggaggcgtagagggcgcagcacaactcctctggggggtaaccgggggcgggagcacgcccgcccgccttatgtaagcaaggattgcagggagatcagcgcccaggagaccagctgtgggtttgcccgctgaagccgaggcgagacagaccaggggacgaagcggctgcggagagtggcagcgcgcctgcctcccgcggtgcgccagacctggacgccgggagtgcagcgggcgcgccccgggccactaggctgtgtccagtggagctcagcctgccgcctgccaccttcttcgccgcgccggcaaagcctcagccgaattccctaggactggactcggtctacgacttcgggtctcgcggttgacgaagccggtgcgggctcgaactgaagtccttcttggttggggaagaaggcatgaagcttttgcactgccccagccggctgctgtcctggggttgtcagcgccagtcagactgctttatgttctgagcgcgtatgacccctttgcagtggaacagaaactaaaagctcgacggaaactcattctgcaacagtgctttctttgcgtgcatgttggtggctgacaagggtggtgatgcgataccgagagaaactctcttagaaaaaaaaaatgcaaagcaaaatttgtagatactcaaagtgatggtggagcctataacatgtttttcaaatttctaatagtgtgtgtaagaactcgagctgctatgaatttgtttacctttctacaggaaataattgtctacgtagctgggttgtgaatccctgtggtcatgatggagggatgcaagattgggtgggtaaaataagactagacaaaaggaaagtgaatttattaaaaggtcaacacacagacacagacaacattttgggaaaaagaaaatcacttcccaagattagcatgtctttaaactaataatacatcagggaattttatgctcttggtgccaagggggccatgtgtaaacacgcatgcacacacacacgcaggaaacatgaggtctaattttggctgtggtcataactactctgttaccctgggtaagtcaggtaacctgtgaatgtctcagtttcttcatttgtgaaatattttgatagtttcaaagttctcttaagttctaacattctatgattctgcctgcacagccccatctaggcaataagacctatctcggatgaatcagggagatccgaaaaggtagtatttgccaaagacattgacaaaactggccacttcttatttctgtggag

SEQ ID NO: 8911 - DNA, 1578 bp, Artificial sequence
  DNA replication origin
atgcttcccaccctgcagcacgccgagaaagaaaaaaatgtcaggcgatgacggcggaggaaggatgacttacccatgttgctccccgagggtgaggaaccggcggggcgaggcgaaggtctgtggtgcgggcggcgcggctctgtgtcctccctctacctccgtctctcccgcagccagggagggacccgcggggggcggccgccggggaggagcagctggtgctgctgcaggcggcgcggccgcggcggggacgagcggcggggggcggggcggggcggggcggggcgggactggcgggcgcagcctgcggcgggcgcggctccgagcgggcgggcggcggaggcgcgggagccggcctgaagagctccggccccgactcgcagcccacgagcgccccgccctccccaccgagcatgctcagtgccttttccacccctccctctgtggcgagcgaggctaagcgtgcgggtgggcgtgtgtttgcagaccggctgcagccgcggcagaggatcttcatggcggccgcctgagaggcggagggcgggcccggagaaaacagggaatggggatattgagcccgatctgctagcagaggactcaccgctgccttgctttcccaccctgacccaccaacccctcacccggaacccgggcttgccttctttacgggacgaccgggccgcacaggccggaattaaccggagaagaggctgggccgccgcagagccgggaggggtggtgggaagccagagctgacgaagttggaaaggacgtgtaggcgactaggcctgcgcctcttggggacacctgaggacgcccgctgggcagctggctgaggaggggccgccgggagggcgctcgatagcaggcgtgtcattgggacacttaaggctgctctagctgtggccagcttagaaacaaaggtcccggcagcgaggagagcgcccgccccaggatttcctcgaagagtgtgtcgttctccctcccggaggagcgcggccttccgttccccggagggctctggaaaggccctttaaccggggtgccgtcgggctccatcctgctgtgaaagcgggaggaactacgttccccaggcttgaaaataagcgtcctgctgggttggctgcggcactgccaaagctaacccggcggaggtcctttgatcccggggccaccgcccgctcccaccaccacctcggcctcggggagaacctgagcagggctctcccactgagggcgtcctcccgactgggcatgcacgtgaggccggggctggcttcggtcctcttccctggggtaggaggctggaggaaaccgatttctctgcaccctaatcttgccctggctcctcctgagtggggtgaggaatctggtcgctctccaaggctacagcgaccggagtccttcaggggacactgtgcagtcagcagtacaacctgttggagaaagatggctgaatcgaggtgtctttcccctgtcaactttcactcggtcaatccaatgttgagaaagggctttttttgtttgtttgttaattagtcgcctattctcacagtcatcagtttctgcttggtg

SEQ ID NO: 8912 - DNA, 1112 bp, Artificial sequence
  DNA replication origin
ctttctacacagacacagtaacaatctgatctctctttcttttccccacatttcccccttttctattcgacaaaaccggtatcgtcatcatggcccgttctcaatgagctgttgggtacacctcccagacggggtggcggccgggcagaggggctcctcacttctcacacggggcggccgggcagaggcactcctcagttcccagatggggtcgcggccgggcagaggcactcctcacttcccagacggggtggcggctgggcagaggcgctcctcacctcccagacggggtggtggccgggtaaaggcgctcctcacctcccagacggggcggccggacagaggcgctcctcacatcccagacggggcggccgggcagaggcgctccccacatcccagacgatgggcggccgggcagagacgctcctcacttcctagacgggatgacggccgggaagaggcgctcctcacttcccagactgggtggctgggcagaggggctcctcacatcccagacgatgggcggccaggcagagacactcctcacttcctagatggggtggtggctgggaagaagcgctcctcacttcccagactgggtggccgggcagaggggctcctcacatcccagacgatgggcggccaggcagagatgctcctcacttcctagatgggctggcagctgggcagaggctgcaatctcagcactttgggaagccaaggcaggcggctgggaggtggaggttgtagcgagccgagatcacgccactgcactccagcctgggcaacattgagcactgagtgagcgagactccgtctgcaatcccagcacctcgggaggccaaggcgggcagatactcgaggtcaggagctggagaccagccccgccaacagggcaaaaccccgtctccaccaaaaaatacaaaaaccagtcaggcgtggcggcatgtgcctgcaatcccaggcactcggcaggctgaggcaggagaatcaggcagggaggttgcagtgagccgagatcacggcagtacagtccagcctcggcaacagagggagaccatggaaagcgggagacggagacgaaggagagggggagaccgtggaaagcggga

SEQ ID NO: 8913 - DNA, 1222 bp, Artificial sequence
  DNA replication origin
gcggcgggcggagctgcgggcggcgcgggcggaggagcagccggccgggcgggcggagcgagaggcgggcggagcgaggggtgggagggcgcgcgcgaacgggcgggcgagcaagcgagcggcgtctccaccagcatctgccgcggccgcctttgcccgaagcccggggacgaaccgacggaccgaccgcctggcgcacggacgcgggcgctcgctttgtgttcggggctagcgtcggcgaggcttgagcttgcagcgcgcggcttccctgctttctcgcggccaccccggctccggcggcctcggcgcgcgaggggctggaggtgcgggagccgctctccgccggtcggtccccgcgcggctgagcccaggccgccagcgccgcggccccgtgcggtgtccctgagctcctgctccccgccgggctgctccgagcaacggtgcttcggagctccaaactcgggctgccggggcaagtgtcttcatgaacccagaggatgtccgggaagcactacaagggtcctgaagtcagttgttgcatcaaatacttcatatttggcttcaatgtcatattttgggtaagttggagcgctcctgggattccaactattgtggccgatcgattcgcgacgatttcccccacgttgttcgttgcctttacttttcgcagccccgcaggcgcttgccggagcagcatagaggcattcgccttccgcctttccagcttgcgcgttggagagataaacatttaatcctttcgaggaatgggaagaggtgaaaagagaaatcgaggcggaaagggggcaccgaggccttctggtggctttttgaggaacgaatagcagggatgcagataaaagaaagggttcggcagtttgagaaatgagcaaccacacgaattggatttgctctcggtgggatatagatgttgggcagagcgtggtgtcataatagggaaggctaatcgggcacggccgaccctgaggtccaccttctaacaacgatctgattggacgagggcttggctccgtgttgccgcggctggtctgtgccatgctcagcgtgtatcttcttgcaccatctcgggctttgtgtaggatgcagatgccgtggtatatggtcctgtaattgcacgtaaataacgtttcctgcacgctctcctcttcagctggaaagcgctccctgtgcgtaatggactggtcagtgggggtgcggggtagag

SEQ ID NO: 8914 - DNA, 1310 bp, Artificial sequence
  DNA replication origin
agcagggaagccgcgcgctgcaagctcaagcctcgccgacgctagccccgaacacaaagcgagcgcccgcgtccgtgcgccaggcggtcggtccgtcggttcgtccccgggcttcgggcaaaggcggccgcggcagatgctggtggagacgccgctcgcttgctcgcccgcccgttcgcgcgcgccctcccacccctcgctccgcccgcctctcgctccgcccgcccggccggctgctcctccgcccgcgccgcccgcagctccgcccgccgcccaagccttggctaggcgcgcgcgcgcacggggtcgggcgctcccgggcggcggtggcaccacgtagccgcctccttccaccgctcgctttatccccgccccttctcgggccaaccccaagcgccgctgaccccgaacgtcgctgcggggtaggtagggggtgggagggtggaggaccgcaggcgagagggagaaggaagggcgcccggggagcaggctggcagagtgaccgggattgatgagcggcgcagctctggagggacgcgggcgagagggtcgctcctcggggagagggctgggtgagtgaggacctgcgagccacccccgacaccccttccagggtagccacactggcgccccctcctccacaacaggcttatgtggctagagaagatgcgatgccactggacagggaaggaaagtcgtcgtggacttcgctgaatggaaaagggggtagttggggaaggtggagaaaagagccacgggaagtgggaggaaaggatgaagggatgggacgttgaaaaggaaagcttcctgaatccctgtgtgactctaacccaacctccccacctaccggagaaatgggttttatcctagaaatggggacgaggaaaaagagatggctcaagggagtcctggcccgggatgcgatcctcgccctagggtctattgcaaccacacaaacccggacagcgcacgctcccccctaccccgacagaatagtgcctaagaaacctgcttgcctcctaactctaggaaggaatccacaacggattccagggaggtcttctggggaatctgaattgggtttttggatcacgaaccattaagcttttgaactctggggaagaatagaacaggtggctggaaattgttttagaaccctacctgagcaggtgtgctcattagttgcttatccgccctcctcctggagcactttcataggtgttggcaaagcaggtaccagtatttcacggaaggagaaggaagaaccgcccaggactgtgtataaatgtctatgggaatatttttaagga

SEQ ID NO: 8915 - DNA, 1177 bp, Artificial sequence
  DNA replication origin
gcaaatttcaggatagcaggataatcattactttttggaggagggaagacaatttgatcatgtagggatacgctaggagctgaagccattggttttattctgtttcttaagttgggtgacacaggcattcatttcattattatttatactatttagatatattaaacttatctgtgtgtgtctctgtgtccaaatttcccccttttgtaaggacacctgtcatactgtagggcccatgctaataaccttattttaatttaactgcctctgtaaagaccctatctccaaataaggtcatattccgatgtgagatactaggtgttagaatttcaacctagctttcttgggaagatacagttcaactcaaaacagatggtgagtttatttccaacatctttagcttgagatttctttgagacatttaaggaggcagtttgatttattaatctggaatttagaggagaggtgtgagcactaggggtgtaaagttgacagtaatgagggttcaggtgatcattgaggccatcaaactaggtgaggtcatttaagaacggagcattgggtaagaagagatgcctgagacctggacatttatgagagggatgagcccaccactgacactgagaaggagaagccaaggaagcaggagaatgcagtgggacataagccaagaaggggtctgtttccagaaggaaggagcagtcagttgtgtaatatgcaactaaggtcagtgagatgaagattgaaagcagcttctgaatgactttaggggagctgttgggtgggggggataaagttgaagccaggtgagggtaggtggggtagtgagtgggagacaaggaagtggctgagagcctgtggactgctcttgaaagggctggctatggaaggggaagaggcacaatgtgcgggctggaggtccaggttgggggatggggtggtcgtatttggtttgtgtctaagatgggagaggttagatcatgtttaaatgttgatagaaacgatatagagggccgggtacggtggctcacgcctgtaatcccagcactttgggaggccgaggtgggtggatcgcctgaggtcaggagttcgagaccagtctggccaacatagtgaaaccttgtctctactaaaaatacaaaaaattaactgggcatggtggcgggcacctgtaatc

SEQ ID NO: 8916 - DNA, 1025 bp, Artificial sequence
  DNA replication origin
gccgctcctaagccatttccactgggataccgacctgaccagcccctgccccccactctccggctctcccacccccccaccccgttccgactgtcccagaagcagcaaagaaagctgcttcccaactgaagagccgagacaaagcttccttctctttctgcccctctgagccgctcgctgggggcccagtttcagaaccaagagccagatcccgtcttgggcgccgagcctcgcgcgcccccgaggatagcagcctagtcccatgccatgcactccctcccttggactcagggccctccgctcaacgggccctacctcgttcgccatgttcacggattctggtcggcgcggggggctgacatccggggtgggccgcgcagcgacggaggcatgggcgtggcgagcgcctagcgaggggggcggggcgtggggggggcttgcaatggctccaaccggaagggcggtgctcgagctgtggtgcgtgccgctaagttgtgcgttccagggtgcactcgccggcgaggctgcacggcgccggtttcattgctaaaatccgacggacttgttgcagaactcgttttttttgtcgggaaagggcttccccgtgtaactttacagcagttatcgtagataagacttgcaaattacagatgtggacggtgagggaacgggaatttcactgaaagcgcctgagaaccagtaagagacctgcaacagctttgtgctccactggcgaatgcttcctcccctaatacacattatgtgtgcttggagacacaaggagtaagatacagcccctcaagggactcgtcatagggagaggacacagctttgggaataaaggggccacaaaggaggagagaggagtttgctgaaacttcccaagctcccattccagcagttcctgaagggtaggtaggattttggggagacagtagaacgtgggcagagaactttggaaggaggagatgaggagaacaaaaagtctcctgatcctggacagttttttgtgttaagagtgggcc

SEQ ID NO: 8917 - DNA, 958 bp, Artificial sequence
  DNA replication origin
tgggtagagcttctcggccttctgcaggaagcgctgggccttctcgcggttgccggcgttcagggcctcccgggcgatctcgacacatttctcagcctcatccctgttcccctccatagcttgctccttcttccgtttcctccggcagcgcagctaagaagggcggaagccgccgccgcggaggaggcgaggcgggaccggctgggggcgtgcggcggcagcggggaggagcgcaggggaccgcggcagcggctgcgacggcccgggcggacgggcgggcctcgcagctccgcctcctcacggcggcctccccgccccccgcgggcccctagggcgcgatccgcatccgtcccggcccaggaccaacctcctgggccggggcgtccgagctgactcggtggtccgcgcacggcgccagcaggctcgaagcggacctgcccgggaggcggacgatagcagccgggctgcccatcgcggggaggggttccgcccgggacccgattgccggcattggtagcgccgtgccctgtgacctccaggcgaggccctcgcagctcaggccaggaggacagggtccgggaaggggacactcgttttcagtaaaattgccaggacttggaggttccgcctctgggcccctcaagcgagggaggatgcggtcaggtgaggaccaaggtgtcagtccagtctcagcacttccgggacacgttagagcgtcgtttgaacctaatcttagggcttgtatggcagccttatttcagctacattttttctgacccggatgtctggctatccaaagtacaaagcagtttaatttgtagcttgcaacgagtggtgcagatcgaccttaatcctgtgtagccaaaacaaggcaggaatcagcccctcaggggctgccctaacgaaagcaaacttttgatttcaccttttccgtcccatttggataacattaccactt

SEQ ID NO: 8918 - DNA, 1177 bp, Artificial sequence
  DNA replication origin
tggggcatttttattgacgggggcgtcagttggcaaatggctgagccgcggggaggtggcggcgggggtggcggtggtgggagggggcgcccggggggtggttgctggtagggtgtagctgctgtgacagaaataggaagtgggtggctctgctcacaggcttgcatgggatcgggtttatggttttcttctgcagagggaggggtgattgatggctttttaaaaattaatacggcatttttatgtggccgtggctttccaccgactgcctcacttgggcagggttgtcttggagctccattgcagcaattccctccgcgcccccctccccctccccctccccctggaagggcctgcacaggactcgcgagagagcgggagagcgtggggggagcccggcgcttccttccgcgcggggcgggggcgggggcggtcgctggctggagggtggccgcggggggcgcgggaggcggggaacgacctgagagcaccagccgttgccgccccgggatttcccccgcacgccccggggagagacacgaaaaccacttctccagcctctcttgccatccccggctgtcccccgccgacctgtcattgctcttaaagggttctccactcgtgcacacctcccaagtgataacctcattccgcctgcttcctccgtgccctggcatcctttttgtaacgggctgttggattcctattattgcctcctcttcgccgcctacgggatgataaactcctggcaaggatgcactgaggttgctggcaaagagaaactgggatgtgcggagtgaggaaggggacaggctgtggttgatcactctgtcgcacgggaatctatcggcctccttgtattcctaggtgtagtgggggaggaaccatcctatgaatcctggaaggctgaggcaacagagcagaaccacttggattaagtagtatctcacattcctgggggtcaggacaccaagcaaagcagagatgggcatgagctgtgcggggagcgggcctctgaaattggaaacagcactggctggtgtaatgtgtgtgtgttgtgtgtagaacagagatggtatctaatgtggccagagcatgcaactagagtgcaaggcaatcaagtcgtttgcaccatgagcacttaaaagtgaagtaacccagcagcccaaagaccatg

SEQ ID NO: 8919 - DNA, 873 bp, Artificial sequence
  DNA replication origin
gaagaaaacagagcaaggggcggggacaatgaggaggagcgggaggcgggacaagcggggaggccgccacctggcactgagtgatgcgccctctagccaatgaacgcgaggaactccggcgtcggggcgggaggtcgggggcgggctcagtggggaggaggaggctgcaggcgcgcaagaggcgggggccgggaggaggaaggggaggaggcggaggcgggcgcggtgttggcggcggcggcggcggcggaggggggtaggttgtgcccgggactgtgtctgccgagctcggcggctgtgccttggtgagtggaggagcggcgcggggaggcagaggcgagcgcgggcgatcgcggcggcgggacgtctccggcggccgcggcaccagcggcggcgctctgtgtggagaagcaggggcagcggcagcagcaacagcggcagcggcagcagcagcggcagcagcggcggccgcctctccgccgccggggacgccaaggtgcggctggtggcactgacatcggcggccctgcctctcctccctcgcccccggccttccccatgtgatcggtcttaatcctggccgtgtgtgcgcgcgtggggctccattccgcggtgctgggtctccgtgccggggtgggtgctcgtgtgtgcgcttctcctccccatcccccttcccccaagaataaaagaagaaccgggaggcgtgctcagaaaataaataaataaccaccacacacgcgcagcccggagcgagtcggcggggctggcggcagcggcggaggaggagtgaaggcggcggcggcggaggagggacgcgcggaaaaggcagcaactttaaagccagctcagagcctagacctccagccgagcggt

SEQ ID NO: 8920 - DNA, 1760 bp, Artificial sequence
  DNA replication origin
ggagaagcgcacacacgagcacccaccccggcacggagacccagcaccgcggaatggagccccacgcgcgcacacacggccaggattaagaccgatcacatggggaaggccgggggcgagggaggagaggcagggccgccgatgtcagtgccaccagccgcaccttggcgtccccggcggcggagaggcggccgccgctgctgccgctgctgctgccgctgccgctgttgctgctgccgctgcccctgcttctccacacagagcgccgccgctggtgccgcggccgccggagacgtcccgccgccgcgatcgcccgcgctcgcctctgcctccccgcgccgctcctccactcaccaaggcacagccgccgagctcggcagacacagtcccgggcacaacctacccccctccgccgccgccgccgccgccaacaccgcgcccgcctccgcctcctccccttcctcctcccggcccccgcctcttgcgcgcctgcagcctcctcctccccactgagcccgcccccgacctcccgccccgacgccggagttcctcgcgttcattggctagagggcgcatcactcagtgccaggtggcggcctccccgcttgtcccgcctcccgctcctcctcattgtccccgccccttgctctgttttcttccagctgccggaccagcgggcctgccgcctctacggaccagtccctgctcaggtgtcacttttgctggcaggccgagattagggcaggagagtgggcaaggcgtcgcggccaggaggagaagggctctaccacgccaccctcctttggcctccgaacgcggaccccgcacacacacacccgcgcctctttggcaagcgtgccttgtcggctgggttaagccgcagtgtgagtagccaagtgcagagggtgtctccgggtgtgtgcgtggcccacaagagggcaagaagagagaaggcggggataggagggaagagggtgggggtgagaggcagccctgagagggcggaggaaggaagaggctgggagctcggcgcccgcggcgcagctgccgtcgctgccgcagctgtccagggaggatcgccaaaacggcgacgaataaacaacttaccttgcggagaagagctacgactgcgatgcggtgtacggttgtttttgcttttgcgttggcggcttaggggctgttactgtgtcccacccaggcgtgcacaccgagcggcggggcgctgtggaacgcgggagcggactagcggaggaggatgcggaccaagccccagcgacccagggcaactcggagctacctcgggcagccctgcgggtctccgaggagaaccgaggagacgggagaaacatgggagagggtggccttttccctgttcacacacacatgcacgcagccactggccgggacagttgacacccatcttccttccctgctccttccagtcattctacacccgcttggtgctgccagtgcgggcagggccttggagcccaaagcggatccccacacttgtccctacggtcggaaggaaagtagaggagagaaagtcaggcgcggcagggctaagagcaatagtggcccaaatgttcctggcccgcctgctgcgccacagagtctgaaaagcgggtctccgtctaccagaaggtgacctccacacagcccctctccccgaccaactgcagcacccaaggactggcaacgtggttggagcttttggggggaattatgaagaaatctgaataaatttctcacccttcatg

SEQ ID NO: 8921 - DNA, 1289 bp, Artificial sequence
  DNA replication origin
cctcggcggcgctgggctccgggagcggggccggtggctgcgtgcaggccgagggctgcggcggctggcggcccgaccgacgggaagggcaggggaagctgtcagcgcgtcgccgggccgctccggtggcgaaacctcctcttcctgccccggctcgctggtgcacttctctctctttctgtctcgctcactctctcacttcctggctggaaattcccactgacgtcgagagagcatacagacagacggacacacgcgcgcacgcagcgggggcgggaggtagggtcgctgccgggggtgggggaagcccgcacttctaggggcgctgtgcgcccccggcccggccttgccgctcgcctcggctcccgcccctcggggccgcttcggggcgccgggcgaggggcgcgcgttaggcggcctggacgccgcggcccctgcggggctctggcttcctagcagggcgctcccgaatcccaagggctggagccggtagggaagcccccaggaagcgcctgccgggcccaatcaatggtcggggaacgcaggcagcacggaggcggcggcggtggcagtgccgctgatagagtcatgcggtccatagcccctaagggcaggcccgagcagctggagggtcggcatggatccaagcatgccagatataaaaataaagctcatctgtatattccatttaagcgtgtctcagttacattcacatctcttcacagattaaactacaatttcgttatcataaacgacttgtgcccagtaaagtataaccctctactggtttttggtgcggtcttaaatctcctggttatagagcagttactcagaatgttcatctacaaggcattgttaggcctttatgataattactgtggatagaattatagtgatggtggtagcaatggttttggttcacagctcataaaatactgatctggcagaggggagttttctttttctctgaagagaccgctactggcacccactgacaggcctcccagtggccaccattcactggcatctgagctgctttagtgctgggcactgtattaggtacaggctggggataccttcgggtggattacctccccacataagaaagcttgagccgaaatatatattttagagctcattgtttcactactgggtggagtgacaactgaaagcttagctttaaaacatcagtaatcaggtcctcaccaggcaatattgcagtggcatttagattgcttatggcatgttcatcctagtcctttcgtgcccactctccatcctcctcctcc

SEQ ID NO: 8922 - DNA, 1272 bp, Artificial sequence
  DNA replication origin
gtgagagagtgagcgagacagaaagagagagaagtgcaccagcgagccggggcaggaagaggaggtttcgccaccggagcggcccggcgacgcgctgacagcttcccctgcccttcccgtcggtcgggccgccagccgccgcagccctcggcctgcacgcagccaccggccccgctcccggagcccagcgccgccgaggccgcagccgcccggccagtaaggcggcgccgccgcccggccaccgcgcgccctgcgcttccctccgcccgcgctgcggccatggcgcggcgctgactggcctggcccggccccgccgcgctcccgctcgccccgacccgcactcgggcccgcccgggctccggcctgccgccgcctcttccttctccagccggcaggcccgcgccgcttaggagggagagcccacccgcgccaggaggccgaacgcggactcgccacccgggtaagccaaactcgggcgagtgggggcccggcaggggacgcgtggcccaagtcctgccgcccagccctccgcaccccctccagccccactcggacttcctcattcctgcgctaaccgctgggctagaccgtgggaggaggttgacagtagctgagaggcacatgggattagcgacagcggggaaagacacatccggacctcgcaggggctagtcggccgaagggccgcggccgcccggcggtcatttctcttcacgtccctccgcggggcgggaacgcgaaccggaggggaactcttacaaacttttaaaatccccaaccccagccccacctgggggatggtgagaaggttggagtgcgctgcggcgcggaggagagagggaaggtggttggtgcagtgcagaaccagatttcacctaagggcgttccatgaaatgaaagcagaagtgcttgtcagtcctcttggctgggaaagccctccccagctccccagaattgaataggagagtctattcatccctctcctacttctaaaagaaacctggctcgctctctgtctctctctctctcccccctccccccctccgtgcgcgcgcgcgcgcgcacacacacacacacacacacacacacacacacacacgatatagtcacctgctataggacttgattctgatcctccggggcctggcatttgagagagaaaataaattacctacctggatacttagagcactttttagacttgattatgtaaaactcttggacagtgccaccatgcattatgcatgaccgctgaaacaaaaataatgtaaa

SEQ ID NO: 8923 - DNA, 1263 bp, Artificial sequence
  DNA replication origin
aagcctcggctacttccgagggggtgagtggcttcaccgccggtcccttgcagcgctgcctttcgatctctccacatctcggtggcgcgggatctcaagatgcgcctccacctgctcctgctgctcgcgctgtgcggtgcaggcaccaccgccgcggagctcagttacagcttgcgtggcaactggagcatctgcaatgggaacggctcgctggagctgcccggggcggtccctggctgcgtgcacagcgccttgttccagcagggcctgatccaggtatggcgtgcggccgacccgcggcgagcctgcgcccgccttcttctggtgctgagaggggcccaggaaccgcctggcagcccccagctctgggccattctcgtcggtttggtagtaacttcccctttgcatcttgtgatctgcggggggaaatgcccaagctatggggtacgggcttgacggagactgagcgaccgacccatgttgggacatcagtaactctggaaaggggaagtttagataggggaacagtgttgctactagcagtttacttactgcagtcgttctctactgaagcgtgtatacaaagggcatgccgtcactgacaagcataaggtcgggaattactgtctctactgtctgcacgccacaggggacaacagcgttttgttaagtaagggttaactctattgagtaatgtctcggttttttattttcgctgttaagcgtcagggagtcagatttgggattgacgcagcacagacgttgtggagaatgacctacaagagtaaagttgggtttgtcagtgctagtgtggctaacaacgggtaaataatttttaaggctaacttggtgatgaagaaaggtgctatttcctctcagggcgtgtgtgtgtgtgtgtgtgtgtatcccaatggagtctccaatttacagactacttgtggggaacgttttcgtgtttggctgcctgtgcgcataggtttgcaaactgacttccatcctccaactgcttttgctgttccctcttgcacagcgttcccacgtgttgtctttacttggggcaaaatgtacttgtaattgatctacttgtgggatgcatacattgtccaatcctcataacaactctgtatagtaagtgttcatatctgaattttatggataatatggaattatggaacacagagaaattaggaaggtgacagcaactaaatggaaagaaatggaattctaacccaggtggtctcaactccatagcctggtctctat

SEQ ID NO: 8924 - DNA, 1445 bp, Artificial sequence
  DNA replication origin
tggaggtggctgggcgggcgcgcgcgggagcgcgctggaaggcggagtgagtgtacggtggcgtcaggggtgacacagaatagctcgctgcgaggatagcaatacacatcaagtctcccttcctttatttccttccttttcccggccgcacctttggacagaaaccgaaagcagcccggcgtccgtccggagtcttatgcttccccctccccccttgcctttctttgccctagtgacgccggtatagcgccgactaggccccggctcctcctctgctgggctccggaccctgccccgcacccacccctttctcctacgcctcttcctctcccacccgggtctcttcctttctagaggccgggaagttaaacttgtagccaccacctccgctcttcccgtcaccctcgcccccacttcgggccgaaagcacggtacagaggctgttggtggctttgccacgccaccccacccaccccggatcgcggctgtcttaagggacctggattcatcaggggctcttcggggcctgtgcgagtgctgatctgctccgtttttgcaaaaggcgcctgtgtctggcagagctggtgtgagacgagacaatcctgccccgccgccgggataatcaagagttttggccggacctttgagcatacaccgagagagtgaggagccagacgacaagcacacactatggcgctgaaacggattaataaggtaacccgcggggacaagggcatggggtggtaggagaaaaggaaggctcgggccaagaggaaagcgtgggggtgggaaggaagcataattctgaaaatacctcttggatcacttcttccatggggggatggagaacgcagatatacttcttgaagaaatgaagtttaaagctaggaaacggagaacacttgtggcaagtgaggtgttatcctgagtgcttcagtggaatcggtgcaaattaggggtggaggagagtgacttaaggcgcctttattattttatttttttgctgcttaagaaggagtttttttgggggtccgaattgcggagagacgctccagcagatgtcatggcgcttcctattcttggtgcttgaaaacttagtttagttgtgagatcaaggttatctaggccttctaggggtaagaaagaaaactcggaggagagaaaaaaaatctggcgagtcccgaacttgactgagggtcgggtagaagaagtcttgcgtattgaaggtcagtcagtgagtctagtagaaactcttagtcgactctgggcaggttacaccgaataagtgggtttgggaggagatggaatgacacagtgttgccacttcctgtattttgtagttgcagcttttcacccgaagctatttatccgagggacaccgggaactgatgtaaaaggcattctggaagctcccttttccttttggctggagagtgggggtggat

SEQ ID NO: 8925 - DNA, 894 bp, Artificial sequence
  DNA replication origin
agcaagccgtctggcttcggcctcacatcggtcttgtgctcgggacggcggcgttggcggactgatccgcggcggtgaagaggcaggaggagggggaggggcggagcgtggcagctggcagtagttccgtcagagcggacatcttgtggctgtgtcgtgcgcgtgagccccgtagggccggggaggcaccagctgccgcgcggggaggaggccgaggccgcagcttgagggaggccccggcccctctgtacgcgtgggtgtggacggctagggcagggaagggaggccggcccagtggccggccgggtaagaggggcagtgcgggacctgggcggcttgagcggccagcctattgggtgcggtgggttagggtgggaaggttggggaagccgcggcctctcctgctggaggaggagggggaatgggcgcgtcctcgcgcctaagccggagcctcagggacagcgcgggcgcgtggtggaggtggctgggcgggcgcgcgcgggagcgcgctggaaggcggagtgagtgtacggtggcgtcaggggtgacacagaatagctcgctgcgaggatagcaatacacatcaagtctcccttcctttatttccttccttttcccggccgcacctttggacagaaaccgaaagcagcccggcgtccgtccggagtcttatgcttccccctccccccttgcctttctttgccctagtgacgccggtatagcgccgactaggccccggctcctcctctgctgggctccggaccctgccccgcacccacccctttctcctacgcctcttcctctcccacccgggtctcttcctttctagaggccgggaagttaaacttgtagccaccacctccgctcttcccgtcaccctcgcccccacttcgg

SEQ ID NO: 8926 - DNA, 970 bp, Artificial sequence
  DNA replication origin
cacatgtttcagagagcacggggttgggggtaaggttatagattaacagcatcccaaggcagaagaatttttcttagtacagaacaaaatggagtctcctacgtctacttccctctacacagacacagcaacaatctgatttctctatcttttccccacatttcccccttttctattcgacaaaaccgccatcgtcatcatggcccgttctcaatgagctgttgggtacacctcccagacggggtggctgccgggcagagaggctcctcacttcccagacagggcagccgggcggaggtgccccccacctcccggacggggcggctggccgggcgggggctgccccccacctccctcccggacggggtggctcctgggcggagggggctcttcacttctcagacggggcggccaggcagagaggctcctcacatcccagagggggcggcggggcagaggcgctccccgcatctcagacgatgggcagctgggcagagacgctcctcacttcctagacgggatggcggccgggaagaggcgctcctcacttcccagactgggcggcagggcagaggggctcctcacatcccagacgatgggcggccaggcagagacactcctcacttcccagatggggtggcggccgggcagaggctacattctcggcactttgggaggccaaggcaggcggctgggaggtggaggttgtagctagccgagatcacgccactgcactccagcctgggcaacattgagcactgagtgagtgagactccgtctgcaatcccagcacctcaggaggccgaggctggcagatcactcacggttaggagctggagaccagcccggccaacacagcgaaaccccgtctccaccaaaaaaatacgaaaaccagtcaggcgtggcggcgcgtgcctgcaatcccaggcactcggcaggctgaggcaggagaatcaggtagggaggttgc

SEQ ID NO: 8927 - DNA, 761 bp, Artificial sequence
  DNA replication origin
ggcggcggcggcggcggcggcagcaggaccagcatgcaccaccgaaacgactcccagaggctggggaaagctggctgcccgccagagccgtcgttgcaaatggcaaatactaatttcctctccaccttatcccctgaacactgcagacctttggcgggggaatgcatgaacaagctcaaatgcggcgctgctgaagcagagataatgaatctccccgagcgcgtggggactttttccgctatcccggctttagggggcatctcattacctccaggggtcatcgtcatgacagcccttcactcccccgcagcagcctcagcagccgtcacagacagtgcgtttcaaattgccaatctggcagactgcccgcagaatcattcctcctcctcctcgtcctcctcagggggagctggcggagccaacccagccaagaagaagaggaaaaggtgtggggtctgcgtgccctgcaagaggctcatcaactgtggcgtctgcagcagttgcaggaaccgcaaaacgggacaccagatctgcaaatttagaaaatgtgaagagctaaagaaaaaacctggcacttcactagaggtcagaggagatgatttcttgtttcccagtctccccccttccctcctcactccctctccccttcagggattcttgtctggcttcaagatgcagtaccccttctcagaagcttcattcaggtggtaagagttgtaggtggtttgcgaaaggcttggcctctccaccacccgcaccag

SEQ ID NO: 8928 - DNA, 893 bp, Artificial sequence
  DNA replication origin
ctgcaccatgaacaccaatgtctgcgtggagcccgggccgagcccggaggccccgggcttgcccaaggaaagccacttgcccgagggggctctgaacagccttgtggattacaactcggaaatggagcgctaccgctcctttgccacctccttctacaagaccaacgggggcgccttcccacaggcggccaagatcgcgcgcatcaccacccccatcttccccagcagcgccgccgccgccgcggccgccgcgcgcatcggcatgtccccctggaactgcgacaacgcggccaccgccgccgccgccaccgccatgctctggggcagcggcgggggcgggggcggcggcggggggggtggcggcggcggcggcggcggcggaggcgggggcgggggtggtgggggcggcaggaaatcctcctccgccgccgcctcctcctccgcctcctcctcctcggcgatcctccccgccggcggtggcggcggcggcggcggcggcggcagcaggaccagcatgcaccaccgaaacgactcccagaggctggggaaagctggctgcccgccagagccgtcgttgcaaatggcaaatactaatttcctctccaccttatcccctgaacactgcagacctttggcgggggaatgcatgaacaagctcaaatgcggcgctgctgaagcagagataatgaatctccccgagcgcgtggggactttttccgctatcccggctttagggggcatctcattacctccaggggtcatcgtcatgacagcccttcactcccccgcagcagcctcagcagccgtcacagacagtgcgtttcaaattgccaatctggcagactgcccgcagaatcattcctcctcctcctcgtcctcctcagggggagctg

SEQ ID NO: 8929 - DNA, 1470 bp, Artificial sequence
  DNA replication origin
gcagcgccgcatttgagcttgttcatgcattcccccgccaaaggtctgcagtgttcaggggataaggtggagaggaaattagtatttgccatttgcaacgacggctctggcgggcagccagctttccccagcctctgggagtcgtttcggtggtgcatgctggtcctgctgccgccgccgccgccgccgccgccaccgccggcggggaggatcgccgaggaggaggaggcggaggaggaggcggcggcggaggaggatttcctgccgcccccaccacccccgcccccgcctccgccgccgccgccgccgccgccaccccccccgccgccgcccccgcccccgccgctgccccagagcatggcggtggcggcggcggcggtggccgcgttgtcgcagttccagggggacatgccgatgcgcgcggcggccgcggcggcggcggcgctgctggggaagatgggggtggtgatgcgcgcgatcttggccgcctgtgggaaggcgcccccgttggtcttgtagaaggaggtggcaaaggagcggtagcgctccatttccgagttgtaatccacaaggctgttcagagccccctcgggcaagtggctttccttgggcaagcccggggcctccgggctcggcccgggctccacgcagacattggtgttcatggtgcagggggggaagaaggggtgcagggtggaagtggggaccgcctggtccgacacctgggtggaaaagggggaaaggtgggggggagggaagggagtgatggtggtgttggggtgggggccgaggcgggtggggaaagtgggttcgggtggggagagcaaggtgagggctgctttattcctctctggggctcatttccacagacggtgaattcccaggcagcgtcttcctttgcattatcctccaactgttacaactaaaataaagaaagtcattccaacgagctgcacgaggaaaaagattaaaaataaacaacctccctcactaacccaccgcagacaccgaaagctcccacattcttccatcaggtcgtttgcataagaatcatcaagacgtgaccccccccagcccatcccccccaactctcccaacccccgctccctccctccccacagcaaaccacagctcctcccccctattcttataaccctcctgagaaaatgtattaatagccaggatacccagggaaagaaggaagacgggggtgacaaacgcctaaggaaaagggcaattggagtgctaaagacatgcaaatcatgggtgggagggcgatactacctataagcagagggcatttaaacattatgaaatgtgtgaacaagtgctgcctgggcatgcaaatgctgtaaagtagaaaacagcaatggccctatgaggaaaatgaacaggaaattagcaaatgaagtactgaaaaagtctacaatacatccgagtataaactgtaagcaaacacaatacaactga

SEQ ID NO: 8930 - DNA, 894 bp, Artificial sequence
  DNA replication origin
tagccttttctatttttaaaagaagagtgttcgttggttgaaaatatctggcccctccgccccatccgggagggaggtgggggggtcagccccccgcccggccagcagccccgtccgggagggaggtggggggatcagccccccgcctggccagccgcccagtccgggaggtgaggggcgcctctgcccggccgcccctactgggaagtgaggacccctctgcccggccagccgccccgtccgggagggaggtgggggggtcagccccccgcccggccggccgccctatccaggaggtgaggggcgcctctgcccggccgcccctactgggaagtggggagcccctctgcctggccagccgccccgtccgagagggtgggggggggggtcagccccccgcccggccagccgccccatccgggaggtgaggggcgcttctgcccggccgcccctactgggaagtggggagcccctctgcccggccacgaccccgtctgggaggtgtgcccagcggctcattggggatgggccatgatgacaatggcggttttgtggaatggaaaggcgggaagggtggggaagaaattgagaaatcggatggttgccgggtctgtgtggatggaagtagacatgggagacttttcattttgttctgtactaagaaaaattcttctgccttgggatcctgttgatctgtgaccttatccccaaccctgtgctctctgaaacatgtgctgtgtccactcagggttaaatggattaagggtgcgagatgtgctttgttaaacagatgcttgaaggcagcatgctcgttaagagtcatcaccactccctaatctcaagtacccagggacacaaacgctgcggaaggccgcagggtcctctgcctaggaa

SEQ ID NO: 8931 - DNA, 983 bp, Artificial sequence
  DNA replication origin
taaagggcagccatcttgcttccttctgcttctctacgaaagcagcctagcctccgcatcaatattcataaggcagtttgacgtctgttctcatcactcagcggggccggcgtctcggggcggccgcgccgagggggcggacgtgacttgcatgcgagcgggacccgggcgcgcggcgctcgcgaggaggcggcggcggccgcccaagctctcgccgctgccactgccgctaccgccggctctcctcctccgcccgggcctcctcctgctccgccccggcctcctcccgctccgccccggcctgcgccgccgccctggggccctcagccccggctcccagggaattagccccccgcaccgggcgtccagcacaaaggccggcggcacctggggccgtacagcggggcgcgcagtggagacctgggctgccctcacgccgtgcagtggcgcggggggagtggtgcgcccggaccagcgcggagtaggggccagggctggcgagcgcggggaagggtgcagccctcgggaaccccggggacctcggcgggtctccacccctgggagaagaagcagagcaagcgcgaaggttgggggcgaggtgggaggttgggatggcacgggtgcctggacaaagacgtgacatctaagatttccctttgaaactttttgctggtctgcactccaccaccacttcgaggtcccgcgcacacgcccccgcgcgcacccacctcctccggagtgtacccgcacgtgccctcgctctggcccccgcctccacccactggcacctctccccgcaccacacctccgcttgcgcccaccttaccctcagaggcccgcgtctctatctccctttagatcccgttgcccgcgctctcctttcccttttctgtcgctttaatctcattcagcagaagcgctcccctgtttcaccgagggcatgcccttagtgctttaggggcctgtatttttaaagacccgac

SEQ ID NO: 8932 - DNA, 990 bp, Artificial sequence
  DNA replication origin
cccaacctcccacctcgcccccaaccttcgcgcttgctctgcttcttctcccaggggtggagacccgccgaggtccccggggttcccgagggctgcacccttccccgcgctcgccagccctggcccctactccgcgctggtccgggcgcaccactccccccgcgccactgcacggcgtgagggcagcccaggtctccactgcgcgccccgctgtacggccccaggtgccgccggcctttgtgctggacgcccggtgcggggggctaattccctgggagccggggctgagggccccagggcggcggcgcaggccggggcggagcgggaggaggccggggcggagcaggaggaggcccgggcggaggaggagagccggcggtagcggcagtggcagcggcgagagcttgggcggccgccgccgcctcctcgcgagcgccgcgcgcccgggtcccgctcgcatgcaagtcacgtccgccccctcggcgcggccgccccgagacgccggccccgctgagtgatgagaacagacgtcaaactgccttatgaatattgatgcggaggctaggctgctttcgtagagaagcagaaggaagcaagatggctgccctttaggatttgttagaaaggagacccgactgcaactgctggattgctgcaaggctgagggacgagaacgaggtcagagcgcttctcttatgccgcgaaactctccctttcttctccccttcgctttttctcgggcttccagggactggggagcaaaccctgtagtgtcacccacaaataccaagagggaagagggaagcttcacaaattactggagcctcttcaacatggctgacaaatatagttttaattccctctaccccttttaaacctgtagttctgtgttctcttctctcctcctaatgctcgtcccctcatctcccagaaaacttacctttgtgcctccgacgagccggtttcccggccttttttaatcctcagaaa

SEQ ID NO: 8933 - DNA, 1513 bp, Artificial sequence
  DNA replication origin
atggatctttcttgagattaaaatagaaacttgttttgctaactgaaaacaacttagaaatcaaagagccatttaagttgaaaccattatttttcctttccttgaagaaaattcctgtttttacacacactgaatgatcaggatagtgaatcaccctaccacagaactttccattaaaaatttgaagttgtagaaacctcaaaaagaaaatgaagatggggggaaaacgtttgtaatgtagcaaatgaattgaataaacatttatgagcacctactatgtgccaggcagtgttctaggtgataaagatacctgcctttgtacagcttgcattctagcggaaagaaaacatacaaacaaaaaatatgcaagttatatagtaatataaaagatgagtggtatggagaaaagacaaagtaggacaggccaaggatcatcagaaggagggcaagttagaggtttaaataggatggtcatgactggcctcttcaaagaggtgtgacatttgagcaaagactgaaggaagtgagggcgtgtgccatgtagatatttgcagagggcaagttgcagttttaaataggatgatcatgattggcctcctggaagaggtgacatttgagcaaagactgaaggaagtgagggtgtgagccatgtagatatttgggtccagatagagaaaacagccagttactggccccaaggcaggggcatgcctggaacatgcaagaaaggcaaggaggccatggactggaggaagagaaatgaggacattgagaggtacgggagatgacagatgatcactgcacaaggctgtcattcgaggtaaggttgggaagaggggtgacttgattgggctcatgtacatcttaggataatcatgttttcatttgaacacagtcatttagtacaatactttttactctgcaacaactgaacaatgattacttaaaatggtttctaagtgatcccctcaagatcaggcaccacaacactactaggcagtagcagcccttcctctctggcaggcactcatccctagaggggcagtcctgtcctaatgtgctcgggagttgagctgatagagacagaaacagtctgctcatttcttcttcaaaacccgactggagagccaaatatttcttttggttagttacaaaataaaaaatatgcctttgccaactctgcgggaaaagcaaactcccagagtttgccttcgctaatttgtccaagtcgtgctgtggttttagtaaatgcagacactgctcagctccagccccataaacctctctgctctagggcttctccgccctccggtgaaagctactgctcgcccctgcagtcaccacctgttcgggcggaacctgcggagcgtgcacctacgcctcgggctcctttcctcctccactcccctttcctgctgggcaccctgctttccctctcccagagagggtttgcaacttttctcccaggctggggctcgccctgcttggctaacccccaagagccactgccgtc

SEQ ID NO: 8934 - DNA, 1251 bp, Artificial sequence
  DNA replication origin
ggcggccgccgagttcgacgggaggtgagctgggccccggggcgccctctcctccttcccgcgctaatttcacactcactgtcttgggtcacttttccccgcggggtttcgtggtcagagaggcgtctcctccatccagaagttgggccaccgcacagcgtggcgcgaggagagcggtccagcggctccgagtgcccgcccgaggcggagagggcgcgcccttgcgagtctgggaccccatccgcggccccccgagggcgactcgccccggctcgggaattaggactgagggagaggagccgctggagcctgggatctcggctctgagggcgcggtttagccacctacgccgaggtgacgcgcgaaacatcccttacccgggaaactcccgcgcctgaactagacggctcttcactggggaagcttccaggcccccggggggaggcccgggctctgctcagggctctcggggccgctcacacagagagtgggtgcgagtcagcgactgggctacgggggagatttgtgggcctctccatttggttttcttgagggaaggagactcaaaatgaggaccggagggtgggcgctccgtgaatgtgagcatgagtgtgtggatgtgtgtgtgagagcgcacacactgcgccgctcctcagactcgggcgagcctgacggcggcgtgctgtgacaggttccaacaacctcgggccgcgtctccgctgtcactcagccggtcctcccgcgctccggggccgctccggtgtgtgagagacactgggtctgtcgggagggtgtgctcggtccccctcacctctgtgcaattacagactaggctcgtcccgggtgcagatggctgctgcgaaaagaggttttactctggcgcacaccgtcgcccggtcgccttccttcagcgacctctgcccccacccctccgtgtaggtccctgcctagtcctaaagaaagatgccgcacctgttttacctttaatcttggaacgaatcaattccacaattgattcgctttcttgtacccggaggcgaacggaggggaaccagtggagcgccaagaaaaagcacagctgcttgttcactacctggtcggaggaaatagaaagttcggggttattttgtactttgggcctgggggtagaaaggcaggtaaaagaaaaggggaattgaaaaagataaggagactttaagaaaacgtgatagcagccagagtgtagacctttttattttatttttaaaagca

SEQ ID NO: 8935 - DNA, 1062 bp, Artificial sequence
  DNA replication origin
tcgacaaaactgccatcgtcatcatggcccgttctcaatgagctgttgggtacacctcccagacggggtggcggccgggcagaggggctcctcacttcccagatggggcggccgggcagaggcgccctccacctcccagacggggcgccggccgggcgggggctgccccccacctcccggacggggccgctgccgggcggaaagcggaaacgctcctcacttcccagacggggcggctgccgggcggaggggctcctcacttctcagaccgggcagccggtcagagacgctcctcacctcccagacggggtggcggcggggcagagacactcctcagttcccagacagggtcgcggccgggcagaggcgctcttcacatctcagacggggcgacggggcagagatgctccccacatcccagatgatgggcggctgggcagagacgctcctcacttcctagacaggatgacggccgggaagaggtgctcctcacttcccagactgggcggccgggcagaggggctcctcacatccccgacgatgggcggccaggcaaagacgctcctcacttcctagacggggtggcggccgggcagaggctgcaatctcggcactttgggaggccaaggcaggcggctgggaggtggaggttgtagcgagccaagatcacgccactgcactccagcatgggcaacattgagcactgagtgagcgagactccgtctgcaatcccggcacctcaggacgccgaggctggcagatcactcgcggtcaggagctggagaccagcccggccaacacggtgaaaccccgtctccaccaaaaaatacaaaaaccagtcaggagtggcggcgcgcacctgcaatcccaggaactcggcagactgaggcaggagaatcaggcagggaggttgcagtgagtcaagatggtggcagtacagtccagcctcggctcggcatcagagggagacggtgcggagagggagagggagagggagagggctatacttttcttaatttaaaaaattacttgtacctgatttcacctcctacttccttgtca

SEQ ID NO: 8936 - DNA, 945 bp, Artificial sequence
  DNA replication origin
ggggagagtcggctgggattttcttcttaagaagtcgcgcaggtttttcgagctccactctgcgccaggagagccacggcagcaggaacgggcactgctgccaccgggccgacgggtgagtcactgtttggaaatggagtgggcgggcgagggtgtgagagaatgaatgatgtcaagagcgcgctgggcgcagggcgcagggagcgggccgcgcgcggcgggcggggagagcgggcgcggggccgcggtcaacactgagcgccgcgccgtgggccgagtggggcggggagacccagccctcggcgcgcacggagcctggccggtgctgcagcgccgccgagtgcggcctcgggggcggcggccgcgggagggacccggagagctgcttcccctagtcaggccgcggcgtgggagggcgagaccccgagcaaactttctagcggcttcggcccgagggtggtgacgcccggggctggtcgcggcggctgcggcagcgggctccatcccctggcaaatccccttcccgggagcaagtgccttcagctgggagtgtctggagccctggccaccagcgggtaaggagcgcgcggaggggccaggaggaggatgggctggggagcggagagtcctccgaagcgcgggaggggaaaggtggattgcgaagcggggacgtggctctaatccggcccccaccctccccgcccagggcatgcttcctcgattttgtggtctggaggagagatgtgtgccttagtctccttcctctgagcagtcatctcattcatttgcaacccatttcgggtaccccggtcctggcgttggaagggcacaggttaaaccccagattgtccagaaccactccggaggtcagggctgaagttcagttggtggaggagggactgtgtgtgtgtgtttgtgtgtgtggtttttcttttctttctcttt

SEQ ID NO: 8937 - DNA, 1197 bp, Artificial sequence
  DNA replication origin
ccctggtcctgctgctcagccagctccgccgccggaggaagggaggcagcagcacgtgaccgaagttgcccaccagaggccagggcgtgggcccgggcgggatgccccgcgcccggcgcctccgcagccagctccagcccagcagcgctacgaggccgcatagcagcagcgcgcccccgctggggtccagccgcagcagccccagaggcgcacgcaggaggcgcgcgggccagggcgggtcctcggccggcggctgcgacggccccggagacgacatggtccgggcgccggcggcctcgggttccccttgctgcctggaggagacgcgcacgcagctgcctgacccgcggcgccagtgtcctgctctgctctggaaggtcgggggcgggcagggggtgtaggaacgcccccggattggctgcgccgcgcgcattctccccgccgccgccactcagcgacgcctgggcggaacctggaggcgcgccggctgcctggcggagggggttggcgggctagcaggcgggggacctgaagtttgccccgaagtccggttacgaccctttgcagggtcgggcttggcggtgactgtccctgaaactgggatgctggcaacacaaccttgcgctctgattggctgttggtttcccttgtgtcattcgtttgtcattatcactcgtttgtcagttgacaaacacaaacgcatggttatgaagtgcataaaccgtgttaggatctgtactgagtgtgggaaactggtgaacaggcccgtgagatgggtcggccttagcacctgtgccctgagctgggagaatggggtcaacgccctattcctgcatgcttcggtgtagtagtgaaaagacggggttccttatctaaactgggattcgcagcaccctttcctccacgcagagacagcaggatgctgggaagccgtggaatgcagaatctgtgggtgtcggcttggcagccaactctgcggaagggatgatggcgggagtggggggagcgaggggcgggcagcgaggcacgaggagtcacgttctgagagcttgccctgggctagaaaacttatgcggagagcgaaagctgtgtccattcctgcgtgtggcctgggtgcattagaaaatgtacttaaatccagaaatagcgaaaccagaatttgcttggtggatttaagtagctagaaatatgaaaaga

SEQ ID NO: 8938 - DNA, 1275 bp, Artificial sequence
  DNA replication origin
aggcagcaaggggaacccgaggccgccggcgcccggaccatgtcgtctccggggccgtcgcagccgccggccgaggacccgccctggcccgcgcgcctcctgcgtgcgcctctggggctgctgcggctggaccccagcgggggcgcgctgctgctatgcggcctcgtagcgctgctgggctggagctggctgcggaggcgccgggcgcggggcatcccgcccgggcccacgccctggcctctggtgggcaacttcggtcacgtgctgctgcctcccttcctccggcggcggagctggctgagcagcaggaccagggccgcagggattgatccctcggtcataggcccgcaggtgctcctggctcacctagcccgcgtgtacggcagcatcttcagcttctttatcggccactacctggtggtggtcctcagcgacttccacagcgtgcgcgaggcgctggtgcagcaggccgaggtcttcagcgaccgcccgcgggtgccgctcatctccatcgtgaccaaggagaagggtgagcgggaggtcgtgggctgtgggtacgcggatgccgcggatgagtctccaggtgcgtgggggctgcagttcctgtgccccttccggccgcccgcgcccccaggctgcctcacacctgcatcctgaactaacaggtgatggtggtggcggcgcttctcctttctgatgcctttaagatcccatcaagtagtgacggacgcgtgacttgctcatactccaagatcataagtagaaaagtcatccggagattgagggagagtaatagggatggcggaaggacaaggtggcaagccaggttccatctttccaaaagtagccttcccttccaccagctgtgacctcggagagaaactttggcccccatgttagaaagagggaaggatattctttttaccttgtgggtttcgaatgtaagaatttaagaagataatttccaataagataaaaagtccagaaaacacagaagaagcctattaccaaatctccggctttggttcatagcctctgattcctgcgtatgggagtctaaattggacatttttgggggttggaaaacgtgttatctgctgcaataaaatgtccaatctaacctgtctctaccgtccccctttgtcttactggctggcttaggtctctgacttcttttctgagtcactcctacgcatcagtcaggtgttaaatgccttttccttggggaagccttttctcacagcctctgcaagtagggtagcctcccttgttaga

SEQ ID NO: 8939 - DNA, 923 bp, Artificial sequence
  DNA replication origin
tggtaacctgagtagagtaaatagagacacgtgggtgctggctagagaaagcgcggagcagggccgcgctggagggctgtttgaagcctagtccagagctggtctagggggcggatggaccctgatacccgacactccactggtcacccttgttccacaactgggaaaccctctggaggaaatccggtagaaaagtcctgacacccgaatgatttaaccaacgccttttccctccaaagaaacttggaggatatacctttttttccttaaatggcatctttctacccccaaaaagaaagtgtgtggttttgagggcggggacattttgggttttaaacagcgcgtttaagaacacctcagatctgccttctctatcccaatggcagaggtgagtacgaattttgaaaggctgggggcctgcgttcagagaacagaatggtgttctttacccgttgaatccagtttgagcgggctgggggcgggggtagggtgcacctaaccccgcgtaaaagatttgtgactactgtgtgctgggaaaaggaggtcaaagggaggacacacgtccagagaaccgaataacatccaaaacacaggctttttgccaaactctcctatttgtagagcagcctctctttctacccattttgctagtcctgccttagtccataaataattttgccacccacttcatattctccacaattttctggtccgggtgaaggacactgcgttcgaatccgagagcactcgggtgttaagtgggcatgaggaggcctgagggtgaaggagtaataccactgatttgcacgtgtttgaggctgtctgggtggatggtgattaccaaaactgatatcaactgggctaccttttagatgtctataacctgactctctaattttcctccctttaaccacagaatcgtt

SEQ ID NO: 8940 - DNA, 1511 bp, Artificial sequence
  DNA replication origin
gaaggaggaggagcagaagatgggggccgaggaggaggggaagagaaagagaagtttgccaagaataaagtttttgccggcaagcgcggggactccgcagtggagggcactgcggagtctcggggagtcacagcgggggcctcgggcccaaatgcctctgcccggagctcgagccgacacacacactcagtccgacccctctttgttcccggctcgagtttctcagcctggctcgccggctcgccgctctgcacgcctccgccggccagctctgtcaaagcaaagagctgcgccccttgagttcgcccggccgaggggaggggacgccccgagcttggccgcgtgcgaggctccgggcgcgtcctggttcctcggcccgagagcgcgcagcccgggtccctcctccgcgccctgccccgcaggtgagcggctgcgcctccccactgcttctcctcctcccgcgcctcgccggcgctgaaaagctacccacttgcgtcgcttctcctccctctcccctcccccgcctctagctctccttggctgcccgctggaggggaggcggggggtgagggggagtcggcgagaaggaggtggtgattgagggcttttttttctttttcttttcccagatcctgtaggacgagtcttggttttggggtgtgtgagtgtggtgtgtgcgcgcgcgcctggagggaaggatcaggcaacttggcgagagaaggaaggaccgggcgctgcttataacccaccgaaaggcacgctttgcccgcgtgaaactgacaagaaacattgccgcagtggcttgacttcatcatctaagtatctatttacttggcccccacccacccactccttttcctctgccagtctctcccctacctccttgacgcctcccactctccctccctggctctggcagagggaggaagatgaaagagaaagccgctgccgctgtgatggacaccacattgatagatgctctgacagtggggagaggcgggaatctgggactgagaaaaaaaggaaaaggggaaaatataacagacattgctcaactattaagagagaacagaaggacaaggaaaagagagttgtagctttcccgaatataatatcacacacacgctctttggagacaagggaacacactagtgaaaataaaatctctaggcttacggagaaaaaatatgacgaggaagaaggaactgaagactagattttaattattgctttttaaacaatatatctttcattctgttctcaccacgggatgtacggagagttgtgctaggtctccagtgggttttcagagacacacaccgcagtgtgtgggaacctcatcgagaatgaaaagataatccaagaagggggaagagaaggcaaaaggactcaggagagcaaagccagaagagggagggaggacggggtagtccctggcaccttggactgcgaactgaaagggacccttgaagacaccaatccgaatacaacctcaaaaattccccagtctc

SEQ ID NO: 8941 - DNA, 1390 bp, Artificial sequence
  DNA replication origin
tctctactgaaagtacaaaaattagctggtcgtggtgtcaagcgcctgtaatctcagctactcaggaggctgaggcaggagaattgcttgaacccaggaggaggaggttgcagtgagctgagatcatgcccttgcactgcagcctgggtgacaagagcgaaactccatctcaagaaaaaaaataaaaataaaagtgaaccatagattttcagtgaagtacagagagtaggctgggcacagtggctcacacctgtaattccagcagtttggaatcaaggcaagaggattgcttgaagccaggaattcaagaccagcctggtcaacatagcaagaccccatctctaaaaataaaataaattagctggatgtggttgtgtgcgccagtagttccagctagtcaggaggctaaggcaagaagagcacttgagcccaggagtttgaggcttcagtgagctatgatcatgccactgcactcttgcctgggcatcagagtgagatcccacctcaaaaaaaaaaaaaaaagaagaaagaaggagaagaaaagaaggaggaagagaagaggaagaagaagaggaggagaagaggaacaagaagaaagaattggaggaggaggaaggaagagaaggaagaagaaggagaaaaagaaagaggaagaggagaagaggaagcaaaaagaagagggaagagaaagaaggagaaaaagagaagaaaggaagagaaggggaagaaaaggagatgaagaggaggaaggaagagaaggaagaaggagaaaaaaatggaagagaagaggaagaggaggagtaagaggagaagaggaagaagaaggagaagaaaacaaggaggaagagaaagaataaggagaaaaggaagaggagaagaggaagaagaaaaaggaagaggaaaagagaaaaagaaaggaggaggagggaagagaaggaagaagaaggagaaaagtagagaaagaggaagaggagatgaagaggaagaggaaaagaagagggaagagaaggaagaaggagaaaaagagaaagaagaaagaggaagagaagaggaagagaaggagtaagaggagaagaggaagaaggagaagaaaacgaggagcagggaagagaaggaagaaggagaaaaagaagaaaggaagaggagaagaggaagaagaagacgaggaggaagaaaaagaagcgtttataactttgaaaaacttggaaaggtctagctgtggatttgtgaaattctaatatagcttgatggtgaaataccacacagctttgataatgatgctcaattatttttattcacatgaagatattagtgatacattgctaagttaaaaaataaagttataagagaataaatgcaatcatacctcattttaaaaagtttatgttta

SEQ ID NO: 8942 - DNA, 1312 bp, Artificial sequence
  DNA replication origin
ttttttccccactcttcccgcctttctattccacaaaaccgccattgtcatcatggcccatccccaatgagccgctgggcacacctcccagacggggtcgtggccgggcagaggggctcctcatttcccagtaggggcggccgggcagaagcgcccctcacctcccggacggggcggccggccgggcggggggctgacccccccacctccctcccggacggggcggctggccaggcagaggggtcctcacttcccagtaggggcggccgggcagaggcgtccctcacctcccggacggggcggccggccgggcggggggctgacccccccacctccctcccggacggggcggctggccaggcagaggggtcctcacttcccagtaggggcggccgggcagaggcgcccctcacctcccggacggggcggctggccgggcggggggctgacccccccccacctccctcccggtcggggtggctgccgggcggagacgctcctcacttcccagacggggtggctgccggacggaggggctcctcacttctcagacggggcggttgccaggcagagggtttcctcacttctcagacggggcggccgggcagagactctcctcacctcccagacagggttgcggcccagcagaggcgctcctcacatcccagacagggcggcggggcagaggtgctccccacatctcagacgatgggcggccgggcagagacgctcctcacttcctagatgggatggcggcggggaagaggcgctcctcgcttcctagatgggatggcggccgggcagagacgctcctcactttccagactgggcagccaggcagagaggctcctcatatcccagacgatggggggccaggcagagacgctcctcacttcccagacggggtggcggctgggcagaggctgcaatctcggcactttggggggccaaggcaggcagctgggaggtggaggttgtagcgagccaagatcacgccactgcactccagcctgggcaccattgagcactgagtgaacaagactccgtctgcaatcccggcacctcgggaggccgaggctggcggatcactcgcggttaggagctggagaccagcccggccaacacagcaaaaccccgtctccaccaaaaaaaaaaaacgaaaaccagtcaggcgtgacggcgcgcgcctgcaatcgcaggcactcggcaggctgaggcaggagaatcaggcagggaggttgcagtgagccgagatggcagcagtaccgtccagctttggctcggcatcagagggagaccgtggaaggagacc

SEQ ID NO: 8943 - DNA, 957 bp, Artificial sequence
  DNA replication origin
cccgtctgagaagtgaggaaaccctctgcctggcaaccgccccgtctgagaagtgaggagcccctccgtccggcagccaccccgtctgggaagtgaggagcgtctccgcccggcagccaccccgaccgggagggaggtgggggggggtcagccccccgcccggccagccgccccgtccgggaggtgaggggcgcctctgcccggccgcccctactgggaagtgaggacccctctgcctggccagccgccccgtccgggagggaggtgggggggtcagccccccgcccggccggccgccccgtccgggaggtgagggacgcctctgcccggccgcccctactgggaagtgaggacccctctgcctggccagccgccccgtccgggagggaggtgggggggtcagccccccgcccggccggccgccccgtccgggaggtgaggggcgcttctgcccggccgcccctactgggaaatgaggagcccctctgcccggccacgaccccgtctgggaggtgtgcccagcggctcattggggatgggccatgatgacaatggcggttttgtggaatagaaaggcgggaagagtggggaaaaaattgagaaatcggatggttgccgggtctgtgtggatagaagtagacatgggagacttttcattttgttctgtactaagaaaaattcttctgccttgggatcctgttgatctgtgaccttatccccaaccctgtgctctctgaaacatgtgctgtgtccactcagggttaaatggattaagggcggtgcaagatgtgctttgttaaacagatgcttgaaggcagcatgctcgttaagagtcatcaccactccctaatcttaagtacccagggacacaaacactgcggaaggccgcagggtcctctgcctaggaaaaccagagacctttgttcacttgtttatctactgaccttccctccacta

SEQ ID NO: 8944 - DNA, 1144 bp, Artificial sequence
  DNA replication origin
caccctcccgtgagcccgcccaagctggagccgcggcgcgctgagcgagcaggcggggcgggagcgcccacagctcggagccaccaggcgctgacgaggagcccggctgagggaggatgcgccgctgacgcctgcgggagccgcgcgcctggggcgggaggatgctccagaggggcctctggccgtggcgcacgcggctgctgccgacccctggcacctggcgcccagcgcgcccgtggccgctgccgcctccgccccaggtaagagcgggtgccgggctgtgggggttcggggtaggctggtgcaaagtttgcgttggacaactttggcgggagcaaaagccgagcggccgagcagtcaactgcgttttgctggctgccgggctccgcgcgccgggcggtcccgacaggtggtggccgggcggccgacgtgggtcacggaggcctgggctgaggtcaagactccgggcccggggaaggtgaagccagagcgctgcggctgggggtgcctcacccgggccgagatagggtgcggggaccaccagacttcggcctgggagcagcagaataacctgggaggcagtttctgggctgcagctctcggtcaggagcaagtttccaaagccgctgcgccgcggggccggttccctcttggtgatcagtgcccgagcccctaaggagcccggaaacgatgaacggggcagtgaccgtcccgggtgtggacggtcgcaggagagtgaaatttccatcctgaaatctgcgagcacctccctttcccagaaggaagaaaaactcgcgttttgttcagacacccgagagacgggtgaatcatgagtgtgctggtgagtaacagttggcctgacaccgttgtattgtggtctgtggagaaccgtggcttggaggagtagagagtggatgtgcaccaaaaaagactagaagaaggggaaagcgctgagtttaaggaggattgcgatggagcctgacaggagcccgggagtgcaaactctgacccagatgaggaaagacagccaaagccttcagggtgtgtgtggttggggagggagctgtttctgagttttcgtttgttcctcccccacactgttaagattactttcagattgttaaaggcttaaaagccaaaaagt

SEQ ID NO: 8945 - DNA, 947 bp, Artificial sequence
  DNA replication origin
tctccgcccggcagccaccccgtccgggagggaggtgggggggtcagccccccgcccggccagccgccccgtccaggagggaggtggggggtcagccccccgcccggccagccgcccggtctgggagggaggtgggggagtcagccccccgcccggccagctgccccatccgggaggtgaggggcgcctctgcccggccgcccctactgggaagtgaggagcccctctgcccggccagccgccccgtccgggagggaggtgggggggtcagccccccgcccggccagccgccccgtccgggagggaggtgggggggtcagccccccgcccggccagccgccccgtccgggagggaggtgggggggtcagccccccgcccggccagccgccccgtccgggagggaggtgggggggtcagccccccgcccggccagccgccccgtctgggaggtgaggggcacctctgcccggccgcccctactgggaagtgaggagcccctctgcccggccaccaccctgtctgggaggtgtgcccaacagctcattgagaacgggccaggatgacaatcgcagctttgtggaatagaaaggggggaaaggtggggaaaagattgagaaatcggatggttgccgtgtctgtgtagaaagaagtagacatgggagacttttcattttgttctgtactaagaaaaattcttctgccttgggatcctgttgatctgtgaccttacccccaaccctgtgctctctgaaacatgtgctgtgtccactcagggttaaatggattaagggcggtgcaagatgtgctttgttaaacagacgcttgaaggcagcatgcttgttaagagtcgtcaccactccctaatctcaagtacccagggacacaaacactgcggaaggccgcagggtcctctgcctaggaaaaccagagacctttgttcacttgt

SEQ ID NO: 8946 - DNA, 1468 bp, Artificial sequence
  DNA replication origin
ccagacagggtggtggccgggcagaggggctcctcacttcccagtaggggcggccgggcagaggtgcccctcacctcccagacggggcggctggccgggcggggggctgacccccccacctccctcccggacggggcggctggccgggcggggggctgacccccccacctccctcccggacggggcggctggccgggcggggggctgacccccccacctccctcccggacggggcggctggccgggcggggggctgacccccccacctccctcccggacggggcggctggccgggcagaggggctcctcacttcccagtaggggcggccgggcagaggcgcccctcacctcccggatggggcagctggccgggcggggggctgactcccccacctccctcccagaccgggcggctggccgggcggggggctgaccccccacctccctcctggacggggcggctggccgggcggggggctgacccccccacctccctcccggacggggtggctgccgggcggagaggctcctcacttctcagacggggcagctgctgggcagaggggctcctcacttctcagacggggcggttgccaggcagaggatctcctcacttctcagacggggtggctgggcagagacgctcctcacctcccagacggggtcgcggccgggcagaggcgctcctcacatcccagatggggcggcggggcagaggcgctccccacatctcagacgatgggcggccgggcagagacgctcttcacttcctagatgggatggcggccgggaagaggtgctcctcacttcctagatgggatggcggccggacggagacgctcctcacttcccagactgggcagccaggcagaggggctcctcacatcccagacgatgggcagccaggcagagacgctcctcacttcccagacggggtggcggccgggcagaggatgcaatctcggcactttgggaggccaaggcaggcggctgggaggtggaggttgtagcgagccgagatcatgccactgcactccagccggggcaccattgagcactgagtgaacgagactccgtctgcaatcccggcaccttgggaggccgaggctggcggatcactcgcggttaggagctgaagaccggccaggccaacacagcgaaaccccgtctccaccaaaaaaaatacgaaaaccagtcaggcgtggcagcgcgtgcctgcaatcgcaggcactcggcaggctgaggcaggagaatcaggcagggaggttgcagtgagccgagatggcagcagtacagtccagcttcggctgggcatgagagggagaccgtggaaacagagggagagggagacggtggggagacgggagagggagagggagagggagagctggatttcaaagcttcccaaattctctttcaattatgatctgggcccttgatttttcttattgctggtgaggcctggtta

SEQ ID NO: 8947 - DNA, 1598 bp, Artificial sequence
  DNA replication origin
ttatagattaacagcatcccaaggcagaagaatttttcttagtacagaacaaaatggagtctcctatgtctacttctttctacacagacacagtaacaatctgatctctctttcttttccccacatttcccccttttctattcaacaaaaccgccatcgtcatcatggcccgttctcaatgagctgttgggtacacctcccagacggggtggcggccgggcagagaggctcctcacttcccaaacgtggtggccgggcagaggtgccccccacctcccagacggggaggctgccgggcgggggcgccccccacctcccagacggggcagctgccgggcggaggggctcctcacttctcagatggggcagccggacagaggcgctcctcagttcccagacggggtggtggccgggcagaggcgctcctcagttcccagacggggtggtggccgggcagaggcgctcctcacctcccagacagggtggcggccaggtagagacgctcctcacctcccagacgatgggcagccaggcagagacactcctcacttcctagacggggtggcggccgggcagaggctgcaatcttcagcactttgggaggccaaggcaggcagctgggaggtggaggttgtagagagcctagatcacgccactgcactccagcctgggcaacattgagcactgagtgagcgagactctgtctgcaatccgggcacctcgggaggccgaggcaggcagatcactcaaggtcaggagccggagaccagcccggccaacacagcgaaaccccatctccaccaaaaaatacaaaaaccagtcaggcgtggcggcgcgcgcctgcaatcccaggcactcggcaggctgaggcaggagaatcaggcagggaggttgcagtgagccgagatcgtgtcagtacagtccagcctcggtaacagagggagaccgcggagagcggcagacagagactatggagagggagatggagagggagagccaaaaaactattaaacctgataaatttcataaagttgcagagtacaaaatcaacatacaaaaatcagtagcatttgtctatgccaacagtgaacaatctgaaaaaataaaaaagtaatcccatttacaatagccacagataaaatatctaggaattaaccaaaggagtgaaagattcctgcaatgaaaactataaatcatagatgcaagaagcggacaccaaaaaaggaaatatattccatgttcatcgattagaagaatcaatattgttaaaatgtccatacttaccaaagcaatctacagattccatgcaatccctatcaaaatgccaatgacattcttcacagaaatagaaaaaacaaatcctaaaatttatatggaaccacaaaagacctagattagccaaaactatcctaagcaaaaagaacaaaactggagaaatcacattacctgagttcaaattatactacagagctatcataaccaaaacagcctagtactggcataaaaagacacatagaccaatggaacagaatagagaacccagaaacaaatccacacacagtgagctcactttcaacaaaggtgccaagaacacatgc

SEQ ID NO: 8948 - DNA, 1032 bp, Artificial sequence
  DNA replication origin
ggtgagcgcggggcgcgagagcagggccatgcgcgcagcgccgggctctacgggtccccgagccgcggcgcggggcgcgtccccacagagtccccaggacgcgctaggcagcggcgcgggccccggacttggcagcagccagctccatatccacgcctccttcccggctggccctcaggatctcgctgtctttacgtgaaccgcctcgggcaggcagcgccgtcgcggggacgcgcccgctcacctggaccagcgcgcccgctcacctgggccagcaaccgtcccctgtgcgcctgcgccggagcacggcgcgtcagcggcgcacgggaggggcgggacgcgcaggggtggggcggggcgggggcggggttggggggggcggggaaccgggggaggggcgcgcggggcgggaaacgggggcggggcctccatgcccacgtggtctccgcggcaccctcccaagacccttggtcctggttcacaagagaaccttaaaaagtacccaggcctgagccccttttctagggagcctgattacgttgtcccaggtggcagtgggcgtcggtattttttaagaaagctctccgggctgttaaccgtgaagcaagagttgcagagctaaccccggtggcctaacctgaccagtcggggctcagcacagtagccccgagagacaagcttttctgggtgtggacaacatcggagaaaataacccctgtgccccctcgcagagagcgctgcgagaggtccagctgagtttccggcttgaagacgtggttccattggcaatgtgggcagagtccggctgtcagctcgcagagcagggcttttcctccttgcgtcctctcccggtcctccagatctgctgtggccgcggttgggggagcgggatctggaagatgccaacccatgccttggcggtgcctgactctaatcaggacgagctaaatgctagtttagactttccggaaaaagaaaatgggccaacataaaaatcataaaattctcccctggtaaggaagaaacagtagt

SEQ ID NO: 8949 - DNA, 936 bp, Artificial sequence
  DNA replication origin
cgcccggccggagcgcgcccactcccagcttcccgcgggctggtccgggccccaatggccatttgcggcggctgccgggcggagcccgcctcctgggccgcgcgcaccggcggggcaggcctgcttggggtgagctgcggcgtggctggtggcggcggtgggctaggggcccaagggccgcgtctggcccgagccggagcctaagaggcggggacgcgggccgctcggaaggactggaagtgcagcagccacacaggcacagggctggtgccctcccgggccgctgaggccagggggtgcaggggtgggtccggaaggaggttggacactaagggtcgagaccgcagatagacctcggcgtttcggggcagccgaggcccctcgagccccaccgcccggggtccttctctggatgcacttcctcctcccgcttagggggtggtgctggaggcggggagggggcggtggccggagccggcgggcgccggaaccgcgctgctggctagccccgggcccgggtcttctccgcacatgtttgtcatatcctccagccggcctgttcgggcccacagtcctcccgcattagcctgtgtggtcagtgtggtcagcatttgcttctgtgccgaatctctgacttgctgcgtcctggtttaacctgctcttccggagtccgctttccctcgctttgctggctgaccccattcactgtacgcccgccattcctagcccactgcagtcgatactgcctcttatttacttgttgctttttctctgaggccacttcctaggcctgcttcaggtaccatttcccgcctcttctctccattcactcagtactgagccagacaggtctcagccctcgtgggactgaaaatgacaaaaatgtgccaacgtatctactcctgttaggttctgaccactgtttcctcctagttc

SEQ ID NO: 8950 - DNA, 954 bp, Artificial sequence
  DNA replication origin
ggtggtcttttgctctttatttggttgttttgctaggcgagaaagagtgttggcggcctagtccctgttaagggagcacgtaccagggggtgggggacgacagtggaggtcagggaaggaagggaggaattgcgtgggagaaagagcgatcctctagtgcccttccagccccttctcctcatccgtgggtctgtggctttggaatggaagcaagtttgcaaggtgccccgggaagggttggaaaagcctgctgccccgcgtttgttttacattaagtgtttttggacctggagaaacgcctggctgagtgatcaaaccgtccgcaggtctccatgcgttcggctgaggtttgtggcgtagctccgagtcccagctcgcaggccagagcagaccaggtctcctgcgcttggtggagacccgggccagtaactgaaagctggccctggtatcttggtgtgcagggcggtgcagtgaagcgaggccagggtgtgtgagtgcgctagcgtgtgtgtcgggggaaggcgggggttggcctccgatggaagttttagtaatctgcactgtggcatctgtttgctcccttgccccaaccgcccccaggtttggttcaagaatcgtcgggccaaatggagaaagagggagcgcaaccagcaggccgagctatgcaagaatggcttcgggccgcagttcaatgggctcatgcagccctacgacgacatgtacccaggctattcctacaacaactgggccgccaagggccttacatccgcctccctatccaccaagagcttccccttcttcaactctatgaacgtcaaccccctgtcatcacagagcatgttttccccacccaactctatctcgtccatgagcatgtcgtccagcatggtgccctcagcagtgacaggcgtcccgggctccagtctcaacagcctgaataacttgaacaacctg

SEQ ID NO: 8951 - DNA, 1079 bp, Artificial sequence
  DNA replication origin
actcgcattatctcacatccctgcgggatagatggcctccacttaccggctaccgggagagagctgctgtctccgcgtcccactgcttcccggggcgatttccagcgagccgagcctccggctgcacggcaagcgcccgaaagccgggcctgagaggactgcagggctcctgagggtgccaagttccgaaggagtccacgggtgcactggggcctccgaaatctagccgccactggcagtttctttctgctcctctccagctttctcgctcggtctcgcactctctctcctctccctccctctcatccctctctcttccctctgctcctactccgtgtggggagtgacgtgacgtcagcagagattccaccaaactccactgcacagtggcgcgcgggcggccggccgagcccggctgcgcggctggcgatccaggagcgagcacagcgcccgggcgagcgccggggggagcgagcaggggcgacgagaaacgaggcaggggagggaagcagatgccagcgggccgaagagtcgggagccggagccgggagagcgaaaggagaggggacctggcggggcacttaggagccaaccgaggagcaggagcacggactcccactgtggaaaggaggaccagaagggaggatgggatggaagagaagaaaaagcaatctgcgccaacccggcagccctaataaatcaaagggggagcgccagggcagcggggagacagaaacgtacttttggggagcaaatcaggacgggctgggaggaagcgacagggaaagtggcccaagagacggaacaaaggacaatgttcatggggttgtttgggacgaggcgtgtggagtgtgggtgtgagcgtgcgtgtgtgaccttctttcaggcctgcagagttgaggaaagaggtcacagcaaagagggactgcggagggaggaaagtgagagaccggtagagggcgggagtggaggtgggcgcggtggggatgggagaggatgagtgaagagaaatctagaagaatggagtgagctagtgggagagggtgggagggccacagccgggagcgaacgagctaggc

SEQ ID NO: 8952 - DNA, 993 bp, Artificial sequence
  DNA replication origin
gagtgtgggtgtgagcgtgcgtgtgtgaccttctttcaggcctgcagagttgaggaaagaggtcacagcaaagagggactgcggagggaggaaagtgagagaccggtagagggcgggagtggaggtgggcgcggtggggatgggagaggatgagtgaagagaaatctagaagaatggagtgagctagtgggagagggtgggagggccacagccgggagcgaacgagctaggcttgtcagctggggaaggccgggacgctgggcccagcttagctgggacaccgcgcccgaggtcaaggcgggtggaccaggcatgctgagagtgtcggcgcacaggtgggcacggccacgcactgacccagtgttcacgaagggtttgcactggacaaggctcagacgctcatagagtctagaatttcctctgctgtacctacattcaacaagttcaccctgggtcacggatatctcattttttaaaatgacgaggttaaggttcctggcgaggatggtattaaattgcacgggatagaagtgggggtgggggagagagtttccctcaagtccacatttgctcctgcaaagcaaagagtatgtgaaattacagggcatattctcactcgaaaagtgtgccttacttctgaaccctgattttctgatttcttgacttgagcaaagatgtgtattttggtagtgagcagaatattttggctctgtcctgcctctgagtggaaggactataaatataattcgcctggaggaccaggtgtgaaggcttctgccaggcatatgggacaatgttttttcaatctcaagggcatcctgttaatgtatgtttttggaaagtgccggaacacagccattgctcctggattcggattttcccaccaatattaattcctgcttgagagcaaaactcaggcccgctattaaaaagacatctctttggtccctaattgagaataaagttccctctaaaagttgtattgctcttcct

SEQ ID NO: 8953 - DNA, 866 bp, Artificial sequence
  DNA replication origin
gtgtgaaaaactatggacatacactgcatgagggagattgtacatgagagaggctgtgtgtatgtatgagggatattgtgtgtgcgtaagagaccgttagagagtgtgagagagacgctgagcgtgatttgtgtgtgtgtgtgagagagattctatataaaagaaactgcgtataagagattgtatgcactttgggaggccgaggcgggcagatagcttgagcccaggagttggagaccagcctgggcaaccccatctctactaaaaatagaattaggcgggcgtggtggcggcagtgtggtcccagctactcaggaggctgaggtgggaggatcgtctcagcgcgggaagtcgaggctgcagtgagcagagatcacaccactgcactccagcgtgggcgacagaaccagaccccgtttcagagagagagagagagagagagaggaggggggggggaaagagagagagagagagagagagagagagattgagattgtatgtgtatgcaagagactgtgagagagagattgtatgagggaacaacagaaactgagagagatcaagtgtgaaagagaaattacttgtgtgagagagccagtgcatatatttaagagagagcgcatttgtataagagattagtgtgtgtgggtttgtatgtgagagagaaacacacacatgcacccagttacactctccagcagagtacccctgttcttgcctgagtatctgcccgtccttttcaaggaagacacatttcactgtccctcttgttcctttagcctcctttcctagtgtctcactgaaggtctgtgtatttgtccctttctgttgagtgcttcctagtgtgtgttgtttgttggagcctt

SEQ ID NO: 8954 - DNA, 913 bp, Artificial sequence
  DNA replication origin
ttccctccaacgccgggcggggctcgcggcccccgacccggccgcttcgccgccgcccctccccgcgctcacctgctcgctctccttcggccgctgtccgcgccgccgcgggctcgccccgggatcccacccggtccctgccgcctcccgctccgccagcgcgtccccgtcctcgtcgcgttccccgccgtcgccgccccgcagcagctccccggctgagcacatcccgcagccaactcctaccgccccggacagccgccggaggaccacgccgcgacgcaccaggcagcgccgccgcccgaaggctgccctgggatccgccgcacccgccgctgacaggagccgccggagcgcgccccgccggcctgggcgcctgaagtaccagcccggcccctcctgtcactggctcgcccaacccccggccgtcggggcggagccgtacaggggaggggccaagacagggggcggggccaacggtgtgttggggggcgggggtgtgtgtgtgagattgagagagaggccgacagactgagagaagaagggtgttgtgtgaaaaactatggacatacactgcatgagggagattgtacatgagagaggctgtgtgtatgtatgagggatattgtgtgtgcgtaagagaccgttagagagtgtgagagagacgctgagcgtgatttgtgtgtgtgtgtgagagagattctatataaaagaaactgcgtataagagattgtatgcactttgggaggccgaggcgggcagatagcttgagcccaggagttggagaccagcctgggcaaccccatctctactaaaaatagaattaggcgggcgtggtggcggcagtgtggtcccagctactcaggaggctgaggtgggaggatcgtctcagcgcgggaagtcgaggctgcagtga

SEQ ID NO: 8955 - DNA, 995 bp, Artificial sequence
  DNA replication origin
ggcggctcctgtcagcggcgggtgcggcggatcccagggcagccttcgggcggcggcgctgcctggtgcgtcgcggcgtggtcctccggcggctgtccggggcggtaggagttggctgcgggatgtgctcagccggggagctgctgcggggcggcgacggcggggaacgcgacgaggacggggacgcgctggcggagcgggaggcggcagggaccgggtgggatcccggggcgagcccgcggcggcgcggacagcggccgaaggagagcgagcaggtgagcgcggggaggggcggcggcgaagcggccgggtcgggggccgcgagccccgcccggcgttggagggaaggggcccggcccgcgggccgcgccgcagctctgccccgcgtgggcactggctccccggcgctctgggaagtcgtcgccgggagcggttagacggcgctcccaggaggagcggcggggtcgcgcgagtgcagacgccagcgccggccccggggtcgcgtgtctggcggggtcagcgtggttcgtcccctggcgtccggcagaggattctcaggctggcgcccagggctcggaggaaatgccctccatagcggtgatttatttaaaagcctcacttgtaaacacttctttttcaacttcgagtccgtgccctgcgccaggtttaggagacgccggctcccctcccgccctccatcttgcgtttccgagcccacacctagcgtgtctggaaggtgtgggtggattccgtccacgggcagcgctgaaagcatgagtaggagcgggtgttacaatgaatgtcttgacagggactctcccagagcacgttcttcataaatacagatgagatcaaagcttcagttaaaaagtggagaggcaagaatattgctttcggttataagaggccagccatagtaagggaaaagagaagttgcgtaattttttaaactctctgagtttatctcatttaaataaagtgtgataatgggcatt

SEQ ID NO: 8956 - DNA, 947 bp, Artificial sequence
  DNA replication origin
tcaggcggggcgcgtcggcagcgcggggctgaggccgggcagggggcgcggggcggcgtggctgcgggtgcggagggctgccggcccgcacggctgctgggtctggtacacgattgcaaacggcgcccttcccgggcgcgggccgtctcccgaggcgccaagacggccgagacggtgcagcgcatcaagaagacccgtagactgaaggccaacaaccgcgagcgaaaccgcatgcacaacctcaacgcggcactggacgcgctgcgcgaggtgctccccacgttccccgaggacgccaagctcaccaagatcgagaccctgcgcttcgcccacaactacatctgggcactcaccgagaccctgcgcctggcggatcactgcgggggcggcggcgggggcctgccgggggcgctcttctccgaggcagtgttgctgagcccgggaggagccagcgccgccctgagcagcagcggagacagcccctcgcccgcctccacgtggagttgcaccaacagccccgcgccgtcctcctccgtgtcctccaattccacctccccctacagctgcactttatcgcccgccagcccggccgggtcagacatggactattggcagcccccacctcccgacaagcaccgctatgcacctcacctccccatagccagggattgtatctagagctgccatttctgctacccacgccaggccttagtgggttccctttcctgtccccagtcgagccctcctcccttcccctgcccctcctttccacgccctggaaaccatctcacttcacagggcaggtgtagcctttctgattcctcggttgtttcttgcatttcttggctttgggtatccttcattcagacgggctctgatttactgaaggtgtgatggagcttattgtcaaagccaagggtggcgttttgggggcgcttcttgagacg

SEQ ID NO: 8957 - DNA, 779 bp, Artificial sequence
  DNA replication origin
tctgaatgaaggatacccaaagccaagaaatgcaagaaacaaccgaggaatcagaaaggctacacctgccctgtgaagtgagatggtttccagggcgtggaaaggaggggcaggggaagggaggagggctcgactggggacaggaaagggaacccactaaggcctggcgtgggtagcagaaatggcagctctagatacaatccctggctatggggaggtgaggtgcatagcggtgcttgtcgggaggtgggggctgccaatagtccatgtctgacccggccgggctggcgggcgataaagtgcagctgtagggggaggtggaattggaggacacggaggaggacggcgcggggctgttggtgcaactccacgtggaggcgggcgaggggctgtctccgctgctgctcagggcggcgctggctcctcccgggctcagcaacactgcctcggagaagagcgcccccggcaggcccccgccgccgcccccgcagtgatccgccaggcgcagggtctcggtgagtgcccagatgtagttgtgggcgaagcgcagggtctcgatcttggtgagcttggcgtcctcggggaacgtggggagcacctcgcgcagcgcgtccagtgccgcgttgaggttgtgcatgcggtttcgctcgcggttgttggccttcagtctacgggtcttcttgatgcgctgcaccgtctcggccgtcttggcgcctcgggagacggcccgcgcccgggaagggcgccgtttgcaatcgtgtaccagacccagcagccgt

SEQ ID NO: 8958 - DNA, 1061 bp, Artificial sequence
  DNA replication origin
attagataaagggggaaaagagaggcgggggtggtgggaggaggaggatggatggcagggccaagggagggggaaaggcggtgaagaaagaggaagaaatgaatgatgataatgcaatgaaaagaataagccagaggagggaaaagcgggggagaaggggggcaggactgacaggaggaggaggcggtggcgggggaggagggggcccggggcagatctgattgttttcttggtggtatataaggggttttaaggagagtcgtgtgccagacacgcagccactgaaccacaagcagcttcgcgttaactggagtgcctgggagtcgcgtgccaggagccgcacggccagggactgactgacagacagacacgcaccaccaccacaacacacgagacccgggcgggccgccgccgccgccgccggggctcttggcaaactcgccggtcgcagaggtcccccgcggagctgcgccacagtagcgccgggcttgcagctttcacgccgggcgaaggacccggcgctgcgctcgcagctgcgcggagattcccggcacaggccaaagtcacagcaacgctgaggcacagttagagccaactaagtaagtattcgagccaccgcttccaactacgcaggtggtttccccgcactcagtccaaccacacccgcacgccctctgctccgcgcagaatctttgtcgcggaggccgcagtcccttctcggggagggaacgcaggaccgcccgcggagggcaggacccggctgactggcagcagggtcacagcgagcgctagcggcgctcctgaccttggttagcactgcctgggtttcttccttcgccttcctgctccgcgccattcggagctggtcttctcgggtgcgcgccggagcacgcccctgtgacacgaagatcgcgcctctgtttctttccttacacctcactgcctttttcccctttctctcttcggtaggatgttcgtcaaatccgagaccttggagttgaaggaggaagaggacgtgttagtgctgctcggatcggcctcccccgccttggcggccctga

SEQ ID NO: 8959 - DNA, 888 bp, Artificial sequence
  DNA replication origin
agacgcccggcagcaccacagggctaactgctttccccgggattctgacccccattaactaattcctagttcccatcacccgggagttaggagggccggcagcgccgggtgcggtgcctgcgcgcgcgccgggcggggggagcctcggcggcagcgaggacgaaggcgggggcggtagcacgggtccccccatccgcccccagcgctcgggcccctaatgagctgctgaaagggagcgggctccggtgcgcgtggctcgcaggcctcccggagtccagggcgccctgattggccagctgcgcctcgcgacctccattcattaataaattagcggcacgctccagccgagcgcgagccaccaatcacaatggacagcggcggcgacaacagccgcagcttgagcctctgcggccgctgcggcttcgccagctccggccgcagcccggagctccaacaggagctttagaaccattttatgttgattagataaagggggaaaagagaggcgggggtggtgggaggaggaggatggatggcagggccaagggagggggaaaggcggtgaagaaagaggaagaaatgaatgatgataatgcaatgaaaagaataagccagaggagggaaaagcgggggagaaggggggcaggactgacaggaggaggaggcggtggcgggggaggagggggcccggggcagatctgattgttttcttggtggtatataaggggttttaaggagagtcgtgtgccagacacgcagccactgaaccacaagcagcttcgcgttaactggagtgcctgggagtcgcgtgccaggagccgcacggccagggactgactgacagacagacacgcaccaccaccacaacacacgagacccgggcgggcc

SEQ ID NO: 8960 - DNA, 1177 bp, Artificial sequence
  DNA replication origin
ccccctcccttggccctgccatccatcctcctcctcccaccacccccgcctctcttttccccctttatctaatcaacataaaatggttctaaagctcctgttggagctccgggctgcggccggagctggcgaagccgcagcggccgcagaggctcaagctgcggctgttgtcgccgccgctgtccattgtgattggtggctcgcgctcggctggagcgtgccgctaatttattaatgaatggaggtcgcgaggcgcagctggccaatcagggcgccctggactccgggaggcctgcgagccacgcgcaccggagcccgctccctttcagcagctcattaggggcccgagcgctgggggcggatggggggacccgtgctaccgcccccgccttcgtcctcgctgccgccgaggctccccccgcccggcgcgcgcgcaggcaccgcacccggcgctgccggccctcctaactcccgggtgatgggaactaggaattagttaatgggggtcagaatcccggggaaagcagttagccctgtggtgctgccgggcgtctcttggcaaagcctcttaggggttgtatcaaatagtaaacgattttaaaatggattcatttggttaggggaggagaatggcgtggatggagagatgtggacacctcgtgaacaagtgtgtttggggtccgtcgaaactggcgtgggagagtgaagggagaggacactggggattcaaacaggcgtctcttgggaggggaggtcggataggggagcagttgatgagcttttagaggatgtgagaatgaaatcactcacatgttagagctgaaaggatccccctcattttacatacaggaaactgaggctccgggcactgatgcaggttttgctggggttaacccagtttatagcctggagggacagcaaggaggcttcctgcgtgggtggcagcgaaccgagcgggaggagcggcagagctgctgctcctgcaagcaaatgcgctgcgctgacatttctgtgacctctgctccgcgctggggggcgttgtagggacaaggggcccatcttcccaattctgcttttcaatgagaaaaaagagctgaagggctactggacctcgggggaaacttgttctcaattgctcgttagccctccccactttccccacgttcatgcccaccct

SEQ ID NO: 8961 - DNA, 1145 bp, Artificial sequence
  DNA replication origin
gtccatgagctcatggctctcctggcgatagcggcagcggctagggaagcagcctcctttctcccggcgccgccgctagaataagcccggcagctcgcactttcagagcacacgcgccgggcgcggcgctgggaaggggcagctgcttgcccagccccgcggccaaggtcgcgtccgaccccggcccgccgcggccccgagtccgccggccgggatgtaggtggcgcgggagggacttcggctgggcgagcagagggcacagccgccccttccactctgcggcgcaggagccggggcgggtccgcggggcgcggcggctgcggagactccgggcgggcgcgggccgcaggcccgacgcggaggagaccgaggagacgcgggagacccgggcgtgacaggaggaagaaacccggagccgcaggaagatggcttctcccacctccccggccccggaaggcggggcctccaccccgccgaacccgccgcggattcgtcaggtgggtgcacaaagtgcgggaggggcgccggcaccccattgtcctcgcgtcccccaagggcggggacctcaaccccaatgcggcggctcccctaggagcggggccgacacgagccaacttggctacatcgcccggcccaggaccattctctaaacctcttttctcagtctcacttcacacacagacacacatacagacacacacgcagatagccctagaaaaatacacgtcttccaaaaccagacgtgtaacttctgaacgcacgcacactcacacacacgcaccccgcaaactcatccctcccaccccgcacagaggcacacacccagctgtcacatgacccactgcagagctataccgttagaagaaaccagggtgcccctgggggaaaggtaccccagacccaaactccccgaggaccttgagaaggattgctggaagcatttacttccacccataggagagcaggaacctcatctagaggttactcaccatttctcaactttcgggcaaagcttcacccaacaactgcagccctgtatcctgcattagccatgtagtacagaaaacatgtgttcctgttctctccacgtctatagagacacaaacagcttcccccagcactgcaaggaggaatgcacgtttctt

SEQ ID NO: 8962 - DNA, 862 bp, Artificial sequence
  DNA replication origin
caccaacccatctaggaagtgaggagcgtctctgccccgccgcccatcgtctgagacgtggggagcgcctctgccccgccgccccgtctgggatgtgaggagcgcctctacctggccgcgaccccgtctgggaggtgaggagcatctctgcccggctgccccgtctgagaagtgaggagaccctctgcctggcaaccgccccgtctgagaagtgaggagcccctccgcccggcagccgccccgtctgagaagtgaggagcccctccgcccggcagccaccccgtctgggaagtgaggagcgtctccgcccggcagccaccccgtccgggagggaggtgggggggtcagccccccgcccagccagccgccccgtccgggagggaggtgggggggtcagccccccgcccggccagccgccccgtccgggaggtgaggggcgcctctgcccggccgcccctactgggaagtgaggagcccttctgcccggccaccaccccgtctgggaggtgtacccaacagctcattgagaacgggccatgatgacaatggtggttttgtggaatagaaaggggggaaaggcggggaaaagattgagaaatcggatggttgctgtgtatgtgtagaaagaagtagacatgggagacttttcattttgttctgtactaagaaaaattcttctgccttgtgatcctgttgatctgtgatcttacccctaaccctgtgctctctgaaacatgtgctgtgtccactcagggttaaatggattaagggtggtgcaagatgtgctttgttaaacagatgcttgaaggcagcatgctcgttaagagtcatcaccactccctaatctcaagtacccagggac

SEQ ID NO: 8963 - DNA, 1269 bp, Artificial sequence
  DNA replication origin
atgtttcagagagcacagggttaggggtaagatcacagatcaacaggatcacaaggcagaagaatttttcttagtacagaacaaaatgaaaagtctcccatgtctacttctttctacacatacacagcaaccatccgatttctcaatcttttccccgcctttcccccctttctattccacaaaaccaccattgtcatcatggcccgttctcaatgagctgttgggtacacctcccagacggggtggtggccgggcagaagggctcctcacttcccagtaggggcggccgggcagaggcgcccctcacctcccggacggggcggctggccgggcggggggctgacccccccacctccctcccggacggggcggctggctgggcggggggctgacccccccacctccctcccggacggggtggctgccgggcggagacgctcctcacttcccagacggggtggctgccgggcggaggggctcctcacttctcagacggggcggctgccgggcggaggggctcctcacttctcagacggggcggttgccaggcagagggtctcctcacttctcagacggggcagccgggcagagatgctcctcacctcccagacggggtcgcggccaggtagaggcgctcctcacatcccagacggggcggcggggcagaggcgctccccacgtctcagacgatgggcggcggggcagagacgctcctcacttcctagatgggttggtggccgggaagaggcgctcctcacttcctagatgggatggcggccgggcagagacgctcctcactttccagactgggcagccaggcagaggggctcctcacgtcccagacgatgggcggccaggcagagaggctcctcacttcccagacggggtggcggccgggcagaggctgcaatctcggcactttggaggccaaggcaggcggctgggaggtggaggttgtagcgagccgagatcacgccattgcactccagcctgggcaccattgagcactgagtgaaccagactccatctgcaatcccggcacctcgggaggccgaggctggcggatcactcgcggttaggagctggagaccagcccggccaacacagcgaaaccccatctccaccaaaaaaatacgaaaaacagccaggcgtggcggcgtgcgcctgcaatcgcaggcactcggcaggctgaggcaggagaatcaggcagggaggctgcagcgagccgagatggcagcagtacagtccagcttcggctcggcatcagag

SEQ ID NO: 8964 - DNA, 1266 bp, Artificial sequence
  DNA replication origin
cggccgctgggctcaggctgtccgctctgggctccgcggcctcggccccgctgcactccacctccgccccctcggactccctcccctctgcttctactcctcctgctccagtgcggatcgtttcgcaactgcttgccactcgtcccgtgcctggctgtttttccatttcccggccccctcttcttgagtactttaccccctgcatttggggacagggactggaaaaggggcgggtggagcgtccagtggagaagaaggaagcgaggcccgcaggaggaggaggatcggcggactgtggggaggagaccccacgccaccctttctggtcatctcccctcccgccccgcccctgcgcacactccctcgcgggcgagctactttcggaccaggaaagtaagagcggccctgggtgacagcgccgcggggccagtcccggggttagccgcgcgtctgctcgcttctggtccgtcgcgctcccagccagggcacagcccggaccgaggatggcttcgaccacaacctgcaccaggttcacggacgagtatcagcttttcgaggagcttggaaagtaagcacctttgcccggcatccgcatatcccctttccagctgagggcgggtcgcgttgcccccgacccaccggcctccgtcttggggcgagggagtttgggagaggaatgggaggagggcccctggtttgtcagctctggggaaggtgctgtcttaataaagggagggagcacagaaggggtaggacccttactccaactgtggctcattttgatggtccctagcccaccttctcccggtcccccaccctcctgcactgagagacttagtgaatttacgatctctgcagttgtagctatcatcctgagaagtgtgcgcgcgcgcctgtgtgtaatgtgtgtttggagaggaaattagaacccatgtaaaatgcaacatagatcatgttttctgtaaatagagatgcctcctggttagccggcgtgtcggccgtatgacccaggtactgatgagaactcacagcctcagacggtgccatatttattgatgccgaaagttcaacttggcatagagtctatttcgcatccagtagttgttctgtccaggaaaagggccacccaacagaacccaaccccttgccctatatccagtgttgttctttgcaccagattaccgctcaccatcattcttcctaggatttacgtgtgcatctttgcgttctctgggaggatttatttatacaggcaacggaaaagcc

SEQ ID NO: 8965 - DNA, 1014 bp, Artificial sequence
  DNA replication origin
cccacctttcccccttttctattccacaaaaccgccattctcatcatggcccgttctcaatgagctgttgggtacacctcccagacggggtggtggccgggcagaggggctccccacttcccagcaggggtggccgggcagaggcgcccctcacctcccagacagggcggctggccgggcggggggctgaccccccacctccctcccagaaggggcagctgaccaggctgggggctgagacccccacctccctcccggacagggtggctgcggggcggaggggctcctcacttctcagatggggcagttgccaggcagagggtctcctcacttctcagatggggcggccgggcagagacgctcctcacctcccagacagggtcgcggccaggcagaggtgctcctcacatcccagacggggcgatggggcagaggcgctccccacatctcagacgatgggcggccgggcagagacactcttcacttcctagatgggatggcggccgggaagaggcgctcctcacttcctaggtgggatggcagccgggcagagatgctcctcactttccagactgggcagccaggcagaggggctcctcacatcccagacgatgggcggccaggcagagacgctcctcacttcccagacggggtggaggccgggcagaggctgcaatctccgcactttggggggccaaggcaggcggctgggaagtggaggttgtagcgagccgagatcacgccactgcactccagcctgggcaccattgagcactgagtgaacgagactccatctgcaatcccggcacctcgggaggccgaggctggcggatcactcgcggttaggagctggagaccagcccggccaacacagcgaaaccccgtctccaccaaaaaaatacgaaaaccagtcaggcgtggcggcgcgcgcctgcaatcgcaggcactcggcaggctgaggcgggagaatcaggcagggaggttgcagtgagccgagatggcagcagcacagtc

SEQ ID NO: 8966 - DNA, 918 bp, Artificial sequence
  DNA replication origin
agcgcctcttcccggccgccatcccatctaggaagtgaagagtgtctctgcccggccgcccatcgtctgagatgtggggagcgcctctgccccatcgccccgtctgggatgtgaggagcacctctgcctggccgcgaccctgtctgggaggtgaggagcgtctctgcccggccgccccatctgagaagtgaggagaccctctgcctggcaactgccccatctgagaagtgaggagcccctccgccccgcagccaccctgtccgggagggaggtgggggtctcagcccccagcctggtcagctgccccttctgggagggaggtggggggtcagccccccgcccggccagccgccctgtctgggaggtgaggggcgcctctgcccggccacccctgctgggaagtggggagcccctctgcccggccaccaccccgtctgggaggtgtacccaacagctcattgagaacgggccatgatgagaatggcggttttgtggaatagaaaagggggaaaggtggggaaaaggttgagaaatcggatggttgctgtgtctgtgtagaaagaagtagacatgggagacttttcattttgttctgtactaagaaaaattcttctgccttgggatcctgttgatctatgaccttacccccaaccctgtgctctctgaaacatgtgctgtgtccactcagggttaaatggattaagggtggtgcaagatgtgctttgttaaacagatgcttgaaggcagcatgctcgttaagcgtcatcaccactccctaatctcaagtacctagggacacaaacactgcggaaggccacagggtcctctgcctaggaaaaccggagacctttgttcacttgtttatctgctgaccttccctccactattgtcctatgaccctgccaaatccccctctgc

SEQ ID NO: 8967 - DNA, 1779 bp, Artificial sequence
  DNA replication origin
cgtgccccgctgagccaagtgcggaagggcagcggcgcgctccgactctgctcgccgcacgcagggcggggcgcggctggggggcggggggcctggccgcccgctgggagctgcggacgagcaggcgcgctgaggacccgagggaggacacggttaaagcattgctatcaactgtgaacccagagagccctccttagccaacacgctaactccgaagcctcccttacgcccccgaaccaccgaaggcggcgacacctgattcagcgcacaaacacaggtcccttctgtcccggatacaattacgcggcagacacacactcaaactcgcgcggggcagccaagagacgaggtgagcggagggaccacgccgttccagagggcggaagggggggcggtctgggtggaggagaggggcgttgtttgctccctgaggtgagtgccgggcgaatggctgctgtccaggggcgggggggtgggaattagaaagcacagacagggttgggctgaggaagttagaagtggttagtgggggttggcggggtagggagaaaggctaggggttgagggggtgtgaaggagatctttttaggctggcccctcatagcgcccgcgatcctgtttctgccatatggcatccgttcgagggttctctcgcgtttgtgcgctcaaggcagagggagggtataacggggaggcgattcggccgaggaccttgtacttgacccctgaagggatgggcaccgcggagcccagaggccagagccagctgccagggcagggatggaggtgggggaccaggaggagcttcgggacctcttcaactcccctttactccgtcttccccctaaggaggaacaagagcgggatgtgttgggggtggggaatgtcttggggctgtacaagctcgctgagacttttcggggcccgccgtttccgcgtgcccgcgcgactctcgacaatggacagtgtacagtggtggcagggtttcacgggtccccgcgccgatttgggaatggtacggggtgcccttgcattagagaagcctgtgcgggcccccgggattagagaagaggtgagcgcctgcgggcggggagagaaggacgcgctgctggcaaaaagaagggcgccttccatggactggaggagcggcgagggagcctggtatgtgtgttttggatttgaaggaggcaaaccgcatcggagagtgcaagtagatgcagtgcgtcggggcaaaaggacaatctgaggaggtgggcggggtacccaatctctatatacaagctttctggtttaattgagggtttataaaattgagtacggtaaacctgccattgtgcagcacttccttaggaaaggaatagcctctgtacctgtaccgcgagttcccatcacctttcagcatctaggcggggagaggagagaaggtagagaacttctgagagagttctgagaactaacgcgaatggctggattgcgctaactaggcgttcttagcaggaaaatgtcgccaagggaaggagtgggtggcggtatcaaaccaggcgtgctctggagaatcacctttattatgagccagtgttagcagtgacgatagagtcttttatttctggggatcctattggtaaaaattagaaaaaaaccacactactccaaatactccaaaaatcttcagtcccctcaggctgtcaccttgtactaccagtttttcagtatcaatgacgtgaatgttagggagtttggctagatgccaaattgttatcatttctgataatttcatgt

SEQ ID NO: 8968 - DNA, 1028 bp, Artificial sequence
  DNA replication origin
gaagcccctttctgggctggccaaggccggagccggctccctcagctcgcagggagttgtggagagagaggcgcgagcgggaaccggggctgcccggggcgcttgtgggccagctggggttccgggtgggcgtgggcttggcggaccccgcactcggagcagcggcgggccctgccggccccggcaatgaggggcttaacacccaggccagcggctgcggagggtgtactgggtcccccagcactgccggcccaccggcgctgcgctcgggccttagctgccttcctgaggggcagggctcgggacctgcagcccgccatgcctgagcccccgcccccgccgtggactcctgtgcagcggagcctccccaacaagcgccaccccctgctccgtggcgcccagtcccatcgaccacccaagggctgaggagtgtgggctcagggcgtgggactggcaggcagctccacctgcagccccagtgtgagattcactgggtgaaaccagcggggctcctgagtctggtgggaacttggagaacctttatgtctgggtcagggattgtaaatacaccaatgggcagtctggatctagctcaaggtttgtaaacacaccaatcagcaccctgtgtttagctcagggtttgtgaatgcaccaatcgacactgtatctagctactctggtggggacttggagaacctctgtgtgtagctcagggattgtaaaggcaccaatcagtgccctgtcaaaacagaccactgggctctaccaatcagcaggatttgggtggggccagataagaataaaagcaggctgcccagaggcagcagtggccaccggctccggtccccttccacactgtggaagctttgttcttttgctctttgcaataaatcttgctactgctcactcttcgggtccacactgcctttatgagccgtgacactcaccacgaaggtctgcaacttcactcctgagccagcgagagcacgagcccaccgggaggaatgaacaactccagacgtgccacc

SEQ ID NO: 8969 - DNA, 1185 bp, Artificial sequence
  DNA replication origin
ggaggcaaggaattgcaacttttttctattattgtacaccttgaaggtgaggttaattaaatcctgttgtggggtttgagggacggaatttaatttttggagttttatttaatgtcgggagcagattgggtaataaaatgtattttgagaataagacggccttttgaccttttagggtctagggctgtaaaatgtctcagggttgctgccaaatgagtcatgaactgggctgggtttctatatttgatgaaaaagagcctaaacactatctgatttgggacaaagaaaaaggagcattaatcttgattatgcctttagctccagtcacctttttaagagtacattgctgggcaggtgggggagggctagtcacggaatgaaactgtaagccggaccgggtgtgaggaggggaggtgataaaaggattatagggtggaggagcggaggctgaggaagaattgggacctagctcggcctggcaaggagcagcctggggaggaggggagaggtcagatgggtctgtagaaaaggaagattagaaagactcagcgacgcttggggttgggatgaggggacaggtgggagggaaagaaggaagatttgggatgagttgcattgggaacagagactagagagggaccgatgtgtaaaagaatgcctggacatcaggcacctcagaccatttgcccattttatgacaagaattatttagatcttgtaggatgggaaaattgaaagtgccattttctggctatttggaactactgtcgagtttgtattggggtcaagtggcattgcagaagaaaataagatgcttagattttaggtcaggtgagagttgaagaggttttaagtttttgaggacacaggctaagggagaagaaggaggaatggagggtggaaggtcgcccatagtgaaggaagcaagcctagagaaaagagagagtagagacatggacggaaggggttcgtgggtttttaccttccagaaaagtgggaaaggggttgaggcatggaaataagggattggggcgcagagatacgaggttggggtacttgcccctcctctagaaatgtaggacttgcggctcagggtgaaggagaaggggttgggggtttcttgccccccagaaaggcggagaaggtgtagagacacggagagaagggtttggggtacttgcccct

SEQ ID NO: 8970 - DNA, 739 bp, Artificial sequence
  DNA replication origin
caccgccattcgccccctgcgggtccgcactacccctattaccttcccacccagcagcggcccccgaggacgcgtccgccgccgcctctcccgcgcttcccgcgccccccgcgggcgctccctgcccagcgcccgcacgccctccaggccgggcacacgccccggccgcacccctggggctgccccgccggcgagccatgggtcagcgtgacggacttcggcgccccgtgtctgcggtgggcggaggtgccacccttcctggagcggtcgcccccagcgagctgggctcagctgcgaggacagcgccacaacttttgtcggagccccgacggcgcgggcagaccctggtgtttctacggagacgcccgtggcaaggtggactggggctactgcgactgcagacacggttagtggcctcggggcggccgcggaaactccggacgggctcggagccagtgaggcttggggccggcgtacaggtctcttggaaaaagtgacggggtgtgtggggttgtgggcttgcgtttgcgggctgtgatggtgggctgcagctgggttaccagtaaggtatactggtgctgcaaatctaagccagccaggtgtgcttgtgtgaaggttgtcaggggtgacagttctatgcaaggtgctgagctctgggtttctgaatttgctctgtcctctggccactgtgtgtgtgtgtgcgctcgtgtattgggtgacagtgtgctttgggcgtctg

SEQ ID NO: 8971 - DNA, 1240 bp, Artificial sequence
  DNA replication origin
aaagagtcagccaggaggcaggcactaggcctggaaatggcccgacagtcatgagtggggcctaaatgggccactgtgagggaggagctgtgcctgttgaggctgctggcaggcaggaagaaatttggcctggggcagctgccatgaggcaagagctgggcttggaaaagcccctgggaggcaagagcagggcctgcagaggctgttctcaagtcaaagctgggcctgttcatgccaccaggaagcagaaggtgggcctggagagtatgacctgaggaagttttgggcctacattggccgccatgaactggacaggaactgggccaaaaaaggctgttgtgaggcagcagttgtgcctgtagactcagccaataggaagagctgggcccggagaagcccccatgaggcagaggttgggcctgtagatgctgacaggaggcaggagctgggccgggagaggtcaacttgaggagattttgggccttcataggccaccaggaggcagcagttgggactagagaggctgacttgagtaagttttgggcccggagatgacgttctgggacaggagctgtgcctggagaggtcaccgtgaggcatgagctggatgtagagaggccagtgtgaggcaagacctgggcctgtctaggctgctgggagacacgcaggaatctggccagggaaggttgccatgagacgaaagttgggcctggaaaggcccttgtgaagcatgagcttggcctaaagaggccactgggtggcaggagctgggtgtgtagaagctgctgaaaggttgggagcttggcttggggggtccacagtgaggcagatgctgggcctcaagaatctgctatgaggcagatgttgggactgtagaggccgacgggaggcagaggctgggcctggaggggccaccaagatgcaggagctgggcctggagaggctgcaaagaagcatgagctgggcctggtgaggtcgacttcagaaagttcagggcctggagagaaggctgggaggcaggagctgggtctaaagaggccattgtaatgatggagctgtgcctgtggaggctgttgtgaggcagtaggctcatctgcggagactgccgtgaggtagggtatgggcctaaataggccattgtgagtcatgagcttggtctgtagaggctgactggagaaagttctgggcctggagaggctgccgggtggtaggagctgggccaaaagatttaagcacattt

SEQ ID NO: 8972 - DNA, 953 bp, Artificial sequence
  DNA replication origin
ggttatagattaacagcatcccaaggcagaagaatttttcttagtacagagcaaaatggagtctcctatgtctacttctttctacacagacacagtaacaatctgatctctctttcttttccccacatttcccccttttctgttcgacaaaatcgccatcgtcatttaggcccgttctcaatgagctattgggtacacctcccagaaggggtggcggccgggcagaggggctcctcacttcctagacagggtggccgggcagaggcgcccccccacctcccggacggggcagctggccgggcgggggctgccccccacctcccggacggggcggctgccgggcggagggtctccttacttcccagacggggcggccggtcagagacgctcctcacctcccagacggggtggcggcggggcagagacactcctcagttcccagacggggtcgcggccgggcagaggcgctcttcacatctcagacggggcggcggggcagaggcgctccccacatcccagatgatgggcggccaggcagagacgctcctcacttcctagacgggatgaggccgggaagaggcgcttctcacttcccagacaatgggcggccaggcagagacgctcctcacttcctagacggggtggcggtcgggcagaggctgcaaactcagcactttgggaggccagggcaggcgcctgggaggtggaggttgtagcgagccaagatcacgccactgcactccagcctgggcaacattgagcgctgagtgagcgagactccgtctgcaatcccggcactttgggaggccgaggctggcaggtcactcgcggtcaggagctggagaccagcccggccagcacggcgaaaccccgtatccaccaaaaaatacgaaaaccagtcaggcgtggcggcgcgtgcctgcaatcccaggcactcggcaggctgaggcagg

SEQ ID NO: 8973 - DNA, 1522 bp, Artificial sequence
  DNA replication origin
caccatctgggtctgcagggtccactgtgaggcagaggctggcctgtagagtccgacagtagacacaagttgggcaaaaggctgatttgaggaagttttgggcttcaagagtcagccaggaggcaggcactaggcctggaaatggcccgacagtcatgagttgggcctaaatgggccaccgtgagggaggagctgtgcctgttgaggctgctggcaggcaggaagaaatttggcctgaggcagctgccatgaggcaagagctgggcttggaaaagcccctgggaggcaagagcaggccctgcagaggctgttctcaagtcaaagctgggcctgttcatgccaccgggaagcagaaggtgggcctggagagtatgacttgaggaagttttgggcctacattggctgccatgagctggacaggaactgggccaaaaaaggctgttgtgaggcagcagttgtgcctgtagactcagccaagaggaagagctgggcctggagaagcccccatgaggcagaggttgggcctgtagacgctgacaggaggcaggagctgggccgggagaggtcaacttgaggagattttgggccttcataggccaccaggaggcagcagttgggactagagaggctgacttgagtaagttttgggcccggagatgacgttctgggacaggagctgtgcctggagaggtcactgtgaggcatgagctggatgtagagaggccagtgtgaggcaagacctgggcctgtctaggctgctgggagacacgcaggaatctggccagggaaggttgccatgagacgaaagttgggcctggaaaggcccttgtgaagcatgagcttggcctaaagaggccactgggtggcaggagctgggtgtgtagaagctgctaaaggttgggagcttggcttggggggtccacagtgaggcagatgctgggcctcaagaatctgctatgaggcagatgttgggactgtagaggccgacgggaggcagaggctgggcctggaggggccaccaagatgcaggagctgggcctggagaggctgcaaagaagcatgagctgggcctggtgaggtcgacttcagaaagttcagggcctagagagaaggctgggaggcaggagctgggtctaaagaggccattgtaacgatggagctgtgcctgtggaggctgttgtgaggcagtaggctcatctgcggagactgccgtgaggtagggtatgggcctaaataggccattgtgagtcatgagcttggtctgtagaggctgactggagaaagttctgggcctggagaggctgccgggaggtaggagctgggccaaaagatttaagcacatttacatttattaggcacttcgtttccattattacactgtaatatctaataaaataattatagaactcaccataatgtagaatcagtgggcatgttaagcttgttttcctgcaactggatggtcccacctgagcgtgatgggagaaagtgacagatcaataggtattagattctcataagg

SEQ ID NO: 8974 - DNA, 1253 bp, Artificial sequence
  DNA replication origin
ggtcattgcactcccaggccccaggaaaagggcccagggtctcatcatctcttactttcgggcaaaacttcccacatcgcgaccttccctccctggggcactctgagaacacacccagtcacctagcgcgctccccagaagtcggcttggcacacagcgcaccccagcggccgcgcggcctccttccagccgccgccacttggcttccggagagctcgccgggcgctgccgctgccgccgccgccgccgcctcctgggaaccaggggactgaagagcctgcgagagcggaacactgccggaccccgggtggggggggcgcagcagctgcgcctggccccgcccaccacacctgggcgcccgtagaaccgcgcggggcggggcggggcaggaggctggcctggcgctccggccgctttgtcgaaagccggcccgactggagcaggacgaagggggagggtctcgaggccgagtcctgttcttctgagggacggaccccagctggggtggaaaagcagtaccagagagcctccgaggcgcgcggtgccaaccatggagcgggccggccccagcttcgggcagcagcgacagcagcagcagccccagcagcagaagcagcagcagagggatcaggactcggtcgaagcatggctggacgatcactgggactttaccttctcatactttgttagaaaagccaccaggtaagaagaggacccacggaagacccggggctgatttctctcccctgttgaattgtgcccttcgttcacccctgttcccaggccctttgcttttgaagtaggtcctcggtcctgttacgaggtagaaacctcaactctaagcgagcacagtcgaaaaactcaagtgtcggatttgatacaacttgctcacaaagttcaaatacaaaaatgtacttgccgacctcccaccctcacccccgaccctcttggtattccccgggaacatgattattttcatacatccgtgctcacgggccttcccctagcccctctctagccctctggttccccaaaatccaatcagcaaaacccaaacagtttctgagccccttccctgcagctccggaagcaccatttccaagtcggtcttgatggctccgctcctcccccgtcccccctcgccctggccctggctgggcggggaagctggggtgagggacgagtccacgggacagcccaaaggcaacatgacggaaccttgccaaagtgagtgcggttgccttttcccccct

SEQ ID NO: 8975 - DNA, 1341 bp, Artificial sequence
  DNA replication origin
gctgatgtgtaaaagaatgcctggacgtcaggcacctcagaccgtttgcctattttatgacaagaattatttagatcttgcaggatagaaaaattcaaagtgccattttctggctatttggaactactgtcgagtttgtattggggtcaagcggcattgcagaagaaaataaggcatttaggttttaggtcaggtgtgagttgaagaggttttaagtttttgagaacacaggccaagggagcagaaggaggaatggagggtggaaggttgcctatagtgaaggaagcaagcctagagaaaagagagaaaaacagagggaaggggttcgggggttcttaccttccagaaaagtgggaaaaggggttggggcgcagagataagaggtcggggcacagagataagaggttgggatgcagaaataagggatggggcgcagaaataaggggtcagggcatggaaataaggggaaggggcacggaaataaggggtaggggcacagaaatagggggtaggggcacggaaataaggggtaggggcacagaaataaggggtcggggcacggaaataaggggttgggacactgaaataagggattggggtgcagagatataagaggttggggcacggaaataagggattggggcacagagatacgaggttggggcacttgtccctcctctagaaaagcgggacttgccactaagagtgaaggagaaggggttgaggggtacttgcccctctcccagaaaagcagagaaggagtagagacaaggagagaaggggttgggatactcgccctttcctcggaaagcagagaaggggtagagacaaggagagaaggagttggggtacttgccccttccccagaaaagcgggacttgccgctaagggtgaaggaccaaggcaggcgtccatgcgtggtctgacacctttgaaacgtgggtgaatagagaggcgtccctgcaatgattaaacaccaagggaaggctgtcttcccagtccgtgaccggcgccggagttttgggtccatggataaaacatgtctcctttgtctctatcagaaaatgaaaggaattgaaattaagagaagggagagattgaagtgtggcgccaagattgaaaggagaaagaggttgagggatagtgagggaggttggagaagagggtaaaaagaggccgcttaccagatttgaaattggtgagatgtttcttgggctggtcggtctgaagacctaaggtcataggtggatctttctcacggagcaaagaacaggagtacaggggattgatctcccaagggaggtcccccatccgagtcacagcaccaaatttcatgcgcgt

SEQ ID NO: 8976 - DNA, 1327 bp, Artificial sequence
  DNA replication origin
tcctttgctcataaagacagctgtggccagtgctccttggaaagctgggctctgttctcactttgattgcttttcttatgggaaaaactcctaaagctctttcagaaaaagatatccaccttgcacctaagcaaaaccttctggggttgataagtgaaaataaaagagcctcagagttgtgaatgattcacacattcatgtagagttctgtatacgccttttggataaatggccaaagtcatccccaatggatgtacccgaactaagagttcaaatggggaaaaaacaaagtgaggtgaggcttagtgcaaacaaagtttagaattagaagataactttttataacttcctcaagttagcaagtagtttcagaacaagcagaaattggaaagcaactgttgttatagtagttattaaagccttaatgggaaatgtctcagtgcaagttgagcttcagctggcagaactgctagactatgggcagcagagtgctctgcgggaggccaggatgtctgacttgccagagagtacagaaaacccagtcaaaacattgaaccaggatattaagttaccggagaaactcaaaacacagaaccaaggggcagacaggccagagtagtcagacagtaggacatgctagatcaggatcagagatcacatggtggaatcaaccattagcatcagtagtcagaacaactactgtatcccaggaccctttgagatgagactaaaatttcctacctgttcttgcccttcctataaggggtctgtgtcatcctataaatggaaagttcatctagacaatatttcctgcttcatgcttcagaaaatcccgggatgggcagtgaggtgagacttaggatcattgcctatgagcagcaaagggtggaaaagatcaaagggttgtgagggtatccaattcccaggacctttctttgggtccacatctgcacaatcatagaacagtaatattggagatcaaaggtcttggcttgagctgaaactacttcctgactttttgctgtgatagttagaggtagacagttaaactaggttggccaaaaagaagaggaatcaaggtaaacatcaatgtggcagttactcccaataaagcagatttgaaagtatttcgaaaggttcaataaaataattgtgtggttattggagattgtagaaaagatattgtgggttaaaaattacaatctccctctccctctcccgcttcctctccctctcccgctcccgctcccgctccctctccagctccccctcccgctccctctccacctcccgctcccgctccccctccctctcccgatttccacag

SEQ ID NO: 8977 - DNA, 779 bp, Artificial sequence
  DNA replication origin
aacagccgccgctccggcgggctgctcgctgcatctctgggcgtctttggctcgccacgctgggcagtgcctgcctgcgcctttcgcaacctcctcggccctgcgtggtctcgagctgggtgagcgagcgggcgggctggtaggctggcctgggctgcgaccggcggctacgactattctttggccgggtcggtgcgagtggtcggctgggcagagtgcacgctgcttggcgccgcaggctgatcccgccgtccactcccgggagcagtgatgttgggcaactctgcgccggggcctgcgacccgcgaggcgggctcggcgctgctagcattgcagcagacggcgctccaagaggaccaggagaatatcaacccggaaaaggcagcgcccgtccaacaaccgcggacccgggccgcgctggcggtactgaagtccgggaacccgcggggtctagcgcagcagcagaggccgaagacgagacgggtaaagggatgcgggatatctgcaggagggtgggtcgagcagggtttggcattggcttagcaggcagagaagagtggcgagaaggcatgtcctgggcttttggaagggggccagggtctggagtgcagttggtgctggtgtgtggtttgccacagtaggagttctcccatattagcatcaggaccccgccaacactgtgtgtatgctgccggtctgctctctatagggggcatctgcctgtacataatggggtcaaaccaagctctaaaacgtgtagtcttcgctcagctccgcgc

SEQ ID NO: 8978 - DNA, 1342 bp, Artificial sequence
  DNA replication origin
acccccccacctccctccccgaccgggcggctggccgggccgggggctgacccccccacctccctcctggacggggcggctggccgggcagaggggctcctcacttcccagtaggggcggccgggcagaggcgcccctcacctcccggacgaggcggctggccgggcggggggctgacccccccacctccctcccggacggggcggctggccgggcagaggggctcctcacttcccagtaggggcggccgggcagaggcgcccctcacctcctggacaaggcggctggctgggcaggggtctgacccccccacctccctcctggacggggcggctggccgggcagaggggctcctcacttcccagtaggggcggccgggcagaggcgcccctcacctcctggacaaggcggctggctgggcagggggctgacccccccacccccctcccggacgggtcggctgccgggcagagaggctcctcacttcccagacggggtggctgccgggcggaggggctcctcacttctcagacggggcggctgctgggcggaggggctcctcacttctcagacggggcggctgctgggcggaggggctcctcacttctcagacggggcggttgccgggcggagggtctcctcccttctcagatggggcggctgggcagagacgctcctcacctcccagacggggtcgcagctgggcagaggcgctcctcacatcccagacggggcggcggggcaaaggcgctccccacatctcagacgatgggcggccgggcagagacgctcctcgcttcctagatgggatggtggccgggaagaggcgctcctcacttcctagatgggatggcggccggacagagacgctcctcactttccagactgggcagccaggcagaggggctcctcacatcccagacgatgggcggccaggcagagacgctcctcacttcctagacggggtggaggccgggcagaggctgcactctgggcactttgggaggccaaggcaggcggctgggaggtggaggttgtagcgagccgagatcacgccactgcactccagcctgggcaccattgagcactgagtgaaccagacaccgtctgcaatcccggcacctccggaggctgaggctggcggatcactcgcggttaggagctggagaccagcccggccaacacagcgaaaccccgtctccaccaaaaaaatacgaaaaccaatcaggcgtggcggcgcgcgcctgaaatcgcaggcactcagcaggctgaggcaggagaatcaggcagggaggctgcagtgagccgacatggcagcagtacagtccagcttcggctcggc

SEQ ID NO: 8979 - DNA, 920 bp, Artificial sequence
  DNA replication origin
cctactgggaagtgaggagcccctctgcccggccagccgccccgtccaggagggaggtgggggggtcagacccctgcccagccagccgccttgtccaggaggtgaggggcgcctctgcccggccgcccctactgggaagtgaggagcccctctgcccggccagccgccccgtccgggagggaggtgggggggtcagccccccgcccggccagccgcctcgtccgggaggtgaggggcgcctctgcccggccgcccctactgggaagtgaggagcccctctgcccggccagccgccccgtccaggagggaggtgggggggtcagcccccggcccggccagccgcccggtcggggagggaggtgggggggtcagccccccacccggccagccgccctgtccgggaggtgaggggcgcctctgcccggccgcccctactgggaagtgaggagcccctctgcccagccaccaccccgtctgggaggtgtgcccaacagctggttgagaacgggccatgatgacaatggcggttttgtggaatagaaagcggggaaaggtggggaaaagattagaaatcggatggttgccgtgtctgtgtggaaagaagtagacatgggagactttttattttgttctgtactaagaaaaattcttctgccttgggatcctgttgatctgtgaccttaccccgcaaccctgtgctctctgaaacatgtgctgtgtccactcagggttaaatggattaagggcagtgcaagatgtgctttgtgaaacagatgcttgaaggcagcatgctcgttaagagtcatcaccactccctaatctcaagaacccagggacacaaacactgcggaaggcctcagggtcctctgcctaggaaaaccagagacctttgtcacttgtttatctgctgaccttccctc

SEQ ID NO: 8980 - DNA, 1321 bp, Artificial sequence
  DNA replication origin
tctccgcggacgccgcctggggagagccgcctcccaagctgcagcgcccgggatcccgttgcaaccgcgggcaccgcgtccgctaatctggcacccgccgggccgcggcgtcacatcttctacatctccaccccccacacccaccagcctcccgcgcccccagttctcctccctcctgcgcgccgccccctactcgctcgggttttctggggccggcctctgagttcggcggttcggccacaacacgcaagcgcgcgacatcagtccggcggggagcccggcctcagtcgggggcgggggagaggcgaggggcggggggcgcgcgtcggaggccgcggcagggctttggcattccctgggctccaccgccccttatcccccaaaagtcacccccgcccaacccccgcaccacccaaaccacgtttaggctttctccacactgcggggcttttgctgcgcaaccagccgtgactcaacttttaaaagtttaaactcaactttctcccccattttttccccgctagcgtttcaaaacggagaagccgtttccaccccaaagtagagaagttgcaatccaaggaagagtctgtgtcagagcaggctttgaaaatctctaaatcaccaaaagacgaggggtacaagtggggcataaactttaaaattaaaggacagaggctgaagtcgtctaccaacaaaaggagagaaagaggccagagaaggggagcagattgggttgctaaaacgaaaaggtttcctttactgacctatcttgaattagacgacgcagaaagatgaggatggggataaggataaatccttatcgcgatcgaagcgcattaatgtcttaactcggacctggcatttgccctagctaaattgttatgcatttcttggagagagagttattttctgtaaatcccaaatgtaaaattgaagttaattgcattttggtaattttcagtaggatatagcaggtgccacagatgactaggaaaatatctattcagaaaacttgcatgtattgagtacctactgtgtgcaacacataatgttgagtgtgtgggagatgccaaatctgatgccagcgtctcacacactgagggagataagatgggtagcatgagtaacacaaatagcagtagaaagtaggccatagaagagtaagactaagtgctgtgacatttcagacatcggataactcagcgtggggaggcaggagatttggggaagcttctagaaggagttgcaagtatggacgtgcctccttgtagaaacattaggtttcaaaaggccatgcataagtgcatttgttcttaagtct

SEQ ID NO: 8981 - DNA, 843 bp, Artificial sequence
  DNA replication origin
ggccggccccagaaaacccgagcgagtagggggcggcgcgcaggagggaggagaactgggggcgcgggaggctggtgggtgtggggggtggagatgtagaagatgtgacgccgcggcccggcgggtgccagattagcggacgcggtgcccgcggttgcaacgggatcccgggcgctgcagcttgggaggcggctctccccaggcggcgtccgcggagacacccatccgtgaaccccaggtcccgggccgccggctcgccgcgcaccaggggccggcggacagaagagcggccgagcggctcgaggctgggggaccgcgggcgcggccgcgcgctgccgggcgggaggctggggggccggggccggggccgtgccccggagcgggtcggaggccggggccggggccgggggacggcggctccccgcgcggctccagcggctcggggatcccggccgggccccgcagggaccatggcagccgggagcatcaccacgctgcccgccttgcccgaggatggcggcagcggcgccttcccgcccggccacttcaaggaccccaagcggctgtactgcaaaaacgggggcttcttcctgcgcatccaccccgacggccgagttgacggggtccgggagaagagcgaccctcacagtgagtgccgacccgctctctccgcctcatttccatttcgtgggttctcgcccgctctctcccctccagcctgcaccctcctcccggatcttcactgcgaccctagcgctccgtgtggtttctggccgcgcggccctcggcggtttcgggttcaccactcaccccctcctttccgggctgcggcgtaggcccggg

SEQ ID NO: 8982 - DNA, 899 bp, Artificial sequence
  DNA replication origin
aaagtggagaaggggtgtggggtgcttgccccccaggaaagtggagagaaggaagggtagagacatggagagaagcggtggggatgcttgccccccaggaaagtggagaaggggtgggtagagacatggagagaaggggtggggggcgcttgtcccccaggaaagtggagaaagggtgggaggtgcttgccccccaggaaagtggaaaaggggtagagacacagagagaaggggtgggggtgcttgtcccccaggaaagtggagaaggggtatggggtgcttgccccccaggaaagtggagagaaggaagggtagagacacggagagaaggggtgggggatgcttgccccccaggaaagtggagaaggggtggggagagacacagagagaaggggtgggtgagcagccaaagcaggtgtccccacaattgacttgccaccaagggaatgtgggtgaatgaccaaggcaggcgtccctgcggtgatcagacaccaatgaaatgtgggtgaataatcaggcaggcatccccgcagtgattaaacaccgagggaagactgtcttctcaagtctgtgaccggcgctggagttttcggtccacggataaaacgcatctcctttgtctctaccagaaaaggaaaggaactgaaattaagacaagggcgagactgaagtgtggcaccaagattgaaaggagaaagagattgagggttagtgagagaggttggagaagagagtaaagaggccgcttaccgactttaaaattggtgagatgttccttgggctggttagtctgaggaccagaggtcgtaggtggatctttctcatggagcaaagagcaggagaatagcggactgatctcccaaggcaggcccccctatccgagtcacggcaccaaattt

SEQ ID NO: 8983 - DNA, 1008 bp, Artificial sequence
  DNA replication origin
ccccgtccgggagggaggtgggggggtcagcccctcgcccggccagccaccccgtctgggaggtgaggggcgcctctgcccggccgcccctactgggaagtgaggagcccctctgcccggccagccgccccatccgggaaggaagtgggggggtcagccccccgcccagccagccgccccatccaggaggaaggtaggggggtcagccccccgcccggccagccgccccgtccgggaggtgaggggcgcctctgcccggccgcccctactgggaagtgaggagcccctctgcccggccagccgccccgtccgggagggaggtgggggggtcagccccccgcccggccagccgccccatccgggagggaggtgggggggtcagccccccacccgagccgcccggtccgggaggtgaggggcacctctgcccggccgcccctactgggaagtgaggagcccctctgcccagccaccaccccatctgggaggtgtacccaacagctcattgataacgggccatgatgacaatggcggttttgtggaacagaaaggggagaaaggcggggaaaggattgagaaatcggatggttgccatgtctgtgtagaaagaggtagacacgggagacttttcattttgttctgtactaagaaaaattcttctgccttgtgatcctgttgatcggtgaccctacccccaaccctgtgctctctgaaacatgtgctgtgtccactcagggttaaatggaataatggtggtgcaagatgtgctttgttaaacagatgcttgaaggcagcatgctcgttaagagtcatcaccactccctaatctcaagtacccagggacacaaacactgcggaaggccgcagggtcctctgcataggaaaaccagagacctttgttcacttgtttatctgctgaccctccctccactattgtcctatgaccctgccaaatccccctctgtgagaaacacccaagaatgatcaattaaaaaaaaaaaaaaaaga

SEQ ID NO: 8984 - DNA, 1214 bp, Artificial sequence
  DNA replication origin
ccgggcagaggggctcctcacttcccagtaggggcggccgggcagaggcgcccctcacctcccggacggggcggctggccgggcggggggctgacccccctaccttcctcctggatggggcggctggctgggcggggggctgacccccccacttccttcccggatggggcggctggccgggcagaggggctcctcacttcccagtaggggcggccgggcagaggcgcccctcacctcccagacggggtggctggccgggcgaggggctgacccccccacctccctcccggacggggcggctggccgggcagggggctgatccccccacctccctcccggacggggcggctggccgggcagaggggctgacccccacctccctcccggatggggtggctgccgggcagagacgcccctcacttcctagacggggtggctgccgggtggaggggctcctcacttctcatatggggcggttgccaggcggagggtctcctcacttctcagacagggcggctgggcagagacgctcctcacctcccagacggggtcgcggccgggtagaggtgctcctcacatcccagacggggtggcggggcagaggcgctccccacatcttagacgatgggcggctgggcagagacgctcctcacttcctagatgggatggcggccgggtagaggtgctcctcacttcctagatgggatggcggccgggcagagacgctcctcactttccagactgggtagccaggcagaggggctcctcacgtcccagacgatgggcggccaggcagagacgctcctcacttcccagacggggtggcggccgggcagaggctgcaatcttggcactttgggaggccaaggcaggcggctgggaggtggaggttgtagcgagctgagatcacgccactgcactccagcctgggcaccattgagcactgagtgaaccagactccgtctgcaatcccggcacctcgggacgccgaggctggcggatcactcgcagttcggagctggagaccagcccggccaacacagcgaaaccccgtctccaccaaaaaaatacgaaaaccagtcaggcgtggtggcgcacgcctgcaatcgcaggccctcggcaggctgaggcaggagaatcaggcagggaggctgcagtgagccgagatggcagcagtacagtccagcttcggctcggcatcagtgggagactgt

SEQ ID NO: 8985 - DNA, 1430 bp, Artificial sequence
  DNA replication origin
gttcttggaaaggggctgcagaagacctcccgaggtggatgttactgagccgcccggcgagcaccagccgtgacaggtccgggcccggccgcgcggagccgcgggagaactgccctccgcagccggaagggggccgcggggagcgctcctggccggtggcggcgggggcgggggaggccgcgagccgaggcgctccaactccggcgatgccgcctcgccctccccgccgcggttgatgcggcacgtgcacgccgccgcccgcaccaggacctgggccgggtcgcacggcttggcccccggccaccgcttcggcctaggtgagtgtgtgcggcggccgccctcggcccgctgggctgtaggcgcgcgggcggggctcgctcggcgcggcaggtgcggactcggcggcgctgctgcccgagccaggactccgggagaggaggggaggggagggacgacctcgctcggcgcggcccctcccgccgctccctgccccctgggggccgcggcttctgggggctcaaggttgggtggcggggtgggcgacggtctgcggctgcggaacgtaacaggacagggtctcctccatccccgattacccggagcggcggcgcggtggcccaggttgtcctctcggagagcccttcacgcccaagggggatttcaggcggctctggggatgtccccggaggccctctttggaggagtgtgcctcaagcagggggacgacaaaggctgtgtgtgtgcgtgtgtgtgtgtaggcacatccccggaattcgccgattaccccctcgatagaattaggcagccccaaagccagccgcaactttcttctggtttggagcacagtgcaaagacaggggaagggagagggcactgccactttaaaagtggggaagtcggctgggcgcggtggctcacgcctgtaatcccagcacttgggggggccgaggcgcgctgatcacctgaggtcaggagttcgagaccagcccgaccaactgatgaaaccccgtctttactaaaaatgcaaaaattagccggccgtggtgacgcgcgactgtagtcacagctactcgagagactgaggcgggagacccgcttgaacccgggaggcggaggttgcagtgagccaaggtcgcgccactgcactccagcctgggagacaaagtgagactccggctcaaaaaaaaaaagtggggaagtccgccctcctgagctcatggtaacctcagcctcctcccctcctcctaccacagagagagggagaaagaacttgttttcattcataactttttccttttccttcttccgtcaactatttattcagtgcggattgcagagggcgcagctccaccgtggtaacttgcaatgtggccgcccctgcgctggcttctttctcctcggccctcggtgaacccagcttttcctttaaa

SEQ ID NO: 8986 - DNA, 1336 bp, Artificial sequence
  DNA replication origin
gccgtgggcggagccgcctgccagtcctgggctgcacacctgcactcctcagcccttgggtggtcgatgggaccgggcatggtggagcaggggtcagcgcccgtcggggaggcttgggttgtgtgggagcccaccaggcagggaagggaggggggcttgggcatggcaggctgcaggtcccgagccctgcatcgcaggcaggcagctgaggcccggcgagaattcgagtgtggcgcaggccagccggcagtgctgggggacctggtgccccctctgcagctgctggcccaggtgctaagcccctcactgcctggggtgggcagcgcctgccagccactacgagtgccagcctgccgagcccacgcccacctggaactcgcgctggcccgcgagtgctgcgtgcagccccggttgccacccacgcctctccctccacacctccctgcaagcagagggagccggctctagcctcagccagcccagagaggggctcccacagtgcatcggcggtctgaagggctcctcaagcatggccagagtgggcggtgaggccgaggaggcgcccagagcgagggagggctgccagcacgctgtcacctctcaccagcaatggtggagccacaaggggtgttacagcttttgctcagggagtcccactcaaggagtccagtctgaagatctgagcccccaggaagtgtcacactcatttggtcccactgcctgctcggtaaacgggagtgtggtgcccagcagtatttttcactccggtagcgtggcgagaaggaacgtgtattacagctcttttacacccgctgttcagcaggttctgggttcttgtcctgcaaccaagaggaatgaggtacatgaacactggagagtgagcaaggcagagaagaattttattggcgatagaaaagctctgaacaatgagtgggaaccggaagtgggtagctctctgtgtgagcagggcccaaaagcaggtctgtgaggccaagtccagggtttctatgggctcagaatcggggagtgtgtgctgactggtccatgggcaggcctggaaaaggcaccattcaattggctaaaaggcattgaggaagttctcacagggttgtggactccacctggaactggcagctcagttttcaggcttcaggctgttttggtcgtgaaagtcaggtttaccagggtactgtccctgtctgcctaggaatctgtctgtctcctgcctctatcactaagagcttgccagccctcccaacactcttgacttccaaagcaaatggcggtgccttcagtcagcattgtaatgtgtgctgtaggttagtcttacctctcc

SEQ ID NO: 8987 - DNA, 1062 bp, Artificial sequence
  DNA replication origin
gggggtggcggccgggcagaggggctcctcacttcccagacgtggcagccgggtgggggcaccccccgcctcccagatggggcagctgccaggcaggggcgctccccgcctcccagatggggcagccgggtggagacgctcctcactacccagacggggcggccgggcagaggcgctcctcacttcccagacggggtcgtggctgggcagaggcgctcctcacctcccagacggggtggcggccgggtagagatgctcctcacctcccagacggggcggccgggcagaggcgcttcccacatcccagacgatgggcggccaggcagagacgctcctcacttcctagacaggatgagggccgggaagaggcgcttctcacttcccagactgggcagccgggcagaggggctcctcacatcccagaggatgggctgccaggcagagacgctcctcacttcctagatggggtggcagccaggaagaggcactcctcacttcctagacggggtggcggccgggcagaggctgcgatctcagcactttgggaggccaaggcaggcggctgggaggtgggggttgtagcaagccgagatcacgccactgcactccagcctgggcaacattgagcactgagtgagcgagactccgtctgcaatcccggcacctcgggaggccgaggcgggcagatcactcgaggtcaggagctggagaccagcccggccaacactgcgaaaccccgtctccaccaaaaaatacgaaaaccagtcaggcgtggcggcgtgtgcctgcaatcccaggcactcggcaggctgaggcaggagaatcaggcagggaggttgcagtgagccgagatcgcggcaatacagtccagcctcagcaacagagggagaccgtggaaagccggagagggagacagaagagaggggagaggggagaggaaccacaagaaatatttgaagatataatgctcaagaacttcccaaaattcatgaaacaccacaaaccacagattcaagaatctcagataccctcaagcagaaaaataccaagaaatacagacct

SEQ ID NO: 8988 - DNA, 1365 bp, Artificial sequence
  DNA replication origin
cagagagaggcaagaggcaatctccccctacccaactgcccctcccaggagcagatacggcaccaacagccggcgagtccctccggcctggaagacaaaggaaggatcagggcccagtggtgacggggagggtgggggcaacgactcgcgtgagctcggagacgtgagaacgcagcccccgccccgttctccgcctcccctgagaaaggcggggcccccacgccgccccgagacaggtctccccgccgcgccggcagcgggtcccaggcggccgcacacgcccaggcacgggatgctgcgggagagcgcggtgggggaggggaaggacgcggaggcggagccggcgggcaaagaaaggccgagcggcggggcgggggcgggggcgggggcggggtctgggctgggcgggcggggcggagccggccggccgggggctgcctgagacagttactgccctgacggcggcggcggcggcggttggccggtgggggctggggcgagcacgaccgattctgctgggaaagctggaactggcagccgccgggggccaagaggaggatccggagctgggagcgtgccccgggcccggcggaggaggcggctgcagttggagtggagtcttgggagcgctgctggcagcgacttctcagcgaagcaagtgtctgagactgagagtccctaacagcggcagcggcggccacggcggcggctggggccgaggtaaccggggggcggcggcggcggtggaagcgaggcccctccctcgggttggaagctgggaggccgaggccgtggcttggacctgacccaaccacccaccctctccggcctcgagccccagatttgccctcttccctcgcaccgccgtcggccgggtgggagcgggagcggggcatggggcgggagcgcagaggcggaagccgaccgggaggcgacccctcgtctgggattggcaaggacctcagtcaccccctcccccttcaaaagacacaccccaatctcggtgcggggcggggtgcagaggcgctcccagcctctggaagggcagacctcggtgtggaggctgcaccttcgctcgtggcctctctgaggtggctcccctgtggctcctctgggcggttccaacccaaggtggtgcccggcgctgggaatcccggagttccttttgtctgtcagctgaaactggaggccggacctgtgggcagacacccaccagcaccgaagcactctactctttatccctttcctgtcttggaaggaatttctctctagcagccttttctccggccagactggtagattttatccctgacctccatccttggcccagaggaaggaaggattcacattttacttgtgtttgct

SEQ ID NO: 8989 - DNA, 1027 bp, Artificial sequence
  DNA replication origin
ccaactgcagccgcctcctccgccgggcccggggcacgctcccagctccggatcctcctcttggcccccggcggctgccagttccagctttcccagcagaatcggtcgtgctcgccccagcccccaccggccaaccgccgccgccgccgccgtcagggcagtaactgtctcaggcagcccccggccggccggctccgccccgcccgcccagcccagaccccgcccccgcccccgcccccgccccgccgctcggcctttctttgcccgccggctccgcctccgcgtccttcccctcccccaccgcgctctcccgcagcatcccgtgcctgggcgtgtgcggccgcctgggacccgctgccggcgcggcggggagacctgtctcggggcggcgtgggggccccgcctttctcaggggaggcggagaacggggcgggggctgcgttctcacgtctccgagctcacgcgagtcgttgcccccaccctccccgtcaccactgggccctgatccttcctttgtcttccaggccggagggactcgccggctgttggtgccgtatctgctcctgggaggggcagttgggtagggggagattgcctcttgcctctctctgctcaacccttttgcctctcccttaaccccgttgcttccaaagccacttcgggccccgttctacccctcagtcgtccggtctcctttcagtccattaaattccagggatgcttttactttggctgggacgaagagaaggaaggaaaagactgggaagaatgttgcgaaaatagaaatagtgggggtatacagcgacattcctaccagcctcatgaaaaggacgtggcctccatcagatggaggttgacagcaggcttgactgggtctcaggcccctgctcctcagggccacttgatcacccgcagcgtccactaggggggaaggtcttggtcatgtggcgtcaggaaatgccctagagggcctgctcacaggggcctgttggactaagcatgtcagttgtttgcacttactggacct

SEQ ID NO: 8990 - DNA, 729 bp, Artificial sequence
  DNA replication origin
ggggcaggaaatggttaaagcaaatctgcactgtgcattcccagacaggctttgcttaatccttcctccccgctttaacagaccctcaccccccgcctttcttttatttctctcgacccccttacccctgagttattactagcataacaacctaacggtcttcccccagaccctgccactaaagttatttatctgcaaacctgaccccacccccatctattctgcggcagccttttgctgttattgctctgacgccggccaagatttggccgaaaaggaaaaaaaaaaaaaaaaaagaaaagaaaaaaaatcacccccctttttagcgcctccgcctcgctgtgctcccacaccagaccgcctacagccctccgggaggctgaagtgattagcatcccgagaagccagtcggaggccgggcaaggcggagggcgctcgcggtaggagtgccggtcggggctgcttcagctccggcccaatggggctggggcgagggaggggcagaaggtgacaggactgggagctagggggagtccaggcgaactaaagtgcggggatcaatgagtgtcgagcaaagtttctgagtgctgctccagctcgcggtcttccctccccctctgtttgtgtttcggcgacgcgctgtgtgtgtgtgtgtgcgtgtgtatgtgtgtgtgtgtgcatgcctgtgcggcggggaaggggcggggagagtgtgagggaccaggcggg

SEQ ID NO: 8991 - DNA, 1411 bp, Artificial sequence
  DNA replication origin
caaggaattgcaacttttttttttattattgtacaccttgaaggtgaggttaattaagtcctgttgtggggtttgagggccagattccaatttttggagttttatttaatgtcgggagcagattgggtaatagaatgtatgttgagaataagatggccttttgaccttttggggtgtagggctgtaaagcttctcagggttgctgccgaatgagccatgaactgggctgggtttttatatttgatgaaaaagagcctaaacgcttcggatttggataaagaaaaaggagcattaaccttgactatgcctatagctccagccacctttttaagagtaaattgctgggcaggtgggggagggctagtcatggaaggaaactgtaagccagaccaggtgtgaggaggggaggcgataaaaagattatagggtggaggagcggatgctgaggaagaattgggacctagctcggcctggtgaggaggggagaggtcagatgggtctgtagaaaaggaagattagaaagactcagtgacgcttggggttaggactgaggggacaggcgggagggaaagaaggaagatttgggatgagttgcactgggcagagagactaggaagggactgatgtgtaaaagaatgcctggatgtcaggcacctcagaccatttgcccattttacgacaagaattatttagatcttgtaggatggaaaaattgaaagtgccgttttccggctatttggaactactgtcgagtttgtattggggtcaagcggcaatgcagaagaaaataagatgcttagattttaggtcaggtgagagttgaagaggttttaagttcttaagaatacaggctaagggagaaggaggaggaatggatggtggaagcttgcccatagtgaaggaggcaagcccagaaaaaagagtagagacacggagaaggggtgggggcttcttgccctccagaaaagcagagaaagtgttggggcatggaaataagggattggggcacagagataagaggttggggtgcagaaataagggattggggcacagagataagaggtcggggtgcagaaataagggattgggggttcttgccccctagaaaagcaggacttgccactaagggtgaaggagaaggggttcagggatacttgcccctcccccagaaaagcgggacttgccgctaagggtgaaggagaaggggttgaggggtagtgagggagattggagaagagagtaaaaagaggccgcttaccggatttgaaattggtgagatgtttcttgggctggtcggtctgaggacctgaggtcgtaggtggatctttctcatggagcaaagagcaggaggacaggggattgatctcccaagggaggtcccccgatcggagtcacggcaccaaatttcatg

SEQ ID NO: 8992 - DNA, 1408 bp, Artificial sequence
  DNA replication origin
tgcactcctcagcccttgggtggtcgatgggactgggcgccctggagcaggcggcggcgctcatcggggaggctcaggccgcacaggagcccacggagggagtgggaggctcaggaatggcgggctgcctgtcccgagccctgcccggcgggacggcagttaaggcccagcgagaaatcgagcgccccgccggtgggctggaagtgctgggggacccagtacaccctccgcagctgctggcctgggtggtaagtccctcactgcccggggcagcagggccggccggctgctccgagtgcggggcccgccaagcccacgcccacccggaactccagctggcccgcaagggccgcgcgcagccccggttcccgctagcgcctctccctccacacctccctgcaagccgagggagccggctccggccttggccagccctgaaaggggctcccagggtgcagcggtgggctgaagggctcctcaagtgccgccaaagtgggagcccaggcagaggaggcgccgagagcaagcaagggctgtgaggactgccaacacgctgtcacctctcacagctttcttgtttctaccccccacagcttggctgacagagtggggcatgttctccgcttgtgcagtcccactgccttgttccggcctgtgtctgccaggctgatccagctctgctgctgcttcccctcatgtggggtagccatgccacgccggcagaggatgagcgggctatagggttacagctctggctcaggaaatcccaaggtctggacccctggaagtgtcgccactctacactcccacaggccaatgaacgggaatgtattactgcccacagctttgtgagccatccacgaatgcattatagccctttttgctcccactcacagctaggtgagccagccatgaaagtgttacagctcttttcacgcccactgtttggcaggtcccgagttcttgtaccacgtccaggaagaatggggttatgcagacacctgaagaatgagcaaggtgaagagttttacttagcaacagaacagttctctgcagacaggatacctgaagtggatagctcctggtgcttttatggtctcagaatagaggaagtgcatgttgattggtccatgggcaagaggaagtgcatgctaattggaacatagacctgtctgaaaaaattaccatttgattggctgaaagccatcaaggaagtttgcactcccagttgtggattctacctagaattgacagcccagttttcaggcttcaggctgtctttggcttgaaggtcgggtttcagtggggacctgccccatctgcccaggaatttgtctgcctcctgccccctatcaagatcttccatgaaacattgtcagttgcccataccttttctctgtagaactca

SEQ ID NO: 8993 - DNA, 1442 bp, Artificial sequence
  DNA replication origin
tgtgggagcccctttctgggctggccaaggtgggagccggctccctcagcttgcagggaggtgtggtgggagaggcgtgagcgggaaccggggctgcgcgccgcgcttgcgggccagctggagttccgagtgggcgtgggcttggcgggccccgcactgggagcagcaggccggccctgccggccccgggcaatgaggggcttagcacccgggccagcggctgcggagggtgtgctgggtcccccagcagtgccagcccactggcgctgcgctcgatttctcgccgggccttagctgccttcccgcggggcagggctcgggacctgcagcccgccatgcctgagcctcccacccactccgtgggctcctgtgcggcccgagcctccccgatgagcgccgctccctactccacggtgcctagtcccatcgaccacccaagggctgaggagtgcgggtgcacggcgcgggactggcaggcagctccacctgcagccccggtgcgggatccactgggcgaagccagctgggctcctgagtctggtggagacgtggagaacgtttatgtctagctcagggattgtaactacaccaatcggcactctgtatctagctcaaggtttgtaaacacaccaatcagcaccctgtgtctagctcagggtttgtgaatgcaccagtcgacactctgtatctagctactctggtggggccttggagaacctttctgtcaacactctgtatctagttaatctagtggggacgtggagaacctttgtgtctagctcagggattgtaaacgcaccaatcagcgccctgtcaaaacagactactcggctctaccaatcagcaggatgtgggtggggccagataagagaataaaagcaggctgcccaccagtagtggcaacccgctgaggtccctttccacagtgtggaagctttgttttttcgctctttgcgataaatcttgctactgctcactctttgggaccatacggcttttatgagccgtaacactcaccgcgaaggtctgcagtttcactcctgaagccagcgagaccacggggaggaacgaacaactccagacgcgccgccttaagagttgtaacactcaccacgaaggtctgcagcttcgctcttgagccagcgagaccacgaacccaccagaaggaagaaactctgaacacatctgagcatcagaaggaacaaactccagacgtgccaccttaagagctgttaacactcaccgcgagggtccgcagcttcattcttgaagtcagtgagaccaagaacccaccaatcccggacacaaagccaccacattctgtatcttctgcattccatatttggccctttgtagctgatcactttccagatttcacagtttcaaaatgatggttttaatagatacttgaaggtatcggtcttagtaatgacctgctgcct

SEQ ID NO: 8994 - DNA, 936 bp, Artificial sequence
  DNA replication origin
ttggagccggccggtgtcccggcggagagacgggcagtcgggttccctggcctcggggccaccccggctggggcggctggggcagagggacgatgtctactcgcgccccgatgcccgccgcccattctcgggaggatccgcccgcggtgactgctgagagggagtcgctgttggccgcggcgaaccggccggccgagcagccgcccccgcccgaatgtgagggcaaagaggcggcgagggaggagagggccgcggccgccactagcgctggggcgcggggagagccgtcgccggcgctggtgctgggacgcagcgtgccccaggcggctgtccccgtgaggcccctggcgctgcacctggcgcacaaggcgcgtgggcccgggggccctttcggcggggagccgccaccgccaccgccgccgccgtcgccgttgccgccgttgctgcgggatccgccggccgaggacgcccgggaagaggtggcagctggccctgcggaaaagcggcagccgccgctgctgccgcctaagggaaatccctggaccaaaaagcctccccagcacctgtccccagacacgacaggtccgccaccgcccccgctggaaaccctggaggcaggtctgtggttgctctgcgttgggcactggcagggtgcgggcaggggcgacttgcgggacttgccggcgcgtggcggcggtagcgggcaccaggcccgggtaacggcaggcctcccctccctgtcagtcggaggtaatttgttccaaggtgtcattcactctgcctatttacagacatgggcatctgggaagggagcggcaggaagaggtgggacctcaggttctccttgcctgatgggggcacggaggtggtagcttggcggcgcatccctgctggcgcggttgcgattgtgttttgtccccagtgttagtgacttgg

SEQ ID NO: 8995 - DNA, 926 bp, Artificial sequence
  DNA replication origin
cccgtccgggagggaggtgggggggtcagccccccgcccggccagccgccccgtccaggaggtgaggggcgcctctgcccagccgcccctactgggaagtgaggagcccctctgccgggccagccaccctgtccgggagggaggtgggggggctcagcccccccacctggccagccgccccgtccgggagggaggtgggggggtcagcaccccgcccggccagccgccccgtctgggagggaggtgggggggtcagccccctgcccgccagccgccccgtccgggaggtgaggggcgcctctgcccggccgcccctactgggaagtgaggcgcccctctgcctggccagcctctccgtccgggagggaggtggggggggtcagccccctgcccggccagccgccccgtccgggaggtgaggggcgcctctgcccagccgcccctactgggaggtgaggagcccctctgcccggccaccaccccgtctgggaggtgtacccaacagctcattgagaacgggccaggatgacaatggcggttttgtggaatagaaaggggggaaaggtggggaaaagattgagaaatcggatggttgccgtgtctgtgtggaaagtagtagacatgggagacttttcattttgttctgtactaagataaattcttctgccttgggatcctgttgatctatgaccttacccccaaccctgtgctctctgaaacatgtgctgtgtccactcagggttaaatggattaagggcggtgcaagatgtgttttgttaaacagatgcttgaaggcagcatgctcgttaagaatcatcaccactccctaatctcaagtacccagggacacaaacactgcggaaggccgcagggtcctctgcctaggaaaaccagagacctttgttcacttgtttatctgccgacct

SEQ ID NO: 8996 - DNA, 1170 bp, Artificial sequence
  DNA replication origin
cctcccggacggggcggctggccgggcagggggctgaccccccccacctccctcccggacggagaggctggccaggcagaggggcgcctcacttcccagtaggggcggccgggcagaggcgcccctcacctcccggacggggcggctggcgggcagggggctgacccccccacctccctcccagacggggcggctggccgggcggggtgctgacccccccacctccctcccggacggggcggctggccaggtgggggggctgagcccccccacctccctcccggacagggtggctggcccggcagaggggctcctcacttcccagtaggggcggctgggcagaggcgcccctcacctcctggacggggcggctggccgggcggggggctgacccccccacctccctcccggacggggcggctgccgggcggagacgctcctcacttcccagacggggtggctgccgggcagaggggctcctcacttctcagacggggcggctgccgggtggaggggctcctcacttctcagacggggcggttgctgggcggagggtctcctcacttctcagacggggtggctgggcagaggtgctccccacatctcagacgatgggcggccgggcagagacgctcctcacttcccagatgggatggttgccgggaagaggcgctcctcacttcctagatgggatggcggccggcagagacgcttctcactttccagactgggcagccaggcagaggggctcctcacgtcccagacaatgggcggccaggcagagatgctcctcacttcccagacggggtggcggccgggcagaggctgcaatctcggcactttgggaggccaaggcaggcggctgggagatggaggttgtagcgagctgagatcacgccactgcactccagcctgggcaccattgagcactgagtgaaccagactccgtctgcaatcccggcacctccgggaggccgaggctggcggatcactcgcggttaggagctggagaccagcccggccagcacagcgaaaccccgtctccaccaaaaaagtacgaaaaccagtcaggcgtggtggcgcgcgcctgcaatcgcaggcactcggcaggctgaggcaggagaatcaggcagggaggttgcagtgagccgagatggcagcagtacagtc

SEQ ID NO: 8997 - DNA, 1044 bp, Artificial sequence
  DNA replication origin
acacctcaccccagagggctcatgggagtggtgttagtaaaggctttttgaagaaaaggatccttggactcagtcttgaagaaaaagtttggaattcgctaggcaaaggttgagagatttcctagaagatgagatgagatgtgcaaaggtgcagaggcaagagagggcctagggcactgtaccacctggagcgcatgatgagagatcagattgaagatggcagtggaggcccagtgatgaagggccatgaatgtaatgctaacagcttgcaatttgtcctctggggacagggaaccattggaaagagagccattttgtcagtggagcgatcttaaatgtgtgcttaagagaatatatggaactgcggggacagatccctgagagggagtgggaggtgaagaattggagaggccttctaagatgatgaggagttatatttggcagagctgggtgggtgggtgggtgggtgggtgtggagtagagagcatgggccaaggaagactccaggtttctggcgtgggtgactgaggacagtgctgttggcaaacgggaaggccagaggatagatggtttgttttcttttttagtggagaagctgatgaatgccttgaacacactgaaccgggggaacctgtgggccatcacgaggagggactcagtgggccaagggcactaaggtctgtgcctgggacagagtcatcagtccaaagatggaggtgacagtcaggggagtggcagagattgctcaggtgtgtatgggagcgaggaaagaagaggcccacaaaagctggggcagccactcttgcgttggctgaggaagaaactatgaggcctgaggtagaagcccagggtggtgtggagtcctgctgtcaaagtcaaggagaatgcagtggtggccatgtggcaaaataagggcagaaaagtttttctgagaatgaatcacaaaaggaattgcaggtccctggagcttgccctgaaaaggaacaggggctggaaattctggccctctgggtgggcctcccttcagcagcctctgagtccgtt

SEQ ID NO: 8998 - DNA, 1424 bp, Artificial sequence
  DNA replication origin
tcttcttgccgcttcccggtctgcgcgcctacgctgccggtttcccgacaaaagcgacggcgccctggtgaaaagcagacgcccctcatcggtttgcgccttgcagctcaactatgccccagcctcccacaagccacctgcccgcgtcctccgccaggcgtccagcccggacctgcccccgcggccgccaaggcgcacgtgaagctcccgggcggggggagcgcaaggaggcgggagtttgcggacgcgaacgcaggcctaggaagggaagcgattccagggcgcacgcgcagagcctggagactgggcggggcgtgcctcccgcaggggttacgaacgaaaggcgagcgcgtggcgctcaggagcccgcgcacgcgctgtggtctcgccccgcccatgagcgtccgcgcggccgtcgtagcatcttttcttcagacccgcccggctcgtctacttaacctagcggaggcttggagtgagagcagggaagtgtggggcgaggtgggcggggcgttgcacgcgtgcgcggccagcgaaagaagggagggggcgggagatccgagacaacgttaccccgtcaacacccaatcaggagccggcctgaccccgccccctcttctcacgttattggctgagaggcccccagatgggcggggccggccgtggggttggggagggcagggggcggggaggaggaggaaggcgctggcgggcagtgatggcggctggtgatggggacgtgaagctaggcaccctggggagtggcagcgagagcagcaacgacggcggcagcgagagtccaggcgacgcgggagcggcagcggaagggggaggctgggcggcggcggcgttggcgcttctgacggggggcggggaaatgctgctgaacgtggcgctggtggctctggtgctgctgggggcctaccggctgtgggtgcgctgggggcggcggggtctgggggccggggccggggcgggcgaggagagccccgccacctctctgcctcgcatgaagaagcgggacttcagcttggagcagctgcgccagtacgacggctcccgcaacccgcgcatcctgctcgcggtcaatgggaaagtcttcgacgtgaccaaaggcagcaagttctacggcccgggtgaggagttggaaggggaggggaaggaccccctgcagctgaagcacaacccccttcggacagggaggcctctgggcaccgggttagtttgcccagccttctcgtctccgggacccccgcgcctcggccgccgcacctgggacggcccatcccgcccctacacacacaccgtccccccgcagctacgggcacctccagttcttcccccgaaaccagggtccccggtggcgccccagagaccagctctcagcattcatctttcttccatcccatttctcctcgcagcct

SEQ ID NO: 8999 - DNA, 1053 bp, Artificial sequence
  DNA replication origin
ctccagacacctttttaagaggagattgctgggcaggtgggagagggctagaagcggaatgaaactgtaagccagaccgggtgtgaggaggggaggtgataaaaggattatagggtggaggagccgaggctgaggaagaattgggacctagctccacctggcgaggaggggagaggtcagatgggtctgtagaaaaggaagattagaaagactcagcaacacttggggctgggactgaggggacaggcaggagggaaagaaggaagatttgggatgagttgcattggaaacagagactagggagggactgatatgtaaaagaatgcctggacgtcaggcacctcagaccgtttgcccattttacaagaattatctagatcttgtaggatggaaaaatcgaaagtgccgttttctgactatttagagccattgtcaagtttgcactggggccaagcggtgttgcagaagaagataaggcgtttaggttttaggtcagatgtgagttgaagaggttttaagttcttgagaacacaggctaagggagaagaaggaggaatggagggtggaaggttgcccatagtgaaggaggcaaacccagagaaaagagagagtagagacatggagggaaggggttcgggggttcttaccctccagaaaagcgggaaaggggtcggggcatggaaataaggggttggggcacagagataagaggttgaggcgtggaaataaggggctgggacacagagataagaggtcggggcatggaaataagggatcggagcacagagataagaggttggagcatggaaataagggatcagggcacagagataagaggttggggcatggcaataagggatcgggggttcttgccccctagaaaagcagtacttgccgctaagggtgaaggagaaggggttggggggttcttggccccagaaaagtggagaaagggtagagacatggagagaaggagttggggggttcttgcctcccagaaaagtggtacttgccgctaagggtgaaggaccaaggcagatgccccgtgtggtc

SEQ ID NO: 9000 - DNA, 1010 bp, Artificial sequence
  DNA replication origin
aggatgatttttggatcctgagaattgatctatgttggatcagtaagttttattatgattttttttttcaaatttggggggctgaagacttagagctatttcttcttttggatttgcgaagaacatgcggttttcaggtgaatcatcaattaaacgcgtttaggagcagaagcccagtttaagttggctttagtttataggttttttttttttttttttttttttagaaagccaaagtgcattaggctgcatgaaagtggaaagcatagtagcaacttggtagacagatggcaatggcagaacgcaggttcgcgtacatatatgaatccagagtgtgtgagaccgtgtgtgtggtgggactgtatttgtccaaacataggtgtgcgtaggtacatctgtgtgtggtggccgcagccctggctcttgtcaccgcgtcaccacatgtccaaaatattcattgcatcaattcaagggcagtgagaggggggtgggggtgggggtggagggacagtttggcaattagattcttccgaactgggcttccagtgatcagatcttttacttacagcgcgactgcttgtaaagtgtaaaaccccttaatcgatgaaatggggtaggagttggcgttggtagagcaaagtaccgattaatcgtgaacttaaaggggattgcaaattgcaacctttggcaccatctgcaaattgtgggggtggggtctcttggtctccttgcttccttaaatgaacgtgtagtgtgtaccccgggactgcaagttgcagagcccttcagtgcacgtgtcttgtgcctgtgagtctgtgtttgcgagttgggggctgttgttcggtagccagcaggctttccgggttgctcggcattggcttgcaaatgcgggagagggatggaatgtggaatgttgaccggggaaccgaatcctgtcggaacggtcccatttgctggagaaattcgatcccttccacctccttcccgctcccccccgcccgccttcgggc

SEQ ID NO: 9001 - DNA, 2745 bp, Artificial sequence
  DNA replication origin
ccctggcagacctgtcctccacatcacaagggcgccacttttggggagactcacccgcacaccgtccgtgcacgcctgaggctgggatcccgcgctgcgtccccggcgatctgtctgaggtttcttcctcctggcgtttcttactgctggtggaccctccgcgaatcccggcctccggagaccgtcctggtaagtgccctggccaggactggtgtcagccccgactctgacgcacaatcacacagggctcctacttcgccaagtctcagggacccatcccccggcaacggtggcggtcactgtgaccaaagcggcggctggggcctcgcgcatgcgcactggcgaggccgactcacccgccccacccctccttactcagcagagtcaggctgcggaccctttaaaaaatggcggagacgcggcggctgcggggactggggcggcggtcctggaggttgcggcggcggcggctgcggcgcagcccgaggcggcgggtgggaagaggactaccagaggggcctgcgggagacccagggtcggacccataggggtcctgtcgtcaggacctccttgatcggtctcctgcttctgttcccggtgaaggaggaccttcggggtgctggcttggctgcgcggacgcctcttgggattcgatgatggctcccacccgctgatcgggaatggggttacaatgcagtgaggcggaaagggtctcgccggggcacggaaagatccccaaggccgcaaggcgtgctgtcgtctgcaacggcactgacccatgagtccactgcctccctccttcctgggtggagcaggggcctgccttcatctccgacgcccgggggctccggcatcccgacgcagcttccggcgacacctgcaaaggcagacagaggcgagtccgagctggagcccgtgtgaccaaacgtggcactgacgtcccccaagagcacatgcagtgagcgtgtgtctttgaggccgtagggggcgacgacgagacggacagtgatgtccaggcgtgcgcccgggggccactggagacctgccccacaaagcggaggaaaagccaagcgcacctgcaaacctgcgagacagggcctgtgcgcgagtccaggccacattcagggaggcccgccagaggagcccagagctttggaccaagtacaccccacccccacgccgctaccgcttaggtacccctgacgcaacctccgctgcacccagccaaaacccagtcccgttggctccctgacatccgtggcagccaaaagattcagtgccagaaggcgctttccccaggagcggagggaccggttggccctcaaggatcagacaggaagtgcaggtgggatgcaacaccgcctttcctggaaggccaatgtggggaacggtgggcttgcctccccctcttcctggaccgagcgcgcagccatcacttgggccatggagaccaagagagcttccctgtcccacacaggtatggaagcccagagctccaggttcaccacacctgcccaatcatccagaaagaggtgtggagagggaaacgatcatgacacggacgcccacggggtttctccctgatggactgcgaagtcttctttgttgaagacgttgagccagactaagaagccgccaggcttctcagagacggggcagacacagcaagagggaggacagagcagaggccagagcccaggcaggatacggggccatgccaccaccccgggcatccggggaggagtgtcagacgggtgactcggccaggaaggccagcctttgagtgacagagatgcttgccccatccccttgccggcttccttctccgtccctgcgtcgagctgtggctccatttctccatgagggagagggcgagaggcgtgagaaccatcttcttgaaggtctgcgggcaccctcctgcgggtggacaatgagcgcctgggaggccgttgtccttgcttggggagcggtcgtctggatctagcctagcaaagaggctgctccggatggggaggggacgaaaacccctgcggctccgaagcagatgccggcattgcccaggccctcacagacccccaaaccggaaccgccgggaaaccgactgccaaccggccacatgacccaggcagagacgcggggagaggctgaccagaagaaaggccgacctgcaagaaacccaccctccggcgcacagggcacatgtgtcccaaggcacagacacagatgggcacatactgatgggcagagatagaaagagcgggcaatggaaagagcgcgaaaggagagagagataaatagagtcgtaagagggagtcagaagtggtcacacagacaggcactcgcgcaggcacacagacagacacacacatacacatatacacacacacatacacacccataacgcgcacagacatacagtaggtaatacacagaagacatacacagaagccgagcagatgcatcatgctttctgtataacgtgcagatccatgagccaattaaactgttttcctttgtaaattacccagtctcagttatttctttagagcaatgtaagaaaggactaatatcgagaattggtagaggaatatgatattgttgtaaacataccggaaaatgtgaaagtggctttgaaactggatagtggagagaggttggcagggttcggagagatcagaagaagacaggaagatgagggcacgttttgaacttactagagtcttgttacattgttgtgaccaagct

SEQ ID NO: 9002 - DNA, 2789 bp, Artificial sequence
  DNA replication origin
actcatgggtcagtgccgttgcagacgacagcacgccttgcggccttggggatctttccgtgccccggcgagaccctttccgcctcactgcattgtaaccccattcccgatcagcgggtgggagccatcatcgaatcccaagaggcgtccgcgcagccaagccagcaccccgaaggtcctccttcaccgggaacagaagcaggagaccgatcaaggaggtcctgacgacaggacccctatgggtccgaccctgggtctcccgcaggcccctctggtagtcctcttcccacccgccgcctcgggctgcgccgcagccgccgccgccgcaacctccaggaccgccgccccagtccccgcagccgccgcgtctccgccattttttaaagggtccgcagcctgactctgctgagtaaggaggggtggggcgggtgagtcggcctcgccagtgcgcatgcgcgaggccccagccgccgctttggtcacagtgaccgccaccgttgccgggggatgggtccctgagacttggcgaagtaggagccctgtgtgattgtgcgtcagagtcggggctgacaccagtcctggccagggcacttaccaggacggtctccggaggccgggattcgcggagggtccaccagcagtaagaaacgccaggaggaagaaacctcagacagatcgccggggacgcagcgcgggatcccagcctcaggcgtgcacggacggtgtgcgggtgagtctccccaaaagtggcgcccttgtgatgtggaggacaggtctgccagggtgtccgtgggctgctgtctcaccggtggcctcttagtcgcggagagcagaacccggcagcttcaggggcagcctgggggtgggtgttacctgctgtatgtctgtgtgcgtcttggttgtgtgtgtgtgtgtgtgtgtgtgtgtgtgtgtgtgtgtgtgtttgtgtctgtgtgcgtgcgtgtgcgcgtctgtgtgcccacttctgtctatctcttacgtctctctctctctctcccccctctcgctctttccgtcgccctctctttctatctctgtctgtctgtgtgtgcgtgtgccttgggacacatgtgccccgtgcgccggagggtgggtttcttgaaggtcggtctttcttctggtcagcctctccccgcgtctctgcctcggtcgtgtggccggttagcagtcggtttcccggcggttccggtttgggggtctgtgagggcctgggcaacgccggcatctgcttcggaacctcaggggttttcgtccactccccatccggagcagcctctttgctaggctagatccagacgaccgctccccaagcaaggacaacggcctcccaggcgctcattgtccacccgcaggagggtgcccgcagacattcaagaagatggttctcacgcctctcgccctctccctcatggagaaatggagccacagctcgacgcagggacggagaaggaagccggcaaggggatggggcaagcatctctgtcactcaaaggctggccttcctggccgagtcacccgtctgacactcctccccggatgcccgtggtggtggcatggccccgtatcctgcctgggctctggcctctgctctgtcctccctcttgctgtgtctgccccgtctctgagaagcctggcggcttcttagtctggctcaacgtcttcaacaaagaagacttcgcagtccatcagggagaaaccccgtgggcgtccgtgtcatgatcgtttccctctccacacctctttctggatgattgggcaggtgtggtgatcctggagctctgggcttccatacctgtgtgggacagggaagctctcttggtctccatggcccaagtgatggctgcgcgctcggtccaggaagagggggaggcaagcccaccgttccccacattggccttccaggaaaggcggtgttgcatcccacctgcacttcctgtctgatccttgagggccaaccggttcctccgctcctggggaaagcgccttctggcactgaatgttttggctgccacggatgtcagggagccaacgggactgggttttggctgggtgcaggggaggttgcgtcacgggtacctaagcggtagcggtgtggaggtgaggtgtacttggtccaaagctctgggctcctctggcgggcctccctgaatgtggcctggactcgcgcactggccctgtctcgcaggtttgcaggtgcgcttggcttttcctccgctttgtggggcaggtctccagtggcccccgggcgcacgcctggacatcactgtccgtctcgtcgtcgccccctacggcctcaaagacacacgctcactgcatgtgctcttgggggacgtcagtgccacgtttggtcacacgggctccagctcggactcgcctctgtctgcctttgcaggtgtcgccggaagctgcgtcgggatgccggagcccccgggccttggagatgaaggcaggcccctgctccacccaggaaggagggaggcagtgggctcatgggtcagtgccgttgcagacgacagcacgccttgcggccttgcggatctttccgtgccccggcgagaccctttccgcctcactgcattgtaaccccattcccgatcagcaggtgggagccatcatcggatcccaagaggagtccgcgcagcccagccagcaccccgaaggtcctccttcaccgggaacagaagcaggagaccgatcaaggaggtcctgacgacaggactcctatgggtccgaccctgggtctcccgcaggcccctctggtagtcctc

SEQ ID NO: 9003 - DNA, 2740 bp, Artificial sequence
  DNA replication origin
acagcacgccttgcggccttgcggatctttccgtgccccggcgagaccctttccgcctcactgcattgtaaccccattcccgatcagcaggtgggagccatcatcggatcccaagaggagtccgcgcagcccagccagcaccccgaaggtcctccttcaccgggaacagaagcaggagaccgatcaaggaggtcctgacgacaggactcctatgggtccgaccctgggtctcccgcaggcccctctggtagtcctcttcccacccgccgcctcgggctgcgccgcagccgccaccgccgcaacctccagcaccgccgccccagtccccgcagccgccgcgtcgccgccattttttaaagggtccgcagcctgatgctgccgagtaagggggggtggggcggctgagtcggcctcgccagtgcgcatgcgcgaggcccgagtcgccgcttggatcacagtgaccgccaccgttgcccggggatgggtccctgagactttgcgaagtaggagccctgtgtgatcgtgcgtcagagtcggggctgagaccagtcctggccagggcagttaccaggacggtctccggaggccgggattcgcggagggtccaccagcaggaagaaacgccagaaggaagaaacctcagacagatcgccggggaggcagcgcgggatcccagcctcaggcgtgcgcggacggtgtgcgggtgagtctccccaaaagtggcgcccttgtgatgtggaggacaggtctgccagggtgtccgtgggctgctgtctcaccggtggcttcgtagtcgcggagagcagaacccggcagcttcaggggcagcctgggggtgggtgttacctgctgtatgtctgtgtgcgtcttggttgtgtgtgtgtgtgtgtgtgtgtgtgtttgtgtgtgtgcgtgcgcgcgtctgtgtgccttctatctcttacgtctctctctctctctcccccctctcgctctttccgccgccctctctttctatctctgtccgtctgtgtgtgcttgtgcctcgggacacatgtgccccgtgcgccggagggtgggtttcttgcaggtcggcctttcttctggtcagcctctccccgcgtcactgcctgggtcgtgtggccggttggcagtcggtttcccggcagttccggtttgggggtctgtgaaggcctccgcaacgcgggcatctgcgtcggaaccgcaggggttttcgtcccctccccatccggagcagcctctttgctaggctagacccagacgaccgctccccatgcaaggacaacggcctcccaggcgctcattgtccacccgcaggagggtgcccgcagaccttcaagaagatggttctcacgcctctcgccctctccctcatggagaaatggagccacagctcgacgcagggatggagaaggaagccggcaaggggatggggcaagcatctctgtcactcaaaggctggccttcctggccgagtcacccgtctgacactcctccccggatgcccgtggtggtggcatggccccgtatcctgcctgggctctggcctctgctctgtcctccctcttgctgtgtctgccccgtctctgagaagcctggcggcttcttagtctggctcaacgtcttcaacaaagaagacttcccagtccatcagggagaaaccccgtgggcgtccgtgtcatgatcgtttccctctccacacctctttctggatggttgggcaggtgtggtgatcccggagctgtgggcttccatacctgtgtgggacagggaagctctcttggtctccatggcccaagtgatggctgcgcgctcggtccaggaagagggggaggcaagcccaccgttccccacattggccttccaggaaaggcggtgttgcatcccacctgcacttcctgtctgatccttgagggccaaccggttcctccgctcctggggaaagcgccttctggcacggaatcttttggctgccacggatgtcagggagccaacgggactgggttttggctgggtgcaggggaggttgcgtcaggggtacctaagcggtagcggcgtgggggtggggtgtacttggtccaaagctctgggctcctctggcgggcctccctgaatgtggcctggactcgcgcgcaggccctgtctcgcaggtttgcaggtgcgcttggcttttcctccgctttgtggggcaggtctgcagtggccccccgggcgcacgcctggacatcactgtccgtctcgtcgtcgtcccttacggcctgaaagacacacgctcactgcatgggctcttgggggactttagtgccacgtttggtcacacgggctccagctcggactcgcctctgtctgtctttgccggtgtcgccggtgtcgccggaaggcgcgtcgggatgccggagcccccgggccttggagatgaaggcaggcccctgctctatccaggaaggagggaggcagtgggctcatgggtcagtgctgttgcagacgacagcacgccttgcggccctggggatctttctgtgccccggcgagacccttttcgcctcactgtattgtaaccccattcccgatcagccggtgggagccatcatcggatcccaagaggagtccgcgcagcccagccagcaccccgaaggtcctccttcaccgggaaccaaagcaggagaccgatcaaggaggtcctgacgacaggactcctatgggtccgaccctgggtctcccgcaggcccctctggtagtc

SEQ ID NO: 9004 - DNA, 2353 bp, Artificial sequence
  DNA replication origin
tgctgttgcagacgacagcacgccttgcggccctggggatctttctgtgccccggcgagacccttttcgcctcactgtattgtaaccccattcccgatcagccggtgggagccatcatcggatcccaagaggagtccgcgcagcccagccagcaccccgaaggtcctccttcaccgggaaccaaagcaggagaccgatcaaggaggtcctgacgacaggactcctatgggtccgaccctgggtctcccgcaggcccctctggtagtcctcttcccacccgccgcctcgggctgcgccgaagccgccgccgccgcaacctccagcaccgccgccccagtcccggcagccgcgtcaccgccattttttaaagggtccgcagcctgactctgctgagtaagggggggtggggcgggtgagtcggcctcgccagtgcgcatgcgcgagccccgagccgccgctttggtcacagtgaccgccaccgttgcccggggatgggtccctgagacttggcgaagtaggagccctgtgtgatcgtgcgtcagaatcggggctaagaccagtcctggccagggcagttaccaggttggtctccggaggccgggattcgcggagggtccaccagcaggaagaaacgccaggaggaagaaacctcagacagatcgccggggacgcagcgcgggatcctagcctcaggcgtgcgcggacggtgtgcgggtgagtctccccaaaagtagcgcccttgtgatgtggaggacaggtctgccagggtgtccgtgggctgctgtctcaccggtggcttcgtagtcgcggagagcagaacccagcagcttcaggggcagcctgggggtgggtgttacctgctgtatgtctgtgtgcgtcttggttgtgtgtgtgtgtgtgtgtgtctgtgtgtctgtgtgtgtctgtgtgcgtgcgtgcgtgagtctgtgtgcccagttctatctcttacgtctctctctctctctctcccccccctcgctctttccatcgccctctctttctatctctgtccgtctgtgtgtgcttgtgcctcgggacacatgtgccccgtgcgccggagggtgggtttcttgcaggtcggcctttcttctggtcagcctctccccgtgtctctgcctgggtcgtgtggccggttggcagtcggtttcccggcggttccggtttgggggtctgtgaaggcctgcgcaacgcgggcatctgcctcggaaccgcaggggttttcgtcccctccccatccggagcagcctctttgctaggctagatccagacgaccgctccccaagcaaggacaacggcctcccaggcgctcattgtccaatcgcaggagggtgcccgcagaccttcaagaagatggttctcacgcctctccccctctccctcagggagaaatggagccacagctcgacgcagggacggagaaggaagccggcaaggggatggggcaagcatctctgtcactcaaaggctggccttcctggccgagtcacccgtctgacactcctccccggatgcccgtggtggtggcatggccccgtatcctgcctgggctctggcctctgctctgtcctccctcttgctgtgtctgccccgtctctgcgaagcctggcggcttcttagtctggctcaacgtcttcaacaaagaagacttcccagtccatcagggagaaaccccgtgggcgtccgtgtcatgatcgtttccctctccacacctctttctggatgattgggcaggtgtggtcatcctggagctctgggcttccatacctgtgtgggacagggaagctctcttggtctccatggcccaagtgatggctgcgcgctcggtccaggaagagggggaggcaagcccaccgttccccacattggccttccaggaaaggcggtgttgcatcccacctgcacttcctgtctgatccttgagggccaaccggttcctccgctcctggggaaagcgccttctggcactgaatcttttggctgccacggatgacagggagccaacgggactgggttttggctgggtgcaggggaggttgcgtcaggggtacctaagcggtagcggcgtgggggtggggtgtacttggtccaaagctctaggctcctctggcgggcctccctgaatgtggcctggactcgcgcacaggccctgtctcgcaggtttgcaggtgcgcttggcttttcctccgctttgtggggcaggtctccagtggcccccgggcgcacgcctggacatcactgtccgtctcgtcgtcgccccctacggcctcaaagacacacgctcactgcatgtgctcttgggggacgtcagtgccacgtttggtcacacgggctg

SEQ ID NO: 9005 - DNA, 815 bp, Artificial sequence
  DNA replication origin
ggcagacctgtcctccacatcacaagggcgccacttttggggagactcacccgcacaccgtccgcacacgcctgaggctgggatcccgcgctgcgtccccggcgatctgtctgaggtttcttccttctggcgtttcttcctggtggtggaccctccgcgaatcccggcctccggacaccgtcctggtaactgccctggctaggactggtctcagccccgactctgacgcacgatcacacagggctcctacttcgccaagactcagggacccatccccgggcaacggtggcggtcactgtgaccaaagcggcggctggggcctcgcgcatgcgcactggcgaggccgactcacccgccccacccctccttactcagcagagtcaggctgcggaccctttaaaaaatggcggcgacgcggcgactgcggggactggggcggcggtgctggaggttgcggcggcgaaggctgcgacgcagcccgaggcggcgggtgggaagaggactaccagaagggcctgcgggagacccagggtcggacccataggagtcctgtcgtcaggacctccttgatcggtctcctgcttctgttgccggtgaaggaggaccttcggggtgctggctgggctgcgcggactcctcttgggatccgttgatggctcccaccggctgatcgggaatggggttacaatgcagtgaggcggaaagggtctcgccggggcacggaaagatccccagggccgcaaggcgtgctgtcgtctgcaatggcactgacccatgagcccactgcctccctccttcctgggtggagcaggggc

SEQ ID NO: 9006 - DNA, 1588 bp, Artificial sequence
  DNA replication origin
accggcaacagaagcaggagaccgatcaaggaggtcctgacgacaggactcctatgggtccgaccctgggtctcccgcaggcccttctggtagtcctcttcccacccgccgcctcgggctgcgtcgcagccttcgccgccgcaacctccagcaccgccgccccagtccccgcagtcgccgcgtcgccgccattttttaaagggtccgcagcctgactctgctgagtaaggaggggtggggcgggtgagtcggcctcgccagtgcgcatgcgcgaggccccagccgccgctttggtcacagtgaccgccaccgttgcccggggatgggtccctgagtcttggcgaagtaggagccctgtgtgatcgtgcgtcagagtcggggctgagaccagtcctagccagggcagttaccaggacggtgtccggaggccgggattcgcggagggtccaccaccaggaagaaacgccagaaggaagaaacctcagacagatcgccggggacgcagcgcgggatcccagcctcaggcgtgtgcggacggtgtgcgggtgagtctccccaaaagtggcgcccttgtgatgtggaggacaggtctgccagggtgtccgtgggctgctgtctcaccggtggcttcgtagtcgcggagagcagaacccggcagcttcaggggcagcctgggggtgggtgttacctgctgtatgtctgtgtgcgtcttggttgtatgtgtgtgtgtgtgtgtgtgtttctgtgtgtgtctgtgtgcgttcgtgcgcgcgtctgtgtgcccacttctatctcttacgtctctctctctctctccgcccccctcgctctttccgtcgccctctctttctatctctgtccgtctgtgtgtgcttgtgcctcgggacacatgtgccccgtgcgccggagggtgggtttcttgcaggtcggcctttcttctggtcagcctctccccgcgtcactgcctgggtcgtgtggccggttggcagtcggtttcccggcggttccggtttgggggtctgtgaagacctgagcaacgtgggcatctgcgtaggaaccgcaggggttttcgtcccctccccatccggagcagcctctttgctaggctagatccagacgaccgctccccaagcaaggacaacggcctcccaggcgctcattgtccaaccgcaggagggtgcccgcagaccttcaagaagatggttctcacgcctgtcgccctctccctcatggagaaatggagccacagctcgacgcagggacggaaaaagaagccggcaaggggatggggcaagcatctctgtcactcaaaggctggccttcctggccgagtcacccgtctgacactcctccccggatgcccgtggtggtggcatggccccgtatcctgcctgggctctggcctctgctctgtcctccctcttgctgtgtctgccgcgtctctgcgaagcctggcggcttagtctggctcaacgtcttcaacaaagaagacttcccagtccatcagggagaaaccccgtgggcgtccgtgtcatgatcgtttccctctccacacctctttctggatgattgggcaggtgtggtgatc

SEQ ID NO: 9007 - DNA, 1428 bp, Artificial sequence
  DNA replication origin
ggcagacctgtcctccacatcacaagggcgctacttttggggagactcacccgcacaccgtccgtgcacgcctgaggctgggatcccgtgctgcgtccccggcgatctgtctgaggtttcttccttctggcgtttcttcctcctggttgaccctccgcgaatcccggcctccggagaccgtcctggtaactgccctggccaggactggtctgagccccgactctgacgcacgatcacacagggctcctacttcgccaagtctcagggacccatccccgggcaacggtggcggtcactgtgaccaaagcggcggctggggcctcgcgcttgcgcactggcgaggccgactcacccgccccacccctccttactcagcagagtcagactgcggaccctttaaaaaatggcggcgacgcggcggctgcggggactggggcggcggtgctggacgttgcggcggcggcggctgcggcgcagcccgaggcggcgggtgggaagaggactaccagaggggcctgcgggagacccagggtcggacccataggagtcctgtcgtcaggacctccttgatcggtctcctgcttctgttcccggtgaaggaggaccttcggggtgctggctgggctgcgcggactcctcttgggatccgatgatggctcccaccggctgatcgggaatgaggtcactatgcagtgaggcggaaagggtctcgccggggcacggaaagatccccagggccgcaaggcgtgctgtcgtctgcaacggcactgacccatgagtccactgcctccctccttcctgggtggagcaggggcctgccttcatctccaaggcccgggggctccggcatcccaacgcaccttccggcgacacctgcaaagtcagacagaggcgagtccgagctggagcccgtgtgaccaaacgtggcactgacgtcccccaagagcacatgcagtgagcgtgtgtctttgtggccgtagggggcgacgacgagacggacagtgatgtccaggcgtgcgcccgggggccactggagacctgccccacaaagcggaggaaaagccaagcgcgcctgcaaacctgcgagacagggcctgtgcgcgagtccaggccacattcagggaggcccgccagaggagcccagagctttggaccaagtacaccccacccccacgccgctaccgcttaggtacccctgacgcaacctcccctgcacccagccaaaacccagtcccgttggctccctgacatccgtggcagccaaaagattcagtgccagaaggcgctttccccaggagcggaggaaccggttggccctcaaggatcagacaggaagtgcaggtgggatgcaacaccgcctttcctggaaggccaatgtggggaacggtgggcttgcctccccctcttcctggaccaagcgcggagcca

SEQ ID NO: 9008 - DNA, 2690 bp, Artificial sequence
  DNA replication origin
agacgacagcacgccttgcggccctggggatctttccgtgccccggcgagaccctttccgcctcactgcatagtgacctcattcccgatcagccggtgggagccatcatcggatcccaagaggagtccgcgcagcccagccagcaccccgaaggtcctccttcaccgggaacagaagcaggagaccgatcaaggaggtcctgacgacaggactcctatgggtccgaccctgggtctcccgcaggcccctctggtagtcctcttcccacccgccgcctcgggctgcgccgcagccgccgccgccgcaacgtccagcaccgccgccccagtccccgcagccgccgcgtcgccgccattttttaaagggtccgcagtctgactctgctgagtaaggaggggtggggcgggtgagtcggcctcgccagtgcgcaagcgcgaggccccagccgccgctttggtcacagtgaccgccaccgttgcccggggatgggtccctgagacttggcgaagtaggagccctgtgtgatcgtgcgtcagagtcggggctcagaccagtcctggccagggcagttaccaggacggtctccggaggccgggattcgcggagggtcaaccaggaggaagaaacgccagaaggaagaaacctcagacagatcgccggggacgcagcacgggatcccagcctcaggcgtgcacggacggtgtgcgggtgagtctccccaaaagtagcgcccttgtgatgtggaggacaggtctgccagggtgtccgtgggctgctgtctcaccggtggcctcgtagtcgcggagagcagaacccggcagcttcaggggcagcctgggggtgggtgttacctgctgtatgtctgtgtgcgtcttggttgtgtgtgtgtgtgtgtgtgtgtgtgtgtgtgtctgtgtgcgtgcgtgcgtggcgtccgtgtgcccacttctgtctatctcttacgtctctctctctctctccccgccctcgctctttccgtcgccctctctttctatctctgtccgtctgtgtgtgcttgtgcctcgggacacatgtgccccgtgtgccggagggtgggtttcttgcaggtcggcctttcttctggtcagcctctccccgcgtctctgcctcggtcgtgtagccggttagcagtcggtttcccggcggttccggtttgggggtctgtgagggcctgggcaatgccggcatctgcttcggaaccgcaggggttttcgtcccctccccatccggagcagcctctttgctaggctagatccagacgaccgctccccaagcaaggacaacggcctcccaggcgctcattgtccacccgcaggagggtgcccgcagaccttcaagaggatggttctcacgcctctcgccctctccctcatggagaaatggagccacagctcgacgcagggacggagaaggaagccggcaaggggatggggcaagcatctctgtcactcaaaggctggccttcctggccgagtcacccgtctgacactcctccccggatgcccgtggtgttgccatggccccgtatcctgcctgggctctggcctctgctctgtcctcccttttgctgtgtctgccccgtctctgagaagcctggcggcttcttagtctggctcaacgtcttcaacaaagaagacttcccagtccagggagaaaccccgtgggcgtccgtgtcatgatcgtttccctctcgacacctctttctgcatgattgggcaggtgtggtgatcctggagctctgggcttccatacctgtgtgggacagggaagctctcttggtctccatggcccaagtgatggctgcgcgctcggtccaggaagagggggaggcaagcccaccgttccccacattggccttccaggaaaggcggtgttgcagcccacctgcacttcctgtctgatccttgagggccaaccggttcctccgctcctggggaaagcgccttctggcactgaatcttttggctgccacggatgtcagggagccaacgggactgggttttggctgggtgcagcggaggttgcgtcaggggtacctaagcggtagcggcgtgggggtggggtgtacttggtccaaagctctgggctcctctggcgggcctccctgaatgtggcctggactcgcgcacaggccctgtctcgcaggtttgcaggtgcgcttggcttttcctccgctttgtggggcaggtctccagtggcccccgggcgcacgcctggacatcactgtccgtctcgtcgtcgccccctacggcctcaaagacacacgctcactgcatgtgctcttgggggacgtcagtgccacgtttggtcacacgggctccagctcggactcgcctctgtctgcctttgccggtgtcgccggaagctgcgtcgggatgccggagcgcccgggccttgaagatgaaggcaggcccctgctccacccaggaaggagggaggcagtggactcatgggtccgtgccgttgcagacgacagcacgccttgcggccctggggatctttccttgccccggcgagaccctttccgcctcactgcattgtaaccccattcccgatcagccggtgggagccatcatcggatcccaagaggagtccgcgcagcccagccagcaccccgaagatcctccttcaccgggaacagaagcaggagaccgatcaaggaggtcctg

SEQ ID NO: 9009 - DNA, 2427 bp, Artificial sequence
  DNA replication origin
cacccaggaaggagggaggcagtggactcatgggtccgtgccgttgcagacgacagcacgccttgcggccctggggatctttccttgccccggcgagaccctttccgcctcactgcattgtaaccccattcccgatcagccggtgggagccatcatcggatcccaagaggagtccgcgcagcccagccagcaccccgaagatcctccttcaccgggaacagaagcaggagaccgatcaaggaggtcctgacgacaggactcctatgggtccgaccctgggtctcccgcaggcccctctggtagtcctcttcccacccgccgcctcgggctgcgccgcagccgccgccgccgcaacctccagcaccgccgccccagtccccgcagccgccgcgtcgccgccattttttaaagggtccgcagcctgactctgctgagtaaggaggggtggggcgggtgagtcggcctcgccagtgcgcatgcgcgaggccccagccgccgctttggtcacagtgaccgccaccgttgcccggggatgggtccctgagacttggcgaagtaggagccctgtgtgatcgtgcgtcagagtcggggctcagaccagtcgtggccagggcagttaccaggacggtctccggaggccgggattcgcggagggtcaaccaggaggaagaaacgccagaaggaagaaacctcagacagatcgccggggacgcagcgcgggattccagcctcaggcgtgcatggacggtgtgcgggtgagtctccccaaaagtggcgcccttgtgatgtggaggacaggtctgccagggtgtccgtgggctgctgtctcaccggtggcctcgtagtcgcggagagcagaacccgacagcttcaggggcagcctgggggtgggtgttacctgctgtatgtctgtgtgcgtcttggttgtgtgtgtgtgtgtgtgtttgtgtgtgtgtgtgtgtctgtgtgcgtgcgtgcgtggcgtccgtgtgcccacttctgtctatctcttacgtctctctctctctctccccgcccccgctctttccgtcgccctctctttctatctctgtccgtctgtgtgtgcttgtgcctcgggacacatgtgccccgtgtgccggacggtgggtttcttgcaggtcggcctttcttctggtcagcctctccccgcgtctctgcctcggtcgtgtagccggttagcagtcggtttcccggcggttccggtttgggggtctgtgagggcctgggcaatgccggcatctgcttcggaaccgcaggggttttcgtcccctccccatccggagcagcctctttcctaggctagatccagacgaccgctccccaagcaaggacaacggcctcccaggcgctcattgtccacccgcaggagggtgcccgcagaccttcaagaggatggttctcacgcctctcgccctctccctcatggagaaatggagccacagctcgacgcagggacggagaaggaagccggcaaggggatggggcaagcatctctgtcactcaaaggctggccttcctggccgagtcacccgtctgacactcctccccggatgcccgttgtggtggcatggccccgtatcctgcctgggctctggcctctgctctgtcctccctcttgctgtgtctgccccgtctctgagaagcctggcggcttcttagtctggctcaacgtcttcaacaaagaagacttcccagtccatcagggagaaaccccgtgggcgtccgtgtcgtgatcgtttccctctccacaccactttctggatgattgggcaggtgtggtgatcctggagctctgggcttccatacctgtgtgggacagggaagctctcttggtctccatggcccaagtgatggctgcgcgctcggtccaggaagagggggaggcaagcccaccgttccccacattggccttccaggaaaggcggtgttgcagcccacctgcacttcctgtctgatccttgagggccaaccggttcctccgctcctggggaaagcgccttctggcactgaatcttttggctgccacggatgtcagggagccaacgggactgggttttgcctgggtgcagcggaggttgcgtcaggggtacctaagcggtagcggcgtgggggtggggtgtacttggtccaaagctctcggctcctctggcgggcctccctgaatgtggcctggactcgcgcacaggccctgtctcgcaggtttgcaggtgcgcttggcttttcctccgctttgtggggcaggtctccagtggcccccgggcgcacgcctggacatcactgtccgtcccgtcgtcgccccctacggcctcaaagacacacgctcactgcatgtgctcttgggggacgtcagtgccacgtttggtcacacgggctccagctcggactcgcctctgtctgcctttgccg

SEQ ID NO: 9010 - DNA, 1126 bp, Artificial sequence
  DNA replication origin
agaccctttccgcctcactgcattgtaaccccattcccgatcagccggtgggagccatcatcggatcccaagaggagtccgcgcagcccagccagcaccccgaaggtcctccttcaccgggaacagaagcaggagaccgatcaaggaggtcctgacgacaggactcctatgggtccgaccctgggtctcccgcaggcccctctggtagacctcttcccacccgccgcctcgggctgcgccgcagccgccgccgccgcaacctccagcaccgccgccccagtccccgcagccgccgcgtcgccgccattttttaaagggtccgcagcctgactctgctgagtaaggaggggtggggcgggtgagtcggcctcgccagtgcgcatgcgcgaggccccagccgccgctttggtcacagtgaccgccaccgttgcccggggatgggtccctgagacttggcgaagtaggagccctgtgtgattgtgcgtcagagtcggggctcagaccagtcctggccagggcagttaccaggacggtctccggaggctgggattcgcggagggtccgccaggaggaagaaacctcagacagatcgccggggacgcagcgcgggatcccagcctcaggcgtgcacggacggtgtgcaggtgagtctccccaaaagtagcgcccttgtgatgtggaggacaggtctgccagggtgtccgtgggctgctgtctcaccggtggcctcgtagtcgcggagagcagaacccggcagcttcaggggcagcctgggggtgggtgttacctgctgtatgtctgtgtgcgtcttggttgtgtgtgtgtgtgtgtgtgtgtgtgtgtgtgtgtgtgtgtgtgtgtctgtgtgcgtgcgtgcgtggcgtccgtgtgcccacttctgtctatctcttacgtctctctctctctctccccgccctcgctctttccgtcgccctctctttctatctctgtccgtctgtgtgtgcttgtgcctcgggacacatgtgccccgtgtgccggagggtgggtttcttgcaggtcggcctttcttctggtcagcctctccccgcgtctctgcctcggtcgtgtagccggttagcagtcggtttcccggcggttccggttt

SEQ ID NO: 9011 - DNA, 1997 bp, Artificial sequence
  DNA replication origin
ccaaatcacaagggcgccactattggggagactcacccgcacaccgtccccgcaggcctgaggctgggatcccgtgctgcgtccccggcgatctgtctgaagtttcttccttctggcgtttcttcctccaggttgaccctccgcgaatcccggcctccggagaccgtcctggtaactgccctggccacgactggtctgagccccgactctgacgcacgatcacacagggctcctacttcgccaagtctcagggacccatccccgggcaacggtggcggtcactgtgaccaaagcagcggctggggcctcgcgcatgcgcactggcgaggccgactcacccgccccacccctccttactcagcagagtcaggctgcggaccctttaaaaaatggcggcgacgcggcggctgcggggactgaggcggcggtgctggaggttgcggcggcggttgcggcgcagcccgaggcggcgggtgggaagaggactaccagaggggcctgcgggagacccagggtcggacccataggagtcctgtcatcaggacctccttgatcggtctcctgcttctgttcccggtgaaggaggaccttcggggtgctggctgggctgcgcggacacctcttgggatccgatgatggctcccaccggctgatcgggaatgaggtcactatgcagtgaggcggaaagggtctcgccggggcacggaaagatccccagggccgcaaggcgtgctgtcgtctgcaacggcactgacccatgagcccactgcctccctccttcctgggtggagcaggggcctgccttcatctccaaggcccggtggctcaggcatcccaacgcagcttccggcgacaccggcaaagacagacagaggcgagtccgagctggagcccgtgtgaccaaacgtggcactgacgtcccccaagagcacatgcagtgagcgtgtgtctttgaggccgtagggggcgacgacgagatggacagtgatgtccaggcgtgcgcccgggggccactggagacctgccccacaaagcggaggaaaagccaagcgcacctgcaaacctgcgagacagggcctgtgcgcgagtccaggccacattcagggaggcccgccagaggagcccagagctttggaccaagtacaccccacccccacgccgctaccgcttaggtacccctgacgcaacctcccctgcacccagccaaaacccagtcccgttggctccctgacatccgtggcagccaaaagattcagtgccagaaggcgctttccccaggagcggagggaccggttggccctcaaggatcagacaggaagtgcaggtgggatgcaacaccgcctttcctggaaggccaatgtggggaacggtgggcttgcctccccctcttcctggactgagcgcgcagccatcacttgggccatggagaccaagagagcttccctgtcccacacaggtatggaagcccagagctccaggatcaccacacctgcccaatcatgcagaaagaggtgtcgagagggaaacgatcatgacacggacgcccacggggtttctccctggactgggaagtcttctttgttgaagacgttgagccagactaagaagccgccatgcttctcagagacggggcagacacagcaaaagggaggacagagcagaggccagagcccaggaaggatacggggccatgccaccaccacgggcatccggggaggagtgtcagacgggtgactcggccaggaaggccagcctttgagtgacagagatgcttgccccatccccttgccggcttccttctccgtccctgcgtcgagctgtggctccatttctccatgagggagagggcgagaggcgtgagaaccatcctcttgaaggtctgcgggcaccctcctgcgggtggacaatgagcgcctgggaggccgttgtccttgcttggggagcggtcgtctggatctagcctagcaaagaggctgctccggatggggaggggacga

SEQ ID NO: 9012 - DNA, 2294 bp, Artificial sequence
  DNA replication origin
agccggtgggagccatcatcggatcccaagaggtgtccgcgcagcccagccagcaccccgaaggtcctccttcaccgggaacagaagcaggagaccgatcaaggaggtcctgatgacaggactcctatgggtccgaccctgggtctcccgcaggcccctctggtagtcctcttcccacccgccgcctcgggctgcgccgcaaccgccgccgcaacctccagcaccgccgcctcagtccccgcagccgccgcgtcgccgccattttttaaagggtccgcagcctgactctgctgagtaaggaggggtggggcgggtgagtcggcctcgccagtgcgcatgcgcgaggccccagccgctgctttggtcacagtgaccgccaccgttgcccggggatgggtccctgagacttggcgaagtaggagccctgtgtgatcgtgcgtcagagtcggggctcagaccagtcgtggccagggcagttaccaggacggtctccggaggccgggattcgcggagggtcaacctggaggaagaaacgccagaaggaagaaacttcagacagatcgccggggacgcagcacgggatcccagcctcaggcctgcggggacggtgtgcgggtgagtctccccaatagtggcgcccttgtgatttggaggacaggtctaccagggtgtccgtgggctgctgtctcaccggtggcttcgtagtctcggagagcagaacccggcagcttcaggggcagcctgggggtgggtgttacctgctgtatgtctgtgtgcgtcttggttgtgtgtgtttgtgtgtgtgtgtgtgtgtgtgtgtgtgtgtgtgtctgtgtgcgtgcgtgcgcgcgtctgtgtgcccacttctatctcttacgtctctctctctctctccccgcccccgctctttccgtcgccctctctttctatctctgtccgtctgtgtgtgcttgtgcctcgggacacatgtgccccgtgcgccggagggtgggtttcttgcaggtcggcctttcttctggtcagccctccccgcgtcactgcctgggtcgtgtggccggatggcagtcggtttcccggcggttccggtttgggggtctgtgaaggcctgcgcaacgcaggcatctgcgtcggaaccgcaggggttttcgtcccctccccatccggagcagcctctttgctaggctagatccagacgaccgctccacaagcaaggacaacggcctcccaggcgctcattgttcaaccgcaggagggtgcccgcagaccttcaagaagatggttctcacgcctctcgccctctccctcatggagaaatggagccacagctcgacgcagggacggagaaggaagccggcaaggggatggggcaagcatctctgtcactcaaaagctggccttcctggccgagtcacccgtctgacactcctccccggatgcccgtggtggtggcatggccccgtatcctgcctggactctggcctctgctctgtcctccctcttgctgtgtctgccccgtctctgcgaagcctggcggcttcttagtctggctcaacgtcttcaacaaagaagacttcccagtccatcagggagaaaccccgtgggcgtccgtgtcgtgatcgtttccctctccacacctctttctggatgattgggcaggtgtggtgatcctggagctctgggcttccatacctgtgtgggacagggaagctctcttggtctccatggcccaagtgatggctgcgcgctcggtccaggaagagggggaggcaagcccaccgttccccacattggccttccaggaaaggcggtgttgcagcccacctgcacttcctgtctgatccttgagggccaaccggttcctccgctcctggggaaagcgccttctggcactgaatcttttggctgccacggatgtcagggagccaacgggactgggtttttgctgggtgcagcggaggttgcgtcaggggtacctaagcggtagcggcgtgggggtggggtgtacttggtccaaacctctgggctcctctggcgggcctccctgaatgtggcctggactcgcgcacaggccctgtctcgcaggtttgcaggtgcgcttggcttttcctccgctttgtggggcaggtctccagtggcccccgggcgcacgcctggacatcactgtccgtctcgtcgtcgccccctacggcctcaaagacacacgctcactgcatgtgctcttgggggacgtcagtgccacgtttggtcacacgggctccagctcggactcgcctctgtctgcctttgccggtgtc

SEQ ID NO: 9013 - DNA, 2387 bp, Artificial sequence
  DNA replication origin
caggaaggagggaggcagtggactcatgggtccgtgccgttgcagacgacagcacgccttgcggccctggggatctttccttgccccggcgagaccctttccgcctcactgcattgtaaccccattcccgatcagccggtgggagccatcatcggatcccaagaggagtccgcgcagcccagccagcaccccgaaggtcctccttcaccgggaacagaagcaggagaccgatcaaggaggtcctgacgacaggactcctatgggtccgaccctgggtctcccgcaggcccctctggtagacctcttcccacccgccgcctcgggctgcgccgcagccgccgccgccgcaacctccagcaccgcctccccagtccccgcagccgccgcgtcgccgccattttttaaagggtccgcagcctgactctgctgagtaaggaggggtggggcgggtgagtcggcctcgccagtgcgcatgcgcgaggccccagccgccgctttggtcacagtgaccgccaccgttgcccggggatgggtccctgagacttggcgaagtaggagccctgtgtgattgtgcgtcagagtcggggctcagaccagtcctggccagggcagttaccaggacggtctccggaggctgggattcgcggagggtccgccaggaggaagaaacctcagacagatcgccggggacgcagcacgggatcccagcctcaggcgtgcacggacggtgtgcgggtgagtctccccaaaagtagcgcccttttgatgtggaggacaggtctgccagggtgtccgtgggctgctgtctcaccggtggcttcgtagtcgcggagagcagaacccggcagcttcaggggcagcctgggggtgggtgttacctgctgtatgtctgtgtgcgtcttggttgtgtgtgtgtgtgtgtgtgtgtgtgtgtgtctgtgtgcgtgcgtgcgtggcgtccgtgtgcccacttctgtctatctcttacgtctctctctctctctccccgcccccgctctttccgtcgccctctctttctatctctgtccgtctgtgtgtgcttgtgcctcgggacacatgtgccccgtgtgccggagggtgggtttcttgcaggtcggcctttcttctggtcagcctctccccgcgtctctgcctcggtcgtgtagccggttagcagtcggtttcccggcggttccggtttgggggtctgggagggcctgggcaatgccggcatctgcttcggaaccgcaggggttttcgtcccctccccatccggagcagcctctttgctaggctagatccagacgaccgctccccaagcaaggacaacggcctcccaggcgctcattgtccacccgcaggagggtgcccgcagaccttcaagaagatggttctcacgcctctcgccctctccctcatggagaaatggagccacagctcgacgcagggacggagaaggaagccggcaaggggatggggcaagcatctctgtcactcaaaggctggccttcctggccgagtcacccgtctgacactcctccccggatgcccgttgtggtggcatggccccgtatcctgcctgggctctggcctctgctctgtcctccctcttgctgtgtctgccccgtctctgagaagcctggcggcttcttagtctggctcaacgtcttcaacaaagaagacttcccagtccatcagggagaaaccccgtgggcgtccgtgtcgtgatcgtttccctctcgacacctctttctggatgattgggcaggtgtggtgatcctggagctctgggcttccatacctgtgtgggacagggaagctctcttggtctccatggcccaagtgatggctgcgcgctcggtccaggaagagggggaggcaagcccaccgttccccacattggccttccaggaaaggcggtattgcagcccacctgcacttcctgtctgatacttgagggccaaccggttcctccgctcctggggaaagcgccttctggcactgaatcttttggctgccacggatgtcagggagccaacgggactgggttttggctgggtgcagcggaggttgcgtcaggggtacctaagcggtagcggcgtgggggtggggtgtacttggtccaaagctctgggctcctctggcgggcctccctgaatgtggcctggactcgcgcacaggccctgtctcgcaggtttgcaggtgcgcttggcttttcctccgctttgtggggcaggtctccagtggcccccgggcgcacgcctggacatcactgtccgtctcgtcgtcgccccctatggcctcaaagacacacgctcactgcatgtgctcttgggggacgtcagtgccacgtttggtcacacgggctccagctcggactcgcctct

SEQ ID NO: 9014 - DNA, 1508 bp, Artificial sequence
  DNA replication origin
ctcactgcattgtaaccccattcccgatcagccggtgggagccatcatcggatcccaagaggagtccgcgcagcccagccagcaccccgaaggtcctccttcaccgggaacagaatcaggagaccgatcaaggaggtcctgacgacaggactcctatgggtccgaccctgggtctcccgcaggcccctctggtagacctcttcccacccgccgcctcgggctgcgccgcagccgccgccgccgcaacctccagcaccgccgccccagtccccgcagccgccgcgtcaccgccattttttaaagggtccgcagcctgactctgctgagtaaggaggggtggggcgggtgagtcggcctcgccagtgcgcatgcgcgaggccccagccgccgctttggtcacagtgaccgccaccgttgcccggggatgggtccctgagacttggcgaagtaggagccctgtgtgattgtgcgtcagagttggggctgagaccagtcctggccagggcagttaccaggacggtctccggaggctgggattcgcggagggtccgccaggaggaagaaacctcagacagatcgccggggacgcagcgcgggatcccagcctcaggcgtgcacggacggtgtgcgggtgagtctccccaaaagtagcgcccttgtgatgtggaggacaggtctgccagggtgtccgtgggctgctgtctcaccggtggcctcgtagtcgcggagagcagaacccggcagcttcaggggcagcctgggggtgggtgttacctgctgtatgtctgtgtgcgtcttggttgtgtgtgtgtgtgtgtgtgtgtgtgtgtctgtgtgcgtgcgtgcgtggcgtccgtgtgcccacttctgtctatctcttacgtctctctctctctctccccgccctcgctctttccgtcgccctctctttctatctctgtccgtctgtgtgtgcttgtgcctcgggacacatgtgccccgtgtgccggagggtgggtttcttgcaggtcggcctttcttctggtcagcctctccccgcgtctctgcctcggtcgtgtagccggttagcagtcggtttcccggcggttccggtttgggggtctgtgagggcctgggcaatgccggcatctgcttcggaaccgcaggggttttcgtcccctccccatccggagcagcctctttgctaggctagatccagaggaccgctccccaagcaaggacaacggcctcccaggcgctcattgtccacccgcaggagggtgcccgctgaccttcaagaggatggttctcacgcctctcgccctctccctcatggagaaatggagccacagctcgacgcagggacggagaaggaagccggcaaggggatggggcaagcatctctgtcactcaaaggctggccttcctggccgagtcacccgtctgacactcctccccggatgcccgtggtggtggcatggccccatatcctgcctgggctctggcctctgctctgtcctcccttttcc

SEQ ID NO: 9015 - DNA, 1548 bp, Artificial sequence
  DNA replication origin
agacctgtcctccacatcacaagggcgccactattggggagactcacccgcacaccgtccccgcacgcctcaggctgggatcccgtgctgcgtccccggcgatctgtctcaggtttcttccttctggcgtttcttcctcctggttgaccctccgcgaatcccggcctccggagaccgtcctggtaactgccctggccacgactggtctgagccccgactctgacgcacgatcacacagggctcctacttcgccaagtctcagggacccatccccgagcaacggtggcggtcactgtgaccaaagcggcggctggggcctcgcgcatgcgcactggcgaggccgactcacccgccccacccctccttactcagcagagtcaggctgcggaccctttaaaaaatggcggcgacgcggcggctgcggggactggggcggcggtgctggaggttgcggcggcggcggctgcggcgcagcccgaggcggcgggtgggaagaggactaccagaggggcctgcgggagacccagggtcggacccataggagtcctgtcgtcaggacctccttgatcggtctcctgcttctgttcccggtgaaggaggaccttcggggtgctggctgggctgcgcggacacctcttgggatccgatgatggctcccaccggctgatcgggaatgaggtcactatgcagtgaggcggaaagggtctcgccggggcacggaaagatccccagggccgcaaggcgtgctgtcgtctgcaaccgcactgacccatgagcccactgcctccgtccttcctggggggagcagggacctgccttcatctccaaggcccgggggctccggcatcccaacgcagcttccggcgacaccggcaaagacagacagaggcgagtccgagctggagcccgtgtgaccaaacgtggcactgacgtcccccaagagcacatgcagtgagcgtgtgtctttgaggccgtagggggcgacgacgagatggacagtgatgtccaggcgtgcgcccgggggccactggagacctgccccacaaagcggaggaaaagccaagcgcacctgcaaacctgcgagacagggccagtgcgcgagtccaggccacattcagggaggcccgccagaggagcccagagctttggaccaagtacaccccacccccacgccgctaccgcttaggtacccctgacgcaacctcccctgcacccagccaaaacccagtcccgttggctccctgacatccgtggcagccaaaagattcagtgctagaaggcgctttccccaggagcggagggaccggttggccctcaaggatcagacaggaagtgcaggtgggatgcaacaccgcctttcctggaaggccaatgtggggaacggtgggcttgcctccccctcttcctggactgagcgcgcagccatcacttgggccatggagaccaagagagcttccctgtcccacacaggtatggaagcccagagctccaggatcaccacacctgcccaatcatgcagaaagaggtgtcgagagggaaacgatcatg

SEQ ID NO: 9016 - DNA, 2599 bp, Artificial sequence
  DNA replication origin
tgacctcattcccgatcagccggtgggagccatcatcggatcccaagaggtgtccgcgcagcccagccagcaccccgaaggtcctccttcaccgggaacagaagcaggagaccgatcaaggaggtcctgacgacaggactcctatgggtccgaccctgggtctcccgcaggcccctctggtagtcctcttcccacccgccgcctcgggctgcgccgcagccgccgccgccgcaacctccagcaccgccgccccagtccccgcagccgccgcgtcgccgccattttttaaagggtccgcagcctgactctgctgagtaaggaggggtggggcgggtgagtcggcctcgccagtgcgcatgcgcgaggccccagccgccgctttggtcacagtgaccgccaccgttgctcggggatgggtccctgagacttggcgaagtaggagccctgtgtgatcgtgcgtcagagtcggggctcagaccagtcgtggccagggcagttaccaggacggtctccggaggccgggattcgcggagggtcaaccaggaggaagaaacgccagaaggaagaaacctgagacagatcgccggggacgcagcacgggatcccagcctgaggcgtgcggggacggtgtgcgggtgagtctccccaatagtggcgcccttgtgatgtggaggacaggtctaccagggtgtccgtgggctgctgtctcaccggtggcttcgtagtctcggagagcagaacccggcagcttcaggggcagcctgggggtgggtgttacctgctgtatgtctgtgtgcgtcttggttgtgtgtgtttgtgtgtgtgtgtgtgtgtgtgtgtgtgtgtctgtgtgcgtgcgtgcgcgcgtctgtgtgcccacttctatctcttacgtctctctctctctctcccccccccccgctctttccgtcgccctctctttgtatctctgtccgtctgtgtgtgcttgtgcctcgggacacatgtgccccgtgcgccggagggtgggtttcttgcaggtcggcctttcttctggtcagcctctccccgcgtcactgcctgggtcgtgtggccggatggcagtcggtttcccggcggttccggtttgggggtctgtgaaggcctgcgcaacgcgggcatctgcgtcggaaccgcaggggttttcgtcccctccccatccggagcagcctctttgctaggctagatccagacgaccgctccacaagcaaggacaacggcctcccaggcgctcattgttcaaccgcaggagggtgcccgcagaccttcaagaagatggttctcacgcctctcgccctctccctcatggagaaatggagccacagctcgacgcagggacggagaaggaagccggcaaggggatggggcaagcatctctgtcactcaaaagctggccttcctgaccgagtcacccgtctgacactcctccccggatgcccgtggtggtggcatggccccgtatcctgcctggactctggcctctgctctgtcctccctcttgctgtgtctgccccgtctctgcgaagcctggcggcttcttagtctggctcaacgtcttcaacaaagaagacttcccagtccatcagggagaaaccccgtgggcgtccgtgtcgtgatcgtttccctctccacacctctttctggatgattgggcaggtgtggtgatcctggagctctgggcttccatacctgtgtgggacagggaagctctcttggtctccatggcccaagtgatggctgcgcgctcggtccaggaagagggggaggcaagcccaccgttccccacattggccttccaggaaaggcggtgttgcatcccacctgcacttcctgtctgatccttgagggccaaccggttcctccgctcctggggaaagcgccttctggcactgaatcttttggctgccacggatgtcagggagccaacgggactgggttttggctgggtgcaggggaggttgcgtcaggggtacctaagcggtagcggcgtgggggtggggtgtacttggtccaaagctctgggctcctctggcgggcctccctgaatgtggcctggactcgcgcacaggccctgtctcgcaggtttgcaggtgcgcttggcttttcctccgctttgtggggcaggtctccagtggcccccgggcacacgcctggacatcactgtccgtctcgtcgtcgccccctacggcctcaaagacacacgctctctgcatgtgctcttgggggacgtcagtgccacgtttggtcacacgggctccagctcggactcgcctctgtctgcctttgccggtgtcgccggaagctgcgtcgggatgccggagcgcccgggccttgaagatgaaggcaggcccctgctccacccaggaaggagggaggcagtggactcatgggtccgtgccgttgcagacgacagcacgccttgcggccctggggatctttccttgccccggcgagaccctttccgcctcactgcattgtaaccccattcccgatcagccggtgggagccatcatcggatcccaagaggagtccgcgcagcccagccagcaccccgaaggtcctccttcaccgggaacagaag

SEQ ID NO: 9017 - DNA, 2722 bp, Artificial sequence
  DNA replication origin
gacagcacgccttgcggccctggggatctttccttgccccggcgagaccctttccgcctcactgcattgtaaccccattcccgatcagccggtgggagccatcatcggatcccaagaggagtccgcgcagcccagccagcaccccgaaggtcctccttcaccgggaacagaagcaggagaccgatcaaggaggtcctgacgacaggactcctatgggtccgaccctgggtctcccgcaggcccctctggtagacctcttcccacccgccgccttgggctgcgacgcagccgccgccgccgcaacctccagcaccgccgccccagtccccgcagccgccgcgtcgccgccattttttaaagggtccgcagcctgactctgctgagtaaggaggggtggggtgggtgagtcggcctcgccagtgcgcatgcgcgaggccccagccgccgctttggtcacagtgaccgccaccgttgcccggggatgggtccctgagaattggcgaagtaggagccctttgtgattgtgcgtcagagtcggggctgagaccagtcctggccagggcagttaccaggacggtctccggaggccgggattcgcggagggtccgccaggaggaagaaacctcagacagatcgccggggacgcagcgcgggatcccagcctcaggcgtgcacggacggtgtgcgggtgagtctccccaaaagtagcgcccttgtgatgtggaggacaggtctgccagggtgtccgtgggctgctgtctcaccggtggcctcgtagtcgcggagagcagaacccggcagcttcaggggcagcctgggggtgggtgttacctgctgtatgtctgtgtgcgtcttggttgtgtgtgtgtgtgtgtgtgtgtgtgtgtgtgtctgtgtgcgtgcgtgcgtggcgtccgtgtgcccacttctgtctatctcttacgtctctctctctctctccccgccctcgctctttccgtcgccctctctttctatctctgtccgtctgtgtgtgcttgtgcctcgggacacatgtgccccgtgtgccggagggtgggtttcttgcaggtcggcctttcttctggtcagcctctccccgcgtctctgcctcggtcgtgtagccggttagcagtcggtttcccggcggttccggtttgggggtctgtgagggcctgggcaatgccggcatctgcttcggaaccgcaggggttttcgtcccctccccatccggagcagcctctttgctaggctagatccagacgaccgctccccaagcaaggacaacggcctcccaggcgctcattgtccacccgcaggagggtgcccgcagaccttcaagaggatggttctcacgcctctcgccctctccctcatggagaaatggagccacagctcgacgcagggacggagaaggaagccggcaaggggatggggcaagcatctctgtcactcaaaggctggccttcctggccgagtcacccgtctgacactcctccccggatgcccgtggtggtggcatggccccgtatcctgcctgggctctggcctctgctctgtcctcccttttgctgtgtctgccccgtctctgagaagcatggcggcttcttagtctggctcaacgtcttcaacaaagaagacttcccagtccagggacaaaccccgtgggcgtccgtgtcatgatcgtttccctctcgacacctctttctgcatgattgggcaggtgtggtgatcctggagctctgggcttccatacctgtgtgggacagggaagctctcttggtctccatggcccaagtgatggctgcgcgctcagtccaggaagagggggaggcaagcccaccgttccccacattggccttccaggaaaggcggtgttgcatcccacctgcacttcctgtctgatccttgagggccaaccggttcctccgctcctggggaaagcgccttctggcactgaatcttttggctgccacggatgtcagggagccaacgggactgggttttggctgggtgcaggggaggttgcgtaaggggtacctaagcggtagcggcgtgggggtggggtgtacttggtccaaagctctgggctcctctggcgggcctccctgaatgtggcctggactcgcgcacaggccctgtctcgcaggtttgcaggtgcgcttggcttttcctccgctttgtggggcaggtctccagtggcccccgggcgcacgcctggacatcactgtccgtctcgtcgtcgccccctacggcctcaaagacacacgctctctgcatgtgctcttgggggacgtcagtgccacgtttggtcacacgggctccagctcggactcgcctctgtctgtctttgccggtgtcgccggaagctgcgtcgggatgccggagcccccgggctttggagatgaaggcaggcccctgctccacccaggatggagggaggcagtgggctcatgggtcagtgccgttgcagacgacagcaagccttgcggccctggggatctttccgtgccccggcgagaccctttccgcctcactgcattgtaaccccattcccgatcagccggtgggagccatcatcggatcccaagaggagtccgcgcagcccagccagcaccccgaaggtcctccttcaccgggaacagaagcaggagaccgatcaaggaggtcctgacgacaggactcctatgggtccgaccctgggtctcccgcaggcccctctggt

SEQ ID NO: 9018 - DNA, 2628 bp, Artificial sequence
  DNA replication origin
cccgatcagccggtgggagccatcatcggatcccaagaggagtccgcgcagcccagccagcaccccgaaggtcctccttcaccgggaacagaagcaggagaccgatcaaggaggtcctgacgacaggactcctatgggtccgaccctgggtctcccgcaggcccctctggtagacctcttcccacccgccgcctcgggctgcgccgcagccgccgccgccgcaacctccagcaccaccaccctagtccccgcagccgccgcgtcaccgccattttttaaagggtccgcagcctgactctgctgagtaaggaggggtggggcgggtgagtcggcctcgccagtgcgcatgcgcgaggccccagccgccgctttggtcacagtgaccgccaccgttgcccggggatgggtccctgagaattggcgaagtaggagccctttgtgattctgcgtcagagtcggggctgagaccagtcctggccagggcagttaccaggacggtctccggaggccgggattcgcggagggtccgccaggaggaagaaacctcagatagatcgccggggacgcagcgcgggatcccagcctcaggcgtgcacggacggtgtgcgggtgagtctccccaaaagtagcgcccttgtgatgtggaggacaggtctgccagggtgtccgtgggctgctgtctcaccggtggcctcgtagtcgcggagagcagaacccggcagcttcaggggcagcctgggggtgggtgttacctgctgtatgtctgtgtgcgtcttggttgtgtgtgtgtgtgtgtgtgtgtgtgtgtgtgtgtgtgtgtctgtgtgcgtgcgtgcgtggcgtccgtgtgcccacttctgtctatctcttacgtctctctctctctctcccccccctcgctctttccgtcgccctctctttctatctctgtccgtctgtgtgtgcttgtgcctcgggacacatgtgccccgtgtgccggagggtgggtttcttgcaggtcggcctttcttctggtcagcctctccccgcgtctctgcctcggtcgtgtagccggttagtagtcggtttcccggcggttccggtttgggggtctgtgagggcctgggcaatgccggcatctgcttcggaaccgcaggggttttcgtcccctccccatccggagcagcctctttgctaggctagatccagacgaccgctccccaagcaaggacaacggcctcccaggcgctcattgtccacccgcaggagggtgcccgcagaccttcaagaggatggttctcacgcctctcgccctctccctcatggagaaatggagccacagctcgacgcagggacggagaaggaagccggcaaggggatggggcaagcatctctgtcactcaaaggctggccttcctggccgagtcacccgtctgacactcctccccggatgcccgtggtggtggcatggccccgtatcctgcctggactctggcctctgctctgtcctccctcttgctgtgtctgccccgtctctgagaagcctggcggcttcttagtctggctcaacgtcttcaacaaagaagacttccctgtccatcagggagaaaccccgtgggcgtccgtgtcgtgatcgtttccctctccacaccactttctggatgattgggcaggtgtggtgatcctggagctctgggcttccatacctgtgtgggacagggaagctctcttggtctccatggcccaagtgatggctgcgcgctcggtccaggaagagggggagacaagcccaccgttccccacattggccttccaggaaaggcggtgttgcagcccacctgcacttcctgtctgatccttgagggccaaccggttcctccgctcctggggaaagcgccttctggcactgaatcttttggctgccacggatgtcagggagccaacgggactgggttttggttgggtgcagcggaggttgcgtcaggggtacctaagcggtagcggcgtgggggtggggtgtacttggtccaaagctctgggctcctctggcgggcctccctgaatgtggcctggactcgcgcacaggccctgtctcgcaggtttgcaggtgcgcttggcttttcctccgctttgtggggcaggtctccagtggcccccgggcgcacgcctggacatcactgtccgtctcgtagtcgccccctacggcctcaaagacacacgctcactgcatgtgctcttgggggacgtcagtgccacgtttggtcacacgggctccagctcggactcgcctctgtctgcctttgccggtgtcgccggaagctgcgtcgggatgccggagcgcccgggccttgaagatgaaggcaggcccctgctccacccaggaaggagggaggcagtggactcatgggtccgtgccgttgcagacgacagcacgccttgcggccctggggatctttccttgccccggcgagaccctttccgcctcactgcattgtaaccccattcccgatcagccggtgggagccatcatcggatcccaagaggagtccgcgcagcccagccagcaccccgaaggtcctccttcaccgggaacagaagcaggagaccgatcaaggaggtcctgacgacaggactcctatgggtccgacc

SEQ ID NO: 9019 - DNA, 2709 bp, Artificial sequence
  DNA replication origin
tgcggccctggggatctttccttgccccggcgagaccctttccgcctcactgcattgtaaccccattcccgatcagccggtgggagccatcatcggatcccaagaggagtccgcgcagcccagccagcaccccgaaggtcctccttcaccgggaacagaagcaggagaccgatcaaggaggtcctgacgacaggactcctatgggtccgaccctgggtctcccgcaggcccctctggtagacctcttcccacccgccgccttgggctgcgacgcagccgccgccgccgcaacctccagcaccgccgccccagtccccgcagccgccgcgtcgccgccattttttaaagggtccgcagcctgactctgctgagtaaggaggggtggggtgggtgagtcggcctcgccagtgcgcatgcgcgaggccccagccgccgctttggtcacagtgaccgccaccgttgcccggggatgggtccctgagaattggcgaagtaggagccctttgtgattgtgcgtcagagtcggggctgagaccagtcctggccagggcagttaccaggacggtctccggaggccgggattcgcggagggtccgccaggaggaagaaacctcagacagatcgccggggacgcagcgcgggatcccagcctcaggcgtgcacggacggtgtgcgggtgagtctccccaaaagtagcgcccttgtgatgtggaggacaggtctgccagggtgtccgtgggctgctgtctcaccggtggcctcgtagtcgcggagagcagaacccggcagcttcaggggcagcctgggggtgggtgttacctgctgtatgtctgtgtgcgtcttggttgtgtgtgtgtgtgtgtgtgtgtgtgtgtgtgtctgtgtgcgtgcgtgcgtggcgtccgtgtgcccacttctgtctatctcttacgtctctctctctctctccccgccctcgctctttccgtcgccctctctttctatctctgtccgtctgtgtgtgcttgtgcctcgggacacatgtgccccgtgtgccggagggtgggtttcttgcaggtcggcctttcttctggtcagcctctccccgcgtctctgcctcggtcgtgtagccggttagcagtcggtttcccggcggttccggtttgggggtctgtgagggcctgggcaatgccggcatctgcttcggaaccgcaggggttttcgtcccctccccatccggagcagcctctttgctaggctagatccagacgaccgctccccaagcaaggacaacggcctcccaggcgctcattgtccacccgcaggagggtgcccgcagaccttcaagaggatggttctcacgcctctcgccctctccctcatggagaaatggagccacagctcgacgcagggacggagaaggaagccggcaaggggatggggcaagcatctctgtcactcaaaggctggccttcctggccgagtcacccgtctgacactcctccccggatgcccgtggtggtggcatggccccgtatcctgcctgggctctggcctctgctctgtcctcccttttgctgtgtctgccccgtctctgagaagcatggcggcttcttagtctggctcaacgtcttcaacaaagaagacttcccagtccagggacaaaccccgtgggcgtccgtgtcatgatcgtttccctctcgacacctctttctgcatgattgggcaggtgtggtgatcctggagctctgggcttccatacctgtgtgggacagggaagctctcttggtctccatggcccaagtgatggctgcgcgctcagtccaggaagagggggaggcaagcccaccgttccccacattggccttccaggaaaggcggtgttgcatcccacctgcacttcctgtctgatccttgagggccaaccggttcctccgctcctggggaaagcgccttctggcactgaatcttttggctgccacggatgtcagggagccaacgggactgggttttggctgggtgcaggggaggttgcgtaaggggtacctaagcggtagcggcgtgggggtggggtgtacttggtccaaagctctgggctcctctggcgggcctccctgaatgtggcctggactcgcgcacaggccctgtctcgcaggtttgcaggtgcgcttggcttttcctccgctttgtggggcaggtctccagtggcccccgggcgcacgcctggacatcactgtccgtctcgtcgtcgccccctacggcctcaaagacacacgctctctgcatgtgctcttgggggacgtcagtgccacgtttggtcacacgggctccagctcggactcgcctctgtctgtctttgccggtgtcgccggaagctgcgtcgggatgccggagcccccgggctttggagatgaaggcaggcccctgctccacccaggatggagggaggcagtgggctcatgggtcagtgccgttgcagacgacagcaagccttgcggccctggggatctttccgtgccccggcgagaccctttccgcctcactgcattgtaaccccattcccgatcagccggtgggagccatcatcggatcccaagaggagtccgcgcagcccagccagcaccccgaaggtcctccttcaccgggaacagaagcaggagaccgatcaaggaggtcctgacgacaggactcctatgggtccgaccctgggtctcccgcaggcccctctgg

SEQ ID NO: 9020 - DNA, 2555 bp, Artificial sequence
  DNA replication origin
agccagcaccccgaaggtcctccttcaccgggaacagaagcaggagaccgatcaaggaggtcctgacgacaggactcctatgggtccgaccctgggtctcccgcaggcccctctggtagacctcttcccacccgccgcctcgggctgcgccgcagccgccgccgccgcaacctccagcaccaccaccctagtccccgcagccgccgcgtcaccgccattttttaaagggtccgcagcctgactctgctgagtaaggaggggtggggcgggtgagtcggcctcgccagtgcgcatgcgcgaggccccagccgccgctttggtcacagtgaccgccaccgttgcccggggatgggtccctgagaattggcgaagtaggagccctttgtgattctgcgtcagagtcggggctgagaccagtcctggccagggcagttaccaggacggtctccggaggccgggattcgcggagggtccgccaggaggaagaaacctcagatagatcgccggggacgcagcgcgggatcccagcctcaggcgtgcacggacggtgtgcgggtgagtctccccaaaagtagcgcccttgtgatgtggaggacaggtctgccagggtgtccgtgggctgctgtctcaccggtggcctcgtagtcgcggagagcagaacccggcagcttcaggggcagcctgggggtgggtgttacctgctgtatgtctgtgtgcgtcttggttgtgtgtgtgtgtgtgtgtgtgtgtgtgtgtgtgtgtgtgtctgtgtgcgtgcgtgcgtggcgtccgtgtgcccacttctgtctatctcttacgtctctctctctctctcccccccctcgctctttccgtcgccctctctttctatctctgtccgtctgtgtgtgcttgtgcctcgggacacatgtgccccgtgtgccggagggtgggtttcttgcaggtcggcctttcttctggtcagcctctccccgcgtctctgcctcggtcgtgtagccggttagtagtcggtttcccggcggttccggtttgggggtctgtgagggcctgggcaatgccggcatctgcttcggaaccgcaggggttttcgtcccctccccatccggagcagcctctttgctaggctagatccagacgaccgctccccaagcaaggacaacggcctcccaggcgctcattgtccacccgcaggagggtgcccgcagaccttcaagaggatggttctcacgcctctcgccctctccctcatggagaaatggagccacagctcgacgcagggacggagaaggaagccggcaaggggatggggcaagcatctctgtcactcaaaggctggccttcctggccgagtcacccgtctgacactcctccccggatgcccgtggtggtggcatggccccgtatcctgcctggactctggcctctgctctgtcctccctcttgctgtgtctgccccgtctctgagaagcctggcggcttcttagtctggctcaacgtcttcaacaaagaagacttccctgtccatcagggagaaaccccgtgggcgtccgtgtcgtgatcgtttccctctccacaccactttctggatgattgggcaggtgtggtgatcctggagctctgggcttccatacctgtgtgggacagggaagctctcttggtctccatggcccaagtgatggctgcgcgctcggtccaggaagagggggagacaagcccaccgttccccacattggccttccaggaaaggcggtgttgcagcccacctgcacttcctgtctgatccttgagggccaaccggttcctccgctcctggggaaagcgccttctggcactgaatcttttggctgccacggatgtcagggagccaacgggactgggttttggctgggtgcagcggaggttgcgtcaggggtacctaagcggtagcggcgtgggggtggggtgtacttggtccaaagctctgggctcctctggcgggcctccctgaatgtggcctggactcgcgcacaggccctgtctcgcaggtttgcaggtgcgcttggcttttcctccgctttgtggggcaggtctccagtggcccccgggcgcacgcctggacatcactgtccgtctcgtagtcgccccctacggcctcaaagacacacgctcactgcatgtgctcttgggggacgtcagtgccacgtttggtcacacgggctccagctcggactcgcctctgtctgcctttgccggtgtcgccggaagctgcgtcgggatgccggagcgcccgggccttgaagatgaaggcaggcccctgctccacccaggaaggagggaggcagtggactcatgggtccgtgccgttgcagacgacagcacgccttgcggccctggggatctttccttgccccggcgagaccctttccgcctcactgcattgtaaccccattcccgatcagccggtgggagccatcatcggatcccaagaggagtccgcgcagcccagccagcaccccgaaggtcctccttcaccgggaacagaatcaggagaccgatcaaggaggtcctgacgacag

SEQ ID NO: 9021 - DNA, 2733 bp, Artificial sequence
  DNA replication origin
cacgccttgcggccctggggatctttccttgccccggcgagaccctttccgcctcactgcattgtaaccccattcccgatcagccggtgggagccatcatcggatcccaagaggagtccgcgcagcccagccagcaccccgaaggtcctccttcaccgggaacagaatcaggagaccgatcaaggaggtcctgacgacaggactcctatgggtccgaccctgggtctcccgcaggcccctctggtagacctcttcccacccgccgcctcgggctgcgccgcagccgccgccgccgcaacctccagcaccgccgccccagtccccgcagccgccgcgtcaccgccgttttttaaagggtccgcagcctgactctgctgagtaaggaggggtggggcgggtgagtcggcctcgccagtgcgcatgcgcgaggccccagccgccgctttggtcacagtgactgccaccgttgcccggggatgggtccctgagaattggcgaagtaggagccctgtgtgattgtgcgtcagagtcggggctgagaccagtcctggccagggcagttaccaggacggtctccggaggccgggattcgcggagggtccgccaggaggaagaaacctcagacagatcgccggggccgcagcgcgggattccagcctcaggcgtgcacggacggtgtgcgggtgagtctccccaaaagtggcgcccttgtgatgtggaggacaggtctgccagggtgtccgtgggctgctgtctcaccggtggcctcgtagtcgcggagagcagaacccgacagcttcaggggcagcctgggggtgggtgttacctgctgtatgtctgtttgcgtcttggttgtgtgtgtgtgtgtgtgtgtgtttgtgtgtgtgtgtgtgtctgtgtgcgtgcgtgcgtggcgtccgtgtgcccacttctgtctatctcttgtctctctctctctctcccccccccctcgctctttccgtcgccctctctttctatctctgtccgtctgtgtgtgcttgtgcctcgggacacatgtgcctcgtgtgccggagggtgggtttcttgcaggtcggcctttcttctggtcagcctctccccgcgtctctgcctcggtcgtgtggccggttagcagtcggtttcccggcggttccggtttgggggtctgtgagggcctgggcaacgccggcatctgcttcggaaccgcaggggttttcgtcccctccccatccggagcagcctctttgctaggctagatccagacgaccgctccccaagcaaggacaacggcctcccaggcgctcattgtccacccgcaggagggtgcccgcagaccttcaagaagatggttctcacgcctctcgccctctccctcatggagaaatggagccacagatcgacgcagggacggagaaggaagccggcaaggggatggggcaagcatctctgtcactcaaaggctggccttcctggccgagtcacccgtctgacactcctctccggatgcccgtggtggtggcatggccccgtatcctgcctggactctggcctctgctctgtcctccctcttgctgtgtctgccccgtctctgagaagcctggcggcttcttattctggctcaacgtcttcaacaaagaagacttcccagtccatcagggagaaaccccgtgggcgtccgtgtcatgatcgtttccctctccacacctctttctggatgattgggcaggtgtggtgatcctggagctctgggcttccatacctgtgtgggacagggaagctctcttggtctccatggcccaagtgatggctgcgcgctcggtccaggaagagggggaggcaagcccaccgttccccacattggccttccaggaaaggcggtgttgcatcccacctgcacttcctgtctgatccttgagggccaaccggtccctccgctcctggggaaagcgccttctggcactgaatcttttggctgccacggatgtcagggagccaacgggactgggttttggctgggtgcaggggaggttgcgtcaggggtacctaagcggtagcggcgtgggggtggggtgtacttggtccaaagctctgggctcctctggcgggcctccctgaatgtggcctggactcgcgcacaggccctgtctcgcaggtttgcaggtgcgcttggcttttcctctgctttgtggggcaggtctccagtggcccccgggcgcacgcctggacatcactgtccgtctcgtcgtcgccccctacggcctcaaagacacacgctctctgcatgtgctcttgggggacgtcagtgccacgtttggtcacacgggctccagctcggactcgcctctgtctttgccgatgtcgccggaagctgcgtcgggatgccggagcccccgggccttggagatgaaggcaggcccctgctccacccaggaaggagggaggcagtgggctcatgggtcagtgccgttgcagacgacagcacgccttgcggccttggggatctttccgtgccccggcgagaccctttccgcctcactgcattgtaaccccattcccgatcagccggtgggagccatcatcggatcccaagaggtgtccgcgcagcccagccagcaccccgaaggtcctccttcaccgggaacagaagcaggagaccgatcaaggaggtcctgacgacaggactcctatgggtccgaccctgagtctcccgcaggcccctctggtagtcctctt

SEQ ID NO: 9022 - DNA, 1638 bp, Artificial sequence
  DNA replication origin
ccggagcccccgggccttggagatgaaggcaggcccctgctccacccaggaaggtgggaggcagtgggctcatgggtcagtgcctttgcagccgaccacacgccttgcggccctggggatctttctgtgccccagcgagaccctttccgcctcactgcattatgaccccattgccgatcgcccggtgggatccatcatcggatcccaagaggagtccgcgcagcccagccagcaccccgaagctcctccttccccgggaaccgaagcagaagaacgatcaaggaggtcctgacgacaggactcctacgggtccgaccctgggtctcccgcaggcccctctggtagtcctcttcccacccgccgcctggggctgcgccgcagccgccaccgccgcaacctccgtcaccgccgccccagtccccgcagccgccatgtcgccgccattttttaaagggtccgcagcctgactctgccgagtaaggggggtgcggcgggtgagtcggcctcgccagtgcgcatgcgcgaggccccagcccccggctttggtcacagtgaccgccaccgttgcccggggatgggtccctgagacttggcgaagtaggagccctgtgtgatcgtgcgtcagagtcggggctgagaccagtcctggccagggcagttaccaggacggtctccggaggccgggatgcgcggaggctccaccagcaggaagaaacgccaggaggaagaaacctgagacagatcgccggggacgcagcgcgggatcccagcctcaggcttgcgcggacggtgtgcgggtgagtctccccaaaagtggcgcccttgtgatgtcgaggacaggtctgcctgtgtgcccgtgggctgctctctctccggtggctcgtagtcgcggagatcagaacccggcaacttcaggagctgcctgggggtgggtgttacctgctgtatgtctgtgtgcgttatgggtgtgtgtgtgtgtgtgtgtgtgtgcgcgtccgcgcgtgcgtgtctgtgtgcccacttctgtctctctcttacgtctctctctctctctcccttctcgctctttccttcgccctctctttctctctctgtccgtctgtgtgttcgtgtgccttgggacacgtgtgccctgtgcgccggagggtgggtttcttgcacgtcggcctttcttctggtcagcctctccccgcgtctctgcctgggtcgtgtggccggttggcagtcgttttcccggcggttccggtttggggctctgtgaaggcctgggcaaagtgggcgtctgcgtcgcagccgcaggggttttcatcccctccccatccggagcagcctctttgctaggctagatccagacgaccgctccccaagcaaggacaacggcctcccaggcgctcattgtccagccgcaggagggtgcccgcagacctttaagtagatggttctcacgcctctcgccctctgccctcatcgagaaatcttgccacagctcgacccagggacggagaatgaagccggcaaggggatggggcaagtatctctgtccgtcaaaggtagtatagaagtccagcacagaggcatatccattattgtgcccaccacctcatcttcgggcttggtgaagggcaagtggcactgcag

SEQ ID NO: 9023 - DNA, 2500 bp, Artificial sequence
  DNA replication origin
gcgccacttttggggagactcacccgcacaccgtccgcgcaagcctgaggctgggatcccgcgctgcgtccccggcgatctgtctcaggtttcttcctcctggcgtttcttcctgctggtggagcctccgcgcatcccggcctccggagaccgtcctggtaactgccctggccaggactggtctcagccccgactctgacgcacgatcacacagggctcctacttcgccaagtctcagggacccatccccgggcaacggtggcggtcactgtgaccaaagccgggggctggggcctcgcgcatgcgcactggcgaggccgactcacccgccgcaccccccttactcggcagagtcaggctgcggaccctttaaaaaatggcggcgacatggcggctgcggggactggggcggcggtgacggaggttgcggcggtggcggctgcggcgcagccccaggcggcgggtgggaagaggactaccagaggggcctgcgggagacccagggtcggacccgtaggagtcctgtcgtcaggacctccttgatcgttcttctgcttcggttcccggggaaggaggagcttcggggtgctggctgggctgcgcggactcctcttgggatccgatgatggatcccaccgggcgatcggcaatggggtcataatgcagtgaggcggaaagggtctcgctggggcacagaaagatccccagggccgcaaggcgtgtggtcggctgcaaaggcactgacccatgagcccactgcctcccaccttcctgggtggagcaggggcctgccttcatctccaaggcccgggggctccggcatcccgacgcggcttctggcgacaccggcaaagacagacagaggcgagtccgagctggagcccgtgtgaccacacgtggcactgacgtcccccaagagcacaggcagtgagcgtgtgtctttgaggccatagggggcaacgacgagacggacagggatttccaggcgtgcgcccgggggccactggagacctgccccacaaagcggaggaaaagccaagcgctcctgaaaacctgcgaggcagggcctgtgcgcgagtccaggccacattcagggaggcccgccagaggagcccagagctttggaccaagtacaccccacccccacgccgctaccgcttaggtacccctgacgcaacctcccctgcacccagccaaaacccagtcccgttggctccctgacatccgtagcagccaaaagattcactgctagaaggcactttccccaggagcggaggaaccggttggctctcaaggatcagacaggaagtgcaggtgggatgcaacaccgcctttcctagaaggccaatgtcgggaacggtgggcttgcctccccctcttcctggaccaagcgcgcagccatcacttgggccatggagaccaagagagcttccctgtcccacacaggtatggaagcccagagctccaggatcaccacacctgcccaatcatccagaaagaggtgtggagagggaaacgatcatgacacggacccccacgaggtttctccctgatggactgggaagtcttctttgttggagacattgagccagactaagaagccgccaggcttctcagagacggggcagacacagcaagagggaggacagagcagaggccagagcccaggcaggatacggggccatgccaccaccacgggcatccggggaggagtgtcaaacgggtgactcagccacgaacgccagcatttgagtgacagagatgcttgccccatccccttgccggcttccttctccgtccctgcgtcgagctgtggcaagatttctcgatgagggcagagggcgagaggcgtgagaaccatctacttaaaggtctgcgggcaccctcctgcggctggacaatgagcgcctgggaggccgttgtcctgggttggggagcagtcgtctggatctagcctagcaaagaggctgtttcggatggggaggggatgaaaacccctgcggctccgacgcagatgcccacattgcccaggccttcacagacccccaaaccagaatcgccgggaaaacgactgccaaccggccacacgacccaggcagagacgcggggagaggctgaccagaagaaaggccgacgtgcaagaagcccaccctctggcgcacagggcacatgtgtcccaaggcacacgcacacacagacggacagagagagaaagagaggtcgacggaaagagcgagaagggagagagagagagacgtaagagagagacagaagtgggcacacagacatgcacacgtgcacacacacacagacacacgcacacacacccccataacgcacacagacatacagtaggtaacacccacccccaggcaggccctgaagttgccgggttctgctctccgcgactacgagccaccggtgagagagcagcccacgggcacacaggcagacctgtccttgacatcacaagggcaccatttttggagagactcacctg

SEQ ID NO: 9024 - DNA, 1554 bp, Artificial sequence
  DNA replication origin
agctgtggagaatcacagcggctactcaggtggggagccactttaagcaggcactgaggcgcaggagtatttgcgtactctggctctgggaactctcatgaggcaggagatctgtctactctcgtggggagggggctgagccagcgatccaagcggccacgctcccagggaactccacaagctaaaacccactggcttggaatccccgctgccagtgcactcagctagaaactgcctaagaagaccgagttcctgcttcctgcgggggaggggcggcgatcaccaatatggctccagtctccagtcagctgctttccctgcccgcagtgccagcgagatggggcggtccagagctagagagtccgccccagccgcagccccggccccagccccggccccagccccggccccagccgcagccccgcacagcacctggatcagtttgtggccaacatagcacagccccagccccagccccggccccggccccagccgcagccccgcacagcacctggatcagtttgtggccagcacagggcagcacagcacagcacagcatagcccagccccagccacagccccagccccgcacagcacctggatcagtttgtggccagcacagcacagcacagcacagcagagcagcagagcagctggatcagtttgtggcgggactgcttctttttttcttttttgagacggagtctggctttatcgcccaggctggagtgcagtggcgtgatctccgctcactgcaaactccgccttcctagttcccgccattctcctgcctcagcttcctgagtaggtgggactacaggcgcccgccaccgcgcctggctaattgtttttgtatttttagtaaagacagggtttcaccgtgttcagactgcttcctaaagcgtacctgaatccactctccctcactggggagggactccccattggaatctcagcatcctcagccaggggtttatggacaaaacactgataaccctgagaggaacctctaggaggaggggtgcctgcggtattgtggatcagccatcttagtcttttcttcctgctggctctggagagttagggcagtccagaggaggagaattatttccccaagcacagcacacccgccctgccaaggggcagacagactgcttatttaagcgagtctctgaactgctcctcctgactgagacctcccaacaagagttcagacacctcatataggagcgttcccgttagcattaggtcagtgcccctctgggacagagctcctagaggaaggagcaggctgccatctttgctggtctgcagcctccaatcgtgatatctccagggacgggaggaacccaggtgaatagggtctggaatgggccccaaacaaaccgtggcagacctacagaagaggggcctattgaaagaaaaacaaacagaaatcaatagcatcaacaaaaaagaccccccaaaaaacccatccaagatcaaaggtagataaatccatgaaaatgagaaagaaacaactcaaaaatgctgaaagctcaaaaagtcagagtg

SEQ ID NO: 9025 - DNA, 838 bp, Artificial sequence
  DNA replication origin
cccggccaagcgcgacccccagcggccttatgagctggtgatcgaggtgcgcgaccatgggcagccgcccctttcctccaccgccaccctggtggttcagctggtggatggcgccgtggagccccagggcgggggcgggagcggaggcggagggtcaggagagcaccagcgccccagtcgctctggcggcggggaaacctcgctagacctcaccctcatcctcatcatcgcgttgggctcggtgtccttcatcttcctgctggccatgatcgtgctggccgtgcgttgccaaaaagagaagaagctcaacatctatacttgtctggccagcgattgctgcctctgctgctgctgctgcggtggcggaggttcgacctgctgtggccgccaagcccgggcgcgcaagaagaaactcagcaagtcagacatcatgctggtgcagagctccaatgtacccagtaacccggcccaggtgccgatagaggagtccgggggctttggctcccaccaccacaaccagaattactgctatcaggtatgcctgacccctgagtccgccaagaccgacctgatgtttcttaagccctgcagcccttcgcggagtacggacactgagcacaacccctgcggggccatcgtcaccggttacaccgaccagcagcctgatatcatctccaacggaagcattttgtccaacgaggtaaggctgaagcgaaaggaccaccatctctcatctcctccatcagaaagcctcctctagcccggcccttgtatctctggtgcactgtatctatttttaggatattagcttatgtgtatcgttgtgggagcagagatg

SEQ ID NO: 9026 - DNA, 1240 bp, Artificial sequence
  DNA replication origin
aagactcagtgacgcttgggattgggactgaggggacaggtgggagggaaagaaggaagatttgggacgagttgcattgggcacagagactaggaagggaccgatgtgtaaaagaatgcctggacgtcaggcacctcagaccatttgcccattttatgacaagaattatttagatcttgtaggatggaaaaattgaaagtgccattttctggctatttggaactactatcgagtttgtattggggtcaagtggcattgcagaagaaaataagacacttaagattttaggtcaggtgatagttgaagaggttttaagttcttaagaacacaggctaagggagaagaaggaggaatggaaggtggaagcttgcccatagtgagggaggcaagcccagagaaaagaatagagacacggagaaggggtggggggttcttgccctccacaaaagcgggaaaggggttggggtgtggaaataaggggttggggcaccgagataagaggtcggggcatggaaataagggattggggtgcagagatacaaggttggggtatttgctcctcccccagaaaagcgggacttgtcactaagggtgaaggagaaggggttgggggtttcttgccccccagaaaggtggagaaggggtagagacacggagagaaggggttggggtacttgccccttccccagaaaagtgggacttgccactaagggtgaaggaccaaggcaggcgtccctgcgtggtctgacacctctgaaacctgggtgaataatcaaagaggcatccctgcaataattaaacaccaagggaaggctgccttcccagtcaatgaccagcgccggagttctgggtccaccaataaaatgtgtctcctttgtctctaccagaaaatgaaaggaattgaaattaaaagaagggagagattgaagagtggaaaggagaaagaggctgagaaacagtgagagaggttgcagaagagagtaagaagagggggcttacccgatttgaaattggtgagatgtttcttgggctggtcagtctgaggacctgaggcataggtggatctttctcacagagcaaagagcaggaggacgggggattgatctcccaagggaggtcccccaatccaagtcacggcaccaaatttcatacacgtctgtgtgaagagaccaccaaacaggctttgtgtgagcaacatggctgtttatttcacctgggtgcaggcgggctgagtccgaaa

SEQ ID NO: 9027 - DNA, 2048 bp, Artificial sequence
  DNA replication origin
tgtagcaatgctcgtcctgagtggggaggtgtgggcagtggcgccaggctgcgggagcagcagtggcggcagtgggtcccctgtgccctgcgtccctgaggcggctgactgcaacgctctcatccttgctgggccaagtggaacccgctcccaggttaggagcctctgtagcactggaccctggtccactctcgcccgccgctgctgcagggagagtaaggggtggaagccgagctgggcccagggcagtgctgcactcccgggtgctggcaggagccaaggacaagcgggagccccactggagcccgtcatcctgggggccaactcgagggggccggcccagctgcctgccagcaggggagcggcacagtcaggcagaggtgggcccccaaggtggagccgggcttggggcggtgccgcgcttgtacgcggagcttggggagcttgggggtcgggcccggggtggcggagtaaggagctggtgcggtgctttggcggcccagggcggaaagtaagagtggcgcgccgcttcagaggcccagccagcgacctggtcagctgcatggcctccgcccccagcttaccgagggcgctgggttcctgggcctcaggagaagactctgggctggggcttcctggcctgcatccgcagagtccgccccgcatcagtgtgaccgccaagcctgacactccggacggccatgcccggggcccacaatcctctcccagagatgcccttgggcagagccgccagctagatgactgggagccccaggccgccactgagcactggggccacggagggaggtcacagcgatatttctcctgccccagaagccggcccaggcacagcaaggacctggagccccctgccccaggctgctagtaggcatagctagggcttcctgcatgctctgcaaagtgggtgagagccccactttcccaggaataagacccgggcatctctgcattctgcaccctcagggacccagaaaggctcccccttcccccgtaggctcggggtgtctgcttccgctcctggcctctccctgctcccaactccagttccaatctcagagtggggttggggccgagcgcaggcgctgtcggtgtgagaacgcttgggacagcactgacacgctagccccatgctgcctcgttcctctctggactttgggtgctgactagcacagggggaagccaagggagtgctgagggcagctcagcactgacctgcaggtggcccttggtgcaagcagcctgggcactatgaacaacagcagaaggcagacaggctccttggcggaagcgaacaggtccccagtgaggctccaccttcaggccaatgttggcctgaaggctgggggctggactgccagtcccagggaccagagtggaaacctgtggagccttttctgggcccacccattgcctcccatggaaatatcggtgcacacttcctcccctctgaggccatgaaggccctaggctcaaccagggatgagcagacgaggggatggccagttgtagagaggagttaccctctctgctgagaacggaacacttgttgagacagcctgcttgcagagaggagctacgctctctgctaagagctgaacactggtcgtgaggacctgcttgcagagaagagctgccctgtctgctgagagctaaactctcattggggtgacttgcccagcaaagaggagctaccctctgcaggtttcctctgagctgttctattgctcaataaagctcctcttccccttgctcattctccacttgtctgcatacctcattcttcctggtcacaggacaagaaattgggacctgcagaatggcaaggctaaaagagcttgccattctgtaacccaaacagggctgaaacatgctccttgctcgccacgttgtgggcaaagagagggagagaaaagctatggtccttcagggagcctacacctgggagctccctgagccaagaatgtaactccctctttggggccctgcagttcctggcatctccaagcttctgggcgccaatgcaccac

SEQ ID NO: 9028 - DNA, 862 bp, Artificial sequence
  DNA replication origin
gggcatggccgtccggagtgtcaggcttggcggtcacactgatgcggggcggactctgcggatgcaggccaggaagccccagcccagagtcttctcctgaggcccaggaacccagcgccctcggtaagctgggggcggaggccatgcagctgaccaggtcgctggctgggcctctgaagcggcgcgccactcttactttccgccctgggccgccaaagcaccgcaccagctccttactccgccaccccgggcccgacccccaagctccccaagctccgcgtacaagcgcggcaccgccccaagcccggctccaccttgggggcccacctctgcctgactgtgccgctcccctgctggcaggcagctgggccggccccctcgagttggcccccaggatgacgggctccagtggggctcccgcttgtccttggctcctgccagcacccgggagtgcagcactgccctgggcccagctcggcttccaccccttactctccctgcagcagcggcgggcgagagtggaccagggtccagtgctacagaggctcctaacctgggagcgggttccacttggcccagcaaggatgagagcgttgcagtcagccgcctcagggacgcagggcacaggggacccactgccgccactgctgctcccgcagcctggcgccactgcccacacctccccactcaggacgagcattgctacaatcattaggagggcagaacttggtgtctttggtgacaggctttaagccatataaaccttgcttccaccataacggggcgaccatttcaagagaatgctttaagaaaatcacttttaggccgggcgcggtggctcgagcctgtaatcccagcactt

SEQ ID NO: 9029 - DNA, 923 bp, Artificial sequence
  DNA replication origin
gaagaatttttcttagtacagaacaaaatggagtctcctatgtctacttctttctacacagacacagcaacaatctgatttctcaatcttttccccacatttcccccttttctattcgacaaaaccaccatcgtcatcatggcccgttctcaatgagctgttgggtacacctcccagacggggtggcggccgggcagaggggctcctcacttcccagaaggggcggccgggcagaggtgccccccacctccttgatggggcggctggccgggtgggggctgccccccacctccctcccggacggggcggctgccgggcggagacgctccttacttcccagacggggcggctgccaggcagaggggctcctcacttctcagacggggcggctgccgggcggaggggctcctcacttctcagacggggcggctgccgggcggaggggctcctcacttctcagacggggcggctgccgggcagaggggctcctcacttctcagacggggcggctgccgggcggaggggctcctcacttctcagacggggcagccgggcagagacgctcctcacttcccagacggggtggcggccgggcagaggctgcaatctcggcactttgggaggccaaggcaggcggctgggaggtggaggttgtagcaagccgagatcacgccactgcactccagcctgggcaacattgagcactgagtgaatgagactccatctgcaatcccggcacctcgggagccgaggctggcagatcactcgcggttaggagctggagaccagcccggccaacacagcgaaaccccgtctccccgcaaaaaatacgaaaaccagtcaggcgtgggggcacgcgcctgcagtcgcaggcactccgcaggctgaggcaggagaatcaggcagggaggttgcagtgagca

SEQ ID NO: 9030 - DNA, 1351 bp, Artificial sequence
  DNA replication origin
gtaggggcggccgggcagaggcgcccctcaccttccggacggggtggctggccgggcggggggctgacccccccacctccctcctggactgggcggctggccgggcggggggctgacccccccacctccctcctggacagggcggctggctgggcagaggggctcctcacttcccagtaggggtggctgggcagaggcgcccctcacctcccggacggggcggctggccgggtggggggctgacccccccacctccctcccggatggggtggctgccgggtggagatgctcctcacttcccagacggggtggctgccgggcggagaggctcctcacttctcagacggggcggctgccgggcggagaggctcctcacttctcatactgggtggctgccgggtggagggtctcctcacttctcagacggggcggcccggcagagacgctcctcacctcccagacggggtggcggggcagaggcgctccccacatcccagacgatgggcggccgggcagagacgctcctcacttcctagatgtgatggcggccgggaagaggcgctcctcacttcccagatgggatggcggccgggcagagacgctcctcactttccagactgggcagccaggcagaggggctcctcacatcccagacgatgggcggccaggcagagacgctcctcacttcccagacggggtggtggctgggcagaggctgcaatctcggcacttctgggaggccaaggcaggcggctgggaggtggaggttgtagccagccgagatcacgccactgcactccagcctgggcgccattgagcactgagtgaaccagactccgtctgcaatcccggcacctcgggaggccgaggctggctgatcactcgcggttaggagctggagaccagcccggccaacacagcgaaaccccgtctccaccaaaaaaatacgaaaaccagtcaggcgtggcggcgcgcgcctgcaattgcaggcactccgcaggctgaggcaggagaatcaggccagggaggttgcagtgagccgagatggcagcagtatagtccagcttctgctcggcatgagagggagaccatggggagagggagaccatggggagagggagagggagagggagcgcattccagttcaagtgttttttaaggactattttgatgcacttctttacctacatagtatagattatggcagagatagctacatttcatggagccacgaggtctctatcctccctctcttctctcctcctcccacccacttgcctgcccttcctttcttccttttctctttccctctttcctttctccttccctcacttcctctcttcctccctcc

SEQ ID NO: 9031 - DNA, 917 bp, Artificial sequence
  DNA replication origin
gtctgggaagtgaggagcatctccacccggcagccaccccatccgggagggaggtgggggggtcagccccccacccggccagccgccccgtccgggaggtgaggggcgcctctgcccagccacccctactgggaagtgaggagcccctctgcccagccagccgccctgtccaggagggaggtgggggggtcagccccccgcccggccagccgcccagtccaggagggaggtgggggggtcagccccccgcccggccagccaccccgtccggaaggtgaggggcgcctctgcccggccgcccctactgggaagtgaggagcccctctgcccagccagccgccccctccgggagggaggtgagggggtcagccccccgcccggccagccgccccatccgggaggtgaggggcgcctctgcccggccgcccctactgggaagtgaggagcccctctgcccggccaccaccccgtctgggaggtgtgcccaacagctcattgagaacgggccaggatgacaatggcagctttgtggaatagaaaggggggaaaggtggggaaaagattgagaaatcggatggttgccgtgtctgtgtagaaagaagtagacatgggagacttttcattttgttctgtactaagaaaaattcttctgccttgggatcctgttgatctgtgaccttacccccaaccctgtgctctctgaaacatgtgctgtgtccactcagagttaaatggattaagggcggtgcaagatgtgctttgttaaacagatgcttgaaggcagcatgctcattaagagtcatcaccactccctaatctcaagtacccagggacacaaacgctgcggaaggccgcacagtcctctgcctaggaaaaccagagacctttgttcacttgtttatctgctgaccttccct

SEQ ID NO: 9032 - DNA, 1437 bp, Artificial sequence
  DNA replication origin
accaaatgggacaagatctctgtcaactatcaaattttgtgcaaatgtcacttcttagcatcgccattctctgctaatatgataatggattcttattacaactactgtcaagaaggatggaaaaaccctttccagcttgaaaacgtactttctggaaacagtgctgcagatcctgggaggattagtgagtggtcatctgtagtaggagagcagttaatttcggatgctgtgtcagagattagggacagtggcaaattgtgtgctgtgattgtgcagtggaactaaccatgctgtggagacgttccctatgcaagttgtatgagggcagataatgacaggcaagtgactgcaacccgaggcggttgtgtctaaagtcaaagggaaattcagtcagcttcacttaatagctaaagaatgagaggccgagggtggcattccaggcagaggccttgggagtgcaactggaaaggagaaggggctgcatggggcgggcacgtgtgtggtgggtatatagtgtgtgtgtgcacagtgtgtggagtatacagtgtgatgtgtggtgtcgagtggtgtgtgtgtgggggggtgtatagtgtggtctgtgtgtggtgtgtcgtgtatactgtggtgtgtgtggtgtgtgtgttgcatggtgtgtggtttatgtgcattgtgtggaatatattgtgtgtggtgtgcatgtggtgtatagagtatagtacggtatgtgtggtgtgttggggtgtgtgtgtgtgtgtgcatgttgtgtgaagtatagtgtggtgtgtggtgtgtgtgtatgtgtgtgcatggtgtatggtgatactgtgtcggagtgtgtgtgtggtgtgtatggtatatggagtatagtgtgtatgcgggtgtggtgtatagtgtgtgtggtgtgtagtgtatagtgtgtgatgtgtgtggtgtgtggaatatagtgtggtgtgtgtgtgtttgtgtacatgttgtgtgatgtacagtgtgttgtgtggaggatagatggtgtgcaatgtagtatgtgggtatatgtgtgtggtgtatgtatgctgtgctgtgtgtgtggtgtgtattgtgtggtgtgtgtgtggtgtatgcatgctgtgctgtgtgtgtggtgtgtattgtgtggtgtgtggtgcctgtgtgcctatagaagatggaaaggtgtcctcagagattaattagacgctgacttggtctgacagaaagttgagggaggggaggtcttaagagtcaatgtggaggttatacttgataaatagtgaatgttgagtcaaattgggttccctcaaatcaggtttttcatcacaaaaacagcacatgcatgcagcaacacatgacgcattctaaaatgtgcatacatcaaaggcaatgtgtcccaccgccgtcctgctcagctgctccaaacttgttccctttgttcccatcctg

SEQ ID NO: 9033 - DNA, 912 bp, Artificial sequence
  DNA replication origin
ttatagggtggaggagcagaggctgaggaagaattgggacctagctccgcctggcgaggagcagcctggggaggaggggaggtcagatgggtctgtagaaaaggaagattagaaagactcagcgatgcttggggttgggactgaggggggcaggtgggagggaaagaaggaagatttgggacgagttgcattgggcacagagactaggaagggaccgatgtgtaaaagaatgcctggacgtcaggcacctcagactgtttgcctactttacgataagaattatttagatcttgcaggatggaaaaattcaaagtgccgttttctggctatttggaactactgtcgagtttgtattggggtcaagtggcaatgcagaagaaaataagatgcttagattttaggtcaagtgagagttgaagcggttttaagttcttaagaacacaggctaagggaaaagaaggaggaatggagggtggaaggttgcccatagtgaaggaggcaagcccagagaaaagagagtagagacacggggggaaggggttcaggggttcttaccctccagaaaagtgggaaaggggtcggggcacagaaatacgaggtcagggcatggacataagggattggggtgcagagaatataagaggttggggtgcggaaataagggatcagggcaaagagatataaggggtcggggcatggaaataagggattggggcacagagataagaggtcggggtgcagaaataagggattgggacacagagatatgaggttggggtacttgcccctcccccagaaaagcaggacttgctgctaagggtgaaggagaaggggttgggggtttcttgcccccccagaaaggtggagaaggggtagagacacggagagaaggggttggggtacttgcccctt

SEQ ID NO: 9034 - DNA, 1425 bp, Artificial sequence
  DNA replication origin
ggccgccgaggccgccgccagcagccggggggatgcgggcctgggaacagcagccggcggggacaacgggcggcgcagccctggggcgggcaggcggcgcaggccgggcgcgtccctctgcagcagggccgagcagagccgccgcggactatgaaacatgccgggcgccgccgccaccacggcccctcgcgcgcccgaggagcggagcccggctggggccgagggcaccgagtcgagccgactgtccgggcagtgtgggcggatgctcccaggctccttctcgcgcggcgcaggttctggggaaatcccgggcagcagagccggagagggaggtgcaacaccgctgcgtcggcaccgtctgctgtgagacctggcgagacctgcagggcgcccggcgagcgctgcgcgctgacaaagcgggcgctaccaagcgggagctggaggggaatccgcgggacccggccactgcgcggccacgccaggctccctcgacccggcgtaatcctgttttaaaaggaagcggggcttaggctgatttatagatagaatccgcaggcggtctaaaataagaggtatccgttggagctgttctgaagaaaaaagcgtccccttccgctggccagcatggaagcgcccacaggctgggaatcccgagacagttccagggctgtggcccaggggacacgtgtctgtcagagtggcagacggcctacgtgtgtgcctgcgcgggtctgtgtggatacagcaaaaggcgtccgcctccgaccccctcggcagtgtgtgatgcgttaaacgatattaagcacaataaagcaccgcctgtgggcgaggcgacgatgattaaaacagcgttcttttcctcaaaagtgttatacttaggcaaagggagcagaaggtggcaagggaagtcagaccagaaagctctacaaggtagaatgagattattgccacaagatgccaaagattggctatagagatgacaacaggcccgggctctctagaaggttcattagaaggattggcatttgagttggcctatgacgtggaggtctagaatttacccacgtgaaactttggagggggtggtggtgagttataaatgaaaaaagtaaataagggtgtatttggggaaacaactcttagtcatgtaagatggaagctaaggagtaagaggacagatgcgtggataggttgtagtgtggaaggaaggggattatagtaggcttaattcggtggatagctgcgagccgttgacgttttgtaagctgagcaaagacatggtcagggctgtgctttaattggaaatcacatgtctctggttcatgaaaaggcagaaaggaaatcagctgagataacagatactgtagacccgcaccaggttactgttactggaaaagaaaggatggaagaaacatctcagacagg

SEQ ID NO: 9035 - DNA, 929 bp, Artificial sequence
  DNA replication origin
aggggaacttttctcccgtgcatcggtgcagcaggagagggggtgcacagaaggcggggtgactcccctgtagcagtctgtgctgggggtacagtgtccacctcacagtcactggggcggctgggggaaaggggggagtgaatgaagtaatggaggcgacgaatcaggaagtgatcaccttggagagtaacctgcctcgaatccggcgctgtcgcttcagggtgggttcggcgagcagcagcagcagctgccgggctgagcgctggcagcgggtgctggagaacggagccgcggttaagttgggcactcgggggcggacgagttgtgcgcttcaccccagttgctgaggaaccaggaagtgagtgaggctgttgtctctcggctgcgcctgccacgctgtctggccggagaggccgctgctgcccgcgttcgggggcggcgggcttctccggcgaacgctcgccacccccgctcggttctcccttcagacttcgtccacaattccatgacttccgcatggaccaggcagccaggggcgatgtccggtggaccgatacccgccaaaaaaaaatgctctgaccctccctcctccgcacattcccaccttatgcagtctcaggagtaacggtcctggacagggtcacttaataatgttgagtaaccgggatgatgtttcaggggcccgcctccctttgctcatttaacgggtggctgcgaagaaactaggtttatgccccttccctcgtgggttgtttttttagggggagaatgggaagaacacggaatatatttgtacccctgacctggagggttgcggcgtcagagaagaacatttatttttgtaaacagtgggtgaatgttaaggagcgaggcgggagggagggagtcttggccctagggaagtctcagcacggaattgcccccttccc

SEQ ID NO: 9036 - DNA, 1168 bp, Artificial sequence
  DNA replication origin
ccttattttccaagtaatgctttcagaatatgttctaggtatgactttgttggtgttcctgtcttaaaagtgcagatgtttcaagtgaactggttacatgttgcataaggtttgaaaaagccaaaagaagttaaatagccacctttatttacagctgcaggactaggtattagattgcttccaggaagaaaatatgattaatggctcttttccagaggggggacaattgcagacttttcttccgcagagcgtgaaatgtgcctcttcctgccgaggggctgtgtcctcgcgcggctcccggagccgtttcccagcctcaggtgtctctcgccgcaggctgcggccgctctctggagcaagcgtccgggacttcctgtttgggcgcggggcggaaggatcgcgttgccagctgcggcggccgccacagccacagccgccgccgccgccgccgccgcccctgcccctgccgcccctgcccctgccgttaggtggtggggtttctcagcccggcggcgggaggcgggccggcctcggcttcctgtcggaggacgcgcaaggatccgggcgtcggagtgtgtgcgagtgcgtgagtgtgtgtcggtcgcacggcgtgtgtctccggccgcgggttccgcctcctcccctgccgccgctgctcacggtgtaagtcaatgtgaagcagcagctccagccccgggataaacatggcgacgtctctgcatgagggacccacgaaccagctggatctgctcatccgggccggtaaggacaggggaacttttctcccgtgcatcggtgcagcaggagagggggtgcacagaaggcggggtgactcccctgtagcagtctgtgctgggggtacagtgtccacctcacagtcactggggcggctgggggaaaggggggagtgaatgaagtaatggaggcgacgaatcaggaagtgatcaccttggagagtaacctgcctcgaatccggcgctgtcgcttcagggtgggttcggcgagcagcagcagcagctgccgggctgagcgctggcagcgggtgctggagaacggagccgcggttaagttgggcactcgggggcggacgagttgtgcgcttcaccccagttgctgaggaaccaggaagtgagtgaggctgttgtctctcggctgcgcctgccacgct

SEQ ID NO: 9037 - DNA, 957 bp, Artificial sequence
  DNA replication origin
gaaaaaatgctgccaaatataaacttttaagagactatcaactttaagataggtactgatttcagagatgtcaaatgtgaaaaaatgtgtatcttgggattaatgaaatatgatttgcaattatgaatctttcctgaaactctcatttactgggaattaaacattaaaatatgaggcctgtgaaaaatggaggtgagttgtggtatagaaatccatgtcagggggcgcggccaggccaggcccgggggctccgcatgctgcagctgccctcgggcacccccgccgctgccctcgccgcggcgagctaaccccagccagccgggggcgtcccggaggcggtggcgcagggaggggcccgatgcgcgcacgtggccccggcggccgccatggcggacagcggcaccgcggggggcgcggcgttggcgaccccggcccccgggccgggcagtggcggcccaggaccacgcgtctactttcagagccccccccgggaccgcaggagagggcccgggcggcgcggacgatgagggcccagtgaggcgccaagggaaggtcaccgtcaagtatgaccgcaaggagctacggaagcgcctcaacctagaggagtggatcctggagcagctcacgcgcctctacgactgccaggaagaggagatcccagaactggagattgacgtggatgagctcctggacatggagagtgacgatgcccgggctgccacggtcaaggagctgctggttgactgttacaaacccacagaggccttcatttctggtctgctggacaagatccggggcatgcagaagctgagcacaccccagaagaagtgagggtccccgacccaggagaacggtggttcccacaggacaatcgctgccccccaacctcgtagcaacagcaataccgggggaccctgcggccaggcctggtgccatgagcagggctcctcgtgcccc

SEQ ID NO: 9038 - DNA, 1223 bp, Artificial sequence
  DNA replication origin
aagggcgcggcgataaagcctggctgtcccgactgccgccgcctccctccgcgcccccgccccgcgcttgtgttgtttgcttcggggtttgcggaggggttttccggcggctgcggcggtgacaccggccgggggctgggggaagggggctgagtgtccccaggcaacggtcgcggagcgggacttggagaaaggggaaggcgcgctgcgcgcctgcccgcggggagcgcggggcgcggggcagggctgagggaagaggttacagaccccggcgggggggatgggccgagcgcagctggtctctccgtgtttacatctctgcgcgagtcacctctgccgagaagcggactgaactgacccgcctcatcccgcggggaggccagggcgggggtccggctccggaggaagcgcgtcctgggagggtttgtgtagggcgggagtctgcggccggcgccggggctgggcggcgagctcggggcgggacctgggaggctccggccgctctgggtggcgggcaggcgggggggggcgctggacaccagtttccttccctgtcgtgccttatcgccgccgcttacctttccttcccggcgctgctagcttgcacgacaggttgtactcggcagttcttttattctcgctctccacgccggcaccgtgctgccatctccccctattccccgggaggtagggaggctttgctcggatcggaatctgtttcttaagcaaaacaaaaacgggctcgtaacaggcacgtccagtgaccgccttctggatcctcgcgaagctggtcctcagggaccgcgcgacgggatggtctaggggcgcggaaggaggacagggagggctctgccagggctggatgctgactctaccccaggagctttgtgatcagggtagccgagccctctcttctgctccatttgggcatttttattccatgtccataaaggactcaaaaaatattccgtgacaccaagaataatccagatcgcacagtttctaatctttttccctctgccagcatcctggatggactctttctaggaggcagattcgctgcagaatagcctttaagtttagtacttcattaaatgaggaagagggggacacgtcattgtaaaactgttaaaaattcccccctttcttgtgttcatgaacatttacttcagcttaatggtttaaattgtaatccggtgatgagagaatagtaatcgtgtgtt

SEQ ID NO: 9039 - DNA, 1093 bp, Artificial sequence
  DNA replication origin
gcggccccttggagctgcccggggagctgcgggcactcgcacctagccattgtcgctccttgcgcggtccgcaacggagaagtaactcaagtctgagtgttgttggtgcgagaatgagagagtgttctggtgtgggagtattttggcccaagtgcctgcgaattcgaaaacgaaaacccagcagtggctgcacgcttctggtttccacactttcacacaaaggggagccttcgagcggggcactctcacgcgccttcaagtgcacaaaagccaatgacacggtgccgtgggttgccctgtgtaggagcgtctctttaatgggctttgtaggcacagttaatgcatacaaacgcctcagtctatttcttcaccaccaccattccccgccgcggcgttttctgtatttgtttctttaacaaagagcacagcctgtccggtgcgcgcggggctccttttgctcccctccagggctcctgcagcctcgccgcgatggacctggcacctggcgcggtattcaccagctgatttctgggctccagcgttaccctttttacggcttcacaaccagtctggagcaaagaagaaacactgaggaatataagtgatagctgttctcttgaaagggacgtgggaaccgtggaaatcaccctagagtaaggctcaaatgtcagaaagctgcaggaggctccagatttaaatccctgaagagcctaagaatgtaatgatctctttcttttgttaatactgctgttgcctctattttcttgggggtgagtcttctcttcctttcttaaaaagcaactctgggccgggcgcagtggctcacgcctgtaatcccagcactttgggaggccctggagggtggattgcctgaggtcaggagttcgagaccagcctgcctaacatggtgaaaccccgtctccactaaaaatacaaaaattagctgggcgtggtggcacacgcctgtagtcccagctcctcgggaggcaggagaatcgcttgaaccccggaggtagaggttgcagtgagccgagatcgcaacactacactccagcctgggcgacagagcaagactccttctcaaaaaaaaaaa

SEQ ID NO: 9040 - DNA, 1097 bp, Artificial sequence
  DNA replication origin
gtcactcgggctggcgccggtctacctaggcaggcgtgggacctgtcgggggcttcacggcagcgcggaaggccagcctgcagagaggctgggcccagcgccctgactgacccagccccgccacgtccaaggttcccgccctctggaggaagccgcgcaatcactccgggggcggggagagacagacaactgagaggaaggaggtaccacgggcactctctcgcgagagggccgcagagccgcctttgacgggggcgtgtacctggagagcaacggtaaggacggagccgacggctccggcgtcgggtcggttccggcatcgacgtatcgtttggtcgccccagagaggagacaggtttcttcagcttgccgctgaggatgtggcatcggctgcgctcaccgccgccgcctctgtgaactgcgggagttgggacagcggccagggctagatgggtgggacgcgagtcctcgccgaaagcttgccctgtgcggggcgcacttggaggcgagctctgggccgtggcgagttttgcagcctaaggtcttggcaggcgcattgctgtgggctgccggagagcaggctggagttcgagaccgcccaccggagagcaggcgagagttcgaggcctaggtacagcgcatttcgctaggcatccccaagaatatccgcgtgatccttgtggccagagtttgttgagctaatatccccagcccaaacagtagagcacatcacatgtcggccacctgggagcgttgaacctggtagttactaggcgcccctggtggaaataaaactcattatgccctagttatgtcttagtgcctgggtgacgatgatgtagcggttaaagattaactgagcgcacttagaggttgtctttgtctacctaaggaaaatatcaatagattaaacccccaaccttaaagaatctccgtgaatttttctgaggaaacgtgcaatattgtcatacaaaaggccccaaatatgcaaacattgctttttgttaaaagtttgttttgttttgcagtgacatctgtttgagcagatgaatatgccattgggaaagtcaaggactgtcggagaggaggacatggca

SEQ ID NO: 9041 - DNA, 1063 bp, Artificial sequence
  DNA replication origin
agcggcaagctgaagaaacctgtctcctctctggggcgaccaaacgatacgtcgatgccggaaccgacccgacgccggagccgtcggctccgtccttaccgttgctctccaggtacacgcccccgtcaaaggcggctctgcggccctctcgcgagagagtgcccgtggtacctccttcctctcagttgtctgtctctccccgcccccggagtgattgcgcggcttcctccagagggcgggaaccttggacgtggcggggctgggtcagtcagggcgctgggcccagcctctctgcaggctggccttccgcgctgccgtgaagcccccgacaggtcccacgcctgcctaggtagaccggcgccagcccgagtgacgcctggcgtgtggccgcgggcaggcggctccgtgcggcggggcgggcgggtgccacacctgtgcgggcaagggcggggcgggaaggtgcgcaggcgcgctcggggctggtgggcggtggctcctgggaagttgcgcagccgaactggccggctgggcgcgcgctcttgcggtggcgtaatctctcagcctttctgtgtctcctttcctccgcctcagtttggggcgggtcgggggaatggctgaggagatggagtcgtcgctcgaggcaagcttttcgtccagcggggcagtgtcaggggcctcagggtttttgcctcctgcccgctcccgcatcttcaagataatcgtgatcggcgactccaatgtgggcaagacatgcctgacctaccgcttctgcgctggccgcttccccgaccgcaccgaggccacgataggggtggatttccgagaacgagcggtggagattgatggggagcgcatcaaggtgagcggatggggaactgttggggaggacagggtgacaggtgtcccaaccccaccgtgggctggtcgctggccgtgtgcacggtgtgtgtgcgctccatttttttctcacgctgatgagattggagttggggattggaaggattgcaatactgcaaacttctaaggcagcgtttctcagacttcattgtgcatgcgatttacc

SEQ ID NO: 9042 - DNA, 1252 bp, Artificial sequence
  DNA replication origin
acgccaagcaaatgaacaaatagttaaatacaacataataaatgataaatgttgcaatgacagtgtggagtaggcacttcatggagacgaaggttgaaaatgggcaagagaaggctttgcagaagatgcacttcttttttttttttttttttttaaaaacatagttttattgtaatgaattacggtctttactcacaaaacaaaaatatacatggaacattgacttcaagggttggttaggaagtggaaatctggtggcctctcccattgtcatggtcctgacatagggctaagaataggtgattccacgcttgagcccaggaggtggaggttgtggtgagccaagattgtgccactgaactccagcctgggtgacagagtaagaccctgttgaaagaggaaggaaggaaggaaggaaggaaggaaggaaggaaggaaggaaggacggacggacggactaagggagggagggaggaaggaaagaaggaaggaaggaagcaaggaaggaaggaaggggaaaaggaaagaaaggaagaaagagaaaggaaggaaggagtaagggagggaggaaggaaagaaggaaggaagcacggaaggaagtgggaaaggaaagaaaggaaggagggaggaaggaaggatggaaggagaaaggaaggaaagaaggaaggaaggaaaaagaaaggaagaaagaaagaaaagaaaaaagaaaaggaaaggaaagaaaaggtgattcctgagttaaaccttaaaggactgaggactagtagaagtttttaagtcagatcaagtgtggccaaagcattccaagtagagaaataactggtgtgaagccatgaagagcctgtgtttgaggaactggcgtggtaaatcgcagcggatgttatgaggaaggggaaggagatgaagccaggaggcagatgaggaagctgaacataccaaggggtctggattccactgtgcagtgatgggcaactccacagtaattctgctcctatttgcattagtgacttgtatactggcagagtaagcaggaagaatgacaatgacaagaaaaatacaaatcttaccagttcaggaaagtattaatacccaaatagattcacaaatgctaactgctcttgtgctgtgctaggaaaatcttgtctgtatgtggtttatgttatgttatgtgaggtttataatggattcaagcacgtttaggcagcaaacaagttttgctaatttttattgaagtctgtattggtcaaatgac

SEQ ID NO: 9043 - DNA, 1254 bp, Artificial sequence
  DNA replication origin
acctttgaggaaaagggagcggcgggtaccctgggccagatgcgttagcgcgcgtgcaggccggacgcggccctggaggaggaggtcggggcgcgggttacagcccagccgccgctgaccggggtaggcgcggcctcgggaaggcaccgacgcgggcctcccagtgccagcgcgggcggccgccgccagcttcccgcatcgcctccgcacccgccgaccctgccccgcctgcattcctgcagccccgaagcccccgcggcgggaaaggaggcgggaggagggcccgccgcttactggtttgagttatcctgtagatggagaagcaagagaagctgaacaacgcgacggcgaccagggtgatcagcaagttcacctgcttggtcctcatggccctggccaggctgcgggaggccggcgggtggaggcggcggataatgccagggacggggttgagcgcgcagagccccctccccgcggtgccgcgtgggtccccagcacacccgccctgggaagccgccttgccacagaacttctgcaccttttgcttcctgctctagggttcagcgcgtgctataaaccgctggccagggctactggtcgttaaaaacgataaactagggaaagcgccccattgcctggcacgtggtgggtgcgcaataactgttaggtgactttcctcgagtggcttatcaaagctttacccaagctgagaaacactagagcatcagtaggatgagactctctatggactccttgatctctcccctctaagctctcctctcattgaggactcactggcagtctgttataatatctgaacattctacttcaaatcagccctgcacgttggaagggctggcttctgtccccttgaaggggaagaaagatttgaacataccccagcctgaggatgccactatagcctgcgtgttctcatgtgctaatggctaggagctgtgactttccattgagccgggacccagccagatctcaaaacaaggagccaggagagacacctcaactatgttctccttcaccccttcagtctgttgccggtgcttgcctttggctgagctctactgaaaaccagaagacaagaaagttcagcttgatgtactggatggtccaaacctggcttctaggctgtggagcaggttggagaaaacgtagggaagattagggtgggagaaggaagctattcagcataaagagagatctccatactcagcatttcactgccttcttacttgaggt

SEQ ID NO: 9044 - DNA, 1024 bp, Artificial sequence
  DNA replication origin
tggcctggggcagctccatggccacctccatgccagccagtgggtcttccaggccgggcaggaactgctcagagcttgcctcttccaggtagcaggtgctgccgggcacaggcacggcctcccggggctccagtctcgggcactctccctccccggcgggcacgtcacagtctgacatttctaggctgggctggggctcgctcagggccgcctgggccaggccttcctccggcgctgcctctgccgcaggaaccgccacaggcacctccactggctcctccttggcctccactagcgtctcgggtgtcagctgcacccccaggtccaatgcggccgtgcagggttctgtccggcccggggaatccacgcatgcttcaggcccctccgcaaagtctgggcactcagagggctcggtgcagccctgcccggtggcactcagcgcctgggcctccaacgggccacctctgcatccgcctgcagggctcggggtagccatggtttccatggcgggcagtggcagcggcaactccagaggcggcagctctgcggggcgctcgtccacatcctccacctccaccttcgcctcctgttcagccagcggctcttcctccgggtcctcccgcagcggctctgggatcttggagggggacaggaggatgagcttgtcttcgggcgagagtgtcaggcgcttggtcccatcagctgggagcagcacatcaggggccaggccatccgcatcggcggccactgtgggctgccccaggaaagggtagggcctcccgtagtgtggtggcagggcttggaacggatacctgggcggcatatctgagaacaaggcctggaaagtgctgggggcttccttatccaactccaagtccttcttctcgaccacgttgtcgggggtctcttccttgcgggtgatacccggggtggacagcagggagtggggaggcaggctggtggggtgggagctaggggtagcagggtaggtgtaggcaggcgccttggacacgtcctccagcgg

SEQ ID NO: 9045 - DNA, 1473 bp, Artificial sequence
  DNA replication origin
ttgtcgggggtctcttccttgcgggtgatacccggggtggacagcagggagtggggaggcaggctggtggggtgggagctaggggtagcagggtaggtgtaggcaggcgccttggacacgtcctccagcggctggatgaccttggccttcagggcggccatgggggacgcgcggggcgatggcggcgggctcaccgccttgccatagatgctcgcagggccggcagccaggcggggggctttcgcagcagcatcccagggcaagcggtggccaggccagccttgcccccggcccccaggccccagttgctccacttctcctccatctctgcctggtactcctctgcgccttcagccgctccagctgggtgcttctttgcagttccagggcctgggccgcccgctgctgcaggtacaggaactcctgcagctgcaggaagtgctgcagcgaaaagagctgcaactgctgggcctggtgcagggggctgcagcctggagagtacagggcggggcaaaggggcagcacggtggcccgctccatcagctccgcaaagtgaggcaggtgatctctgggaatgaccaacagctggcccgactgggagtccctgacaaactggtagggcgacagcagggagcccccaggctgggtgggaacgcaggggccatgccctagtgcagagatggaggtcccaagccccaggggtgtccggcaagccacatggacatgctgcccgagcgggacaaccaggggtgcgtggccagatgggttgcggggtccacagaccagcaaccggagcctgccagcactgggccccaggtcaccaggaggttggggttcaggcctttaggagcacagctggtagggtgcacgtgggccaggtcagccagctcattactctctctgagcagcttctcctgatctcagtccagccaggcccccagcagccattactcctggtgtctggcccggtgtccacacagtcctcatctgcttggctgtgctctttcacattactcagtgacagagggtgctcctggtctgccagcccaggccccagccagccactgctgccactatccttctgcaatgcccacaggcgggtgtcgcacttctgcttcaccctggacaccagagcccgcgcatccaaatgccttggcactctccggcctctctgggtcgcgcttcagctgcgggcccctgcccactgctatcatctccacttttaactacccctaagccactatcctctcttgcgagagcctctatatacatctccgcacttcctccaggcatgcatcattatcttcccccagtagtaagaatggttctaaaaccagagtcagacaacactcttcctttgtttaaaattccagtgatttttcatcctctcttgggataaaattccaaggcctctaagcccttcatgctctttccacctttcacaatgccctctctgaccagccaccaccaacc

SEQ ID NO: 9046 - DNA, 947 bp, Artificial sequence
  DNA replication origin
agggagagagagggagagagagagggagagagagggagagagagggggagagtgagggagagagagggagagagagagagagagagggagagggagagagagggggagagtgagggagagagagggagagagagggagagagagggagagagagagagagagagagggagagagaaggagagagagggagagtgagggagagagagggagagagagagggagagggagagagagagagggagagggagagagagagagggagagggagagagagagagggagagagagggagagtgagggagagagagggagagagagacagagggagagggagagagagagagagggagagagggaaaggtggggagagggagagagggaaaggtggggagagggagagagggaaaggcggggagagagagagattgattgagagaactgacaagggctgtgaaagatgtttagcatgaaaaattactaaaaaaaaaaaaaaaatcagaagggagagttttgtttttacattttcctaattaattaccaagacataaaccacacctgatccatcaaatagaaaatgactaaagaggatgaaatgtgcctttcaagtgatacaaatctatgcatagtcagtatgaacaatagctaatacagatgggcagggagaccaggtaggtacgatggtgtagttgaagtggcattgtcagccaggtgcagtggctcatgcctgcaatcccagcactttgggaggctgaggcaggtggattgctgttccagatgaggctaggcaacatagccaaaccctgtctctacaaaaagtacaaaaattagccaggtgtattggtacatgcctgtagtcccagctacttgagaggctgaggtgggatgactatttgagcccaggaggcagagaatacagtgagtcgaaatcgcaccactgcactccagcc

SEQ ID NO: 9047 - DNA, 1537 bp, Artificial sequence
  DNA replication origin
tacagctgagaggggaaggggccagcgccatccgctcgcccggaatccggtccccgcggcggctgcgcgtcccggccgcggcccctccggcccgggagtgagcagcagcaggaggagaggcagcggcccggggttggccggggctggggaggagggacgggacggagggagggcgcgggggcggggagggggccccggcggataaagatggcaatgtctctcatccaagcgtgctgcagtctggctctctcaacatggctgctttccttttgtttcgtgcatctgctctgcctggactttaccgtggccgagaaggaggaatggtacaccgccttcgtgaacatcacctacgccgagcccgcgccggaccccggggccggggcggcgggcggcggcggcgcggagctgcacacggagaagacggagtgcgggcgctacggagagcactcgcccaagcaggacgcccgcggggaggtggtcatggccagctcggcccacgaccgcctggcctgcgaccccaacaccaagttcgccgccccgacccgcggcaagaactggatagccctcatccccaagggcaactgcacgtacagggataagatccggaacgcgttcctgcagaacgcctcagccgtggtcatcttcaacgtgggctccaacaccaacgagaccatcaccatgccccacgcgggtgagtggcccagcgggcgcgggggaggggagccggcggggacggaggtgcctagagggatccagcgcctgcctccaggctccttctgggaagtccgtgcggcgcggaagacgtgtctgggttccctggaccgattaagttttgctccgcgtcacttggggggtttacaaagaggagaagattaactgtattgggtaggggagaggctgccggagagcttggcatagcgccgcttggacaggggttcaacgtggcgggctaacttttccgagggggacctggaaggtggggtttggagggtagggctcagatactgttcttggttagtgaccggcccagcacctgtttggaaccagtagatctgataccacagcactgcccttgggtctgtgcatcaggtataccctgatgcaggcgctatatcaggagaggggtagggttacctgctggcagctcaccaccgcgaacttgcacttgggagagtttccccttttgggtttacgcacttcattaatcatattaaaagtactatgctctgccaggctgtcatccagagaaactgacaggtggccacgatggtaaataataacaatcctcaacaagccaagaagagtgtgatggccctaaagttataactacttttctaattattgcattatcctttgcctgattgggaggttaaatatgctgaaggttttctttctggctagaatgaagggatttcagactagagagaataagcttttgttaatgatcgcaggtaccaggactagaaatgcattactgtcccaaaactcaataccgcatatgcctgacataagcaatgtttccctggtggtaggaaca

SEQ ID NO: 9048 - DNA, 1298 bp, Artificial sequence
  DNA replication origin
gtggatcccacgctggggccgcgggtggagctgcccatcagtcttgagctgggtgcctgcactcttcagcccttgggcggtggatgggactggagacggcggagcatggggtggcgcctgtcggggaggctagggctgcgtgggagcccaccgcagggggctcaggcatggcaggctgcaggtcccgagcactgccccgggggaggtggctgatgcctggtgagaatttgagctcttcacaggccgtccggcagtgttgggggacccagcgcctcctccgcagctgctggccagggtgctaagcccctcactgcccggggcggtggcgccagcctgcagctccgagtgcactgcctgccaggtgggccggtgggcctgccgagccagcgcccacccagaacttgcactggcccgtgatcgccaggcgcagccccagttcccgcccacgcctctccctccacacctccctgcaagcagagggagcaggctctggcctcagccagcccagagaggggctcccatagggcagcggccggctgaagggctcctcaacgaggccaaggaggcgttgagagagagcaagggctgccagcatgttttcacctctcaatatagcttggctctgtgtcctcacccaaatctcatgttgaattgtaattcccaatgttccagaagggaggtgattggattatggggtcggattttccccttgctggtctcatgatagtgagtgagttttcatgagatctgattgtttaaaagtgtgtagctggccaggcacggtggctcacacctgtaatcctagcactttgggaggccaaggtgggcggatcacttgaggtcagaaattcataaccagcttggccatcatggtgaaatcccttctgtactaaaaatacaaaaaattagctgggcatggtggtgcatgcctgtaatcccagctacttgggaggctgacacaggagaatcccttgaacccgggaggtggcggttgcagtgagccaagatcatcccaccacactccagcctgagcgacagagtgagactctgtctcaaaaaaaaaaaaagtgtgtagcacttcctccttcactctctctctctcccgctcggccatgtgaagattgtgcttgctttccttccatcccttagccataattgcctgtttcctgagacctcctgtacagcctatggaactgtgagtcaattaaacctcttttctttataaattacctagtctcaggtagttctatatagcagtgttagaacagactagaacagctggagacagaggccctgtg

SEQ ID NO: 9049 - DNA, 1072 bp, Artificial sequence
  DNA replication origin
ggagcagccggccggccctgcactcggagcagccggccggccctgcactcggagcagccggccggccctgcactcggagcagccggccggccctgcactcggagcagccggccggccctgcactcggagcagccggccggccctgccggacccgggcaatgaggggcttagcacccgggccagcggctgtggagggtgtactgggtcccccagcagtgccagcccaccggcgctgcgctcgatttctcgccgggcctcagctgccttcccgtggggcagggctcgggacctgcagcccgccatgcctgagcctcccactccctcagtgggctcctgtgcggcccgagcctcctcgaggagcgccatcccctgctccacggcgcccagtcccatcaaccacccaagggctgaggagtgcgggcgcacggcgcgggactggcaggcagctccatctgcagccccgctgcgggatccactgggtgaagccaactgggctcctgagtctggtggggacgtggagaacctttatgtctagcccggggattgtaaatacaccaatcggcactcagtatctagctcaaggtttgtaaacacatcaatcagcaccctgtgtctagctcagggtttgtgaatgcaccaatggacactctgtatctagctactctggtggggacgtggagaacctttgtgtctagctcagggattataaacgcaccaatcagcgccctgtcaaaacagaccactaggctctaccaatcagcaggatgtgggtgggggccagataagaaaataaaagcaggctgcctgagacagcagtggcaacccgctccggtgtccttccatgctgtggaggctctgttgtttcgctctttctactgcttactcttcgggtccacactgcttttatgagctgtaacactcaccctgaaggtttgcaacttgactcctgaagccagcaagaccacgagccccagggaggaacgaacaactccagacgcgctgccttaagagctgtaacactcaccgagaaggtctgcagcttcactcctgagccagcgaggccacgaaccca

SEQ ID NO: 9050 - DNA, 1214 bp, Artificial sequence
  DNA replication origin
gtaattacccgcctgggatcctagggctcggtgggggaattttgcagggtggggtggttgatggtgggtaatccgggaggcgagggagcgtgtctgagagcgtggcggcacgtcttggaggggggagcctgtctgttttgcatcaagtttctccgtcttgcagcctccatcacccctccagctctttagcttaaagggtggggtgggctgtctctcctcggctgctggggtacccctgtcaccgcgcctaccctctcgccgagcgcccctctgcccggcgcgcgcgcgttttcgcattctcactcacacacgcacactctccgggcccccgtggaactctgagctctggcctcgctgaccttccaaggctgcgcccacctgcgctgtccctgagagacgctgaggttggcccgggcactcgctctcacttccaatcctgatgatcgcaagctgccgccgccgccgccgccgccgccgccggcctgggaagaagtccttaaggaatagaggcagtggtggggagtgagggtgactgatgttggtggtcccggttgccttgttttttgttttaaaaataaagagcccatctccttgaccaccttcatcccaccctcaacaactcattctggcagagaagcctggcatgtcttctctcggccatcaggcagcatctcttgtccttccccaaagaggtctcgctgagaggttagggccttggcgcaagagtgcctgggtttggacgggggaggtcattgtttcgggtctgagaactatgctgcaggctcctcaagctctctggcgctcaggcagggcccagggccggggaatgtctgggagcctggttcctgaatgtagtttcaggctggtagctgatatgaagatgaggatgctagaaccacatatacctgtttttccccctccccacgcttctgaattctcccttccttgggggcagtagtttctgctcctggggagtcggtggagaggggcccagcagtttctctttggggacaagagggtgaggaagcacatattgattaggttgttgctgctgctgcacaaaacttactggaaaaacccggtagggttttctattactcttgttttaaggatgtaaatttactccttttcctcttttatcttctccctaaccagaactagttttcctttctctttctggaatgttatttgaggtcattatattttatgactcc

SEQ ID NO: 9051 - DNA, 970 bp, Artificial sequence
  DNA replication origin
ccccctcgtcgcggtagcggtgatcccacagcccagtctgggtgggcgacccagcgggcagaggggccgcagaaaggggtcggggtacggggtgtgagcacacggagccagcgtggtaatttcggggtgggcagccgggccaccatctccgctctatcagtagcgggaagcgagcagcgccagttgcgcgactgtcgctgccacggccgcctctactcggtcgctggtgacattgggaggagaccgcttggagagagcagaggaggaggaagaggagcggggagggtgggggttggggtggaagaaagtagcaattgtgccagggggcgtgtgagcagccggagagccagccgcgctggtgacaacttctctggggcgcgcgcggggctggtaggcgaggagcgagcagggagcgcggccgaagccagaggctgggggagctgctggagcctcgcgaagccgcggccggcgccctgcgccgtcgccgccgcctgctagtttcctccgggttctcagccccgggtactgaggcttcggtctataaatagcaggttacagctcctcctgggcgcgcacacgctcacacgctcgcaagcgaacgcaggaaagtcaggctaaaagtgtctgctgctgctgccgccccccactccgcctccgggagaggtaattacccgcctgggatcctagggctcggtgggggaattttgcagggtggggtggttgatggtgggtaatccgggaggcgagggagcgtgtctgagagcgtggcggcacgtcttggaggggggagcctgtctgttttgcatcaagtttctccgtcttgcagcctccatcacccctccagctctttagcttaaagggtggggtgggctgtctctcctcggctgctggggtacccctgtcaccgcgcctaccctctcgccgagcgcccctctgcccggcgcgcgcgcgttttcgcattctcactcac

SEQ ID NO: 9052 - DNA, 1400 bp, Artificial sequence
  DNA replication origin
acacacacacacacacacacacaatgccccgcgcggtgcccgctcgcccgcccacccgccctcggtttcgatgcgcccggagcgatcctccttccctctcctcgggggagggtgggtcacttcgcggcgctcggtgaacgccgaggaaaggggaagccgcgagccgcctacgggcagcgggcgcggggctggtcccgggtcacagagggagccgcagggttggcagcgaagcgcggggcgtttctgagcggcgggcgcagggaggtcgcaggtcaagccggagggtgggtccgctctcgcggccgccgaagagggcggggagcagcagaggaacgaggcgcttggcggcttggctcctgggagggatcccgctgtcccgtcccctcgcgctcctcccccgccgcctcccccaccccggggctcgcggcaggtcctgagcggctcggccccagatcccgatccctccctccctctcccggccgccgggctccttcttcctccctctcctcctccccttcccacgttcaggcccggctccggtttctgcccagactttctctgaaactccgccggagtgcttccagccaaaacaacaagggccgggggaggagacggacgaagggagggagcaagggagggagggagcgcgagtccgagaggcaccctgggatctgtagttcgggaagcaggagcagggtcctccgccgtccggcggcccccaatcggctcctcgcccgggaagaccgcagaggcctcggctagggcagaggcaccggggcttgggcgcggggaagactgagggacattcgaatgttcagtccggggcttgccatcttgactcagcccggtgccagctcggagcttgtgctgtgctcgagatcaggagtttcgagggttttctttacttgagagcctgaaaggcaaaaccgcggggagaccaccatcctgccggtccccgccgcgcgagattaaaggacagaccaagagggcgcgggagctaccagcttggaggggaggacagatggggacccagggctggccagggctggtctctggagctgttctgccagagtgatgggggcgcttggcgaggccaaggatttggttgggtcctatctctgagacattttgaagtctcacaccccttccatttgttgcctattccacttaactttgtatttgtttgaaatctactgttcggatgctggactagaagagggacacttggccgggcgcggtggctcacgcctgtaatcccagcactttgggaggccgaggcgggcggatcaactgaggtcgggagttcaagaccagcctgaccaacatggagaaacccaatctctactaaaaatacaaaaattagccgggcgtagtggcgcgcgcctataatcccagctact

SEQ ID NO: 9053 - DNA, 1430 bp, Artificial sequence
  DNA replication origin
cggggcagagtcccgctgagtccgagcgctgctgaggcagctggcgagacggcacgtctggaggcgaggcgggcgcactgaaaggaggccggcgcgcccgcggccccggctcgcgttctgttcaggttcgtgggcctgcagaggagagactcgaactcgtggaacccgcgcaccgtggagtctgtccgcccagtccgtccggggtgcgcgaccaggagagctaggttctcgccactgcgcgctcggcaggcgtcggctgtgtcgggagcgcgcccgccgcccctcagctgcccggcccggagcccgagacgcgcgcaccatgagcggtggtgaagtggtctgctccggatggctccgcaagtcccccccggagaaaaagttgaagcgttatgtaagtagagctgcgggcaccactccgcgggcctcggcgtccacacccctccccagtcggctcgccggcggctgcagctggccgcgcgcggggctggttcttaaacgaatgccggtctctttccccttggcccctacccctggcgggctcgggacagggtgccttgcactccctcacgcccaggcatccacttggccggacaactttcttcctccaggttccagacagcctgctttgcgggcctgttcgccccataaaaggacctagacgtccagctaaactcctgctgcatgctttttttcttccttaggaaggatggggtgcgatggagagaggagccttcttcctgctttattcctgcatctgattattgggctgatgtgtgctaaagctcccgcaccgggaaaactgccgaggttttagggctcactagccctttctttggtgggcgctccctctcctccgcccctcgagatgggttgcgggaagcgggctgtggagctgaggagttggtagtagagacaagcatatcgaacgcgcgcaaaagggaaagaaagaaaagttattacgcgccctgccgtttgcttagcagggttcacattttcgcggttttgaattgagggactttggagtttggcccgggagccttggcggtttgctgcgagaggagggcgctgggggggagcctagtggctggtgtttgggcgccttggatgtgctgtcaaactcggcaggaggggacagctgaagccagaagggatttcagttgcggtcctttcccagggaaccagagtggctttaatggtgtttgtgtaattgatacaagatgctatgtgttaaaccgttttagctgttaggaaaaatattccttgaaagtatcaaccttgctttagtggaaacctgtgtcctcttcagaggtctgggatcttattcttcctccccattggttgttttgttgctgctcccttgcaaaggaaagaaatgacacttttgtgctgacatctggatcaaatatttttctagtaaaatgtgtttgcaa

SEQ ID NO: 9054 - DNA, 1493 bp, Artificial sequence
  DNA replication origin
aactagcgcgcggggaggtgctgccacagcgcgccccttgacgtcaccgcttctcgcgcgcccccgcccagggtggagggaaggggagggggcggcccccgcgcgagcgcgtcccccgggccccggcggcctccctgctgcggcggggaggggcggctagccgcgacggcggcggacggagggggagggccgcgagccttcggaaccagcctcgagggtgctgaaccccgcgcgcccgcctcgccgcggcccccgggtgggggcgtccacggcccgggttcccggcgggcttggggcagggacgcagtccggagattccgggactgcccggctgctgcagcccgcaggctcctctctcctccccgcttcccctccgcactgcctgggctaaaggcggccaagctgaggctccgaaagaaagtaagtaagagtgggccgtaggaggtgggaagggagggaccccttccagggccatccccacctcagccccccggcccgcccctcgccccgtgggagggtgaactaagtgggctggagcggacgggagggagcttttgggcccctttgtctcccccagccgcactgacacccccattttccacactgattttcaacgtgaagctcaagtcctcaaagatctttcttggggtctgacttagaggcagggggacatcccagatgccgttgagtaggctgagatggtttggagactcatcctcgccggaggtcctgcaagccactgaagtggcacagacgcgtgtgcgcggagtggggcggtgtgtcgggccacaggccaagcccaagtcggcctcccagagtgtttgccacggtttgggcgggttagtccccgacgcccctttcaggtccccacatgtgttcgggaataagccgggccccgctggtaccatctgggaacacaagttcttgggccgcaggtggacggagagagaagctgggcgcggaattagtgttcgttttaacacacacaaacacacacacacacacacacacacacacacctgcacgcacgcgcgcgcagtccctggggagaggttcccctgggtgtagaaacagaggcgttagatctggagaaagaattagatgcaagtctgagggcatccagaagcgctgtgctctacttatccccgtgtatacaagtaaattaaccttttccccagctagacaaagtctgtgtaaatagtgtgtctaaaaagatgtctacgttatcaggagcggtgacttgaggtttactggatccctgcaagttggcatcaggacgagcttctatagggttgcccacaaaatgcgcttctagcccacttgggtatttaacagagaagctgatttcccagaagatgggctttgatgaggagataaggcagttgtcccattttggcaatggaggaatgttcaccacatttgggtttgcttcacttgttggacattgatttcgccaagtgattgcaaaagttggtgatggttgaggtgggcag

SEQ ID NO: 9055 - DNA, 905 bp, Artificial sequence
  DNA replication origin
tcccccaaagaagttttgaccttcttacaaccaccggctttgccagagccacagggaaccccacccagccaatatgccaagtacgcatccgtgaagccggtgagtgcctaccttattctccaggcgccctagccccgggctgtcactccgcaggcagcaggacagccgagggtagaagccaccgcacagcatctctcccccactcagcagctccagctgggacatcatcctcctgtctctccttttcaggcgcttcggggggttcccattcaggcaccttctcctccttgctccgctcccttcgtttctttccccaaacttagcatctccttcaaagaagcccagagccacggccagcagcagcagcttaaaggagagcatcttcagcatcgtctgcccagagcagcaggggctgggcgcgggaggatgggggggaacgccactgcccagcaggggcactagggcgcagctccaggaggagtttgcggggctgtagggcactccagagacagagggaggtggcggggacaaaaatatgtacagcgatgcaactttgcaaaaaataaaagacgcggcgatgggtccaatgccttaggggagcccgaggagcgagataaagttgtgcggatgacaccgtttgcagttgtgccagtgtcagttgggttgggggctttctgctgcggctgggaagtgggaggaggagaaggagttggaagaggaggaagaaaaggagaggacagccacagatgttcacttgtccgtgtaacgggagttgtttaggtgggacagtagcaggaacagaaacggcgacggcggcggcggggcaggcggaggcagggccagcgctgggctctagatgatgctgaggtctcctctgccggcggctgcagcttctcacacagcct

SEQ ID NO: 9056 - DNA, 842 bp, Artificial sequence
  DNA replication origin
gctccgaggaggcggccgcgtgcggacagccatgcattaggcagggcttccctatgcgcccggagagcgcggaccgctgcctcgggccgccgccgcctgccgccgctcgcggagcccgagccccagcccgagccgccgcctgccccaggccggggcgtcgagcagccggcggcctggccatgtggggctagccctcgccgcgcctggcctgcagcaggaccagcaacatggaggctgccgtcggcgtccccgacggcggggaccagggcggcgcggggccccgcgaggacgcgacgcccatggacgcctatctgcggaaactgggcttgtatcggaaactggtcgccaaggacgggtcgtgcctgttccgggccgtggcggagcaggtaattgcgggggggcggggagggcttcgaggggaggcggggacggcccggcgggtctgggtggggaggcagctgcgggctgtccgggccgcccacggccggggctgcgcgtgccctggctgtcgtcacagcgccccattgtaacgccggagtgggacgctgctttgcgtctgaaaggtgcaaattgaaactcgaaagcccgcaaattaacggggtgtctctctcctgatgaagaggtaatgagttgaggacaacttgtgaggcctgctcggagcttgtacagttgatttattgctggggacctggcgacatgatattttttacttttgttccgcattcaccttccttcccttcgtttgagaagcaccacgctcaccccactccagtaaaccaagtgtttactagaagtggtggatcaaactttacttgtggaacatattttggtttgctgctgga

SEQ ID NO: 9057 - DNA, 1002 bp, Artificial sequence
  DNA replication origin
ggatgtgaggagcgcctctgcccggccgagaccccgtctgggaggtgaggagcgtctctgcccggccgccccgtctgagaagtgaggagcccctccgcccggcagctgccccgtctgagaggtgaggagcctctccgcccggcagccaccccatctgggaagtgaggagcgtctccgcccggcagccaccccatctgggaagtgaggagcgtctccgcccggcagccaccccgtccgggagggaggtggggggggtcagcccccccgcccggccagccgccccgtccgggaggtgaggggcgcctctgcccggccgcccctactgggaagtgaggagcccctctgcccggccagccgccccgtccgggagggaggtgggggggtcagccccccgtccggccagccgccccctccgggagggaggtggggggggtcagcccccctgcccggccagccgccccgtccgggaggtgaggggcgcctctgcccggccgcccctactgggaagtgaggagcccctctgcccggccaccaccccatctgggaggtgtacccaacagctcattgagaacgggccaggatgacaatggcggctttgtggaatggaagggcgggaaaggtggggaaaagattgagaaatcggatggttgccgtgtctgtgtggaaggaagtagacatgggagacttttcattttgttctacactaagaaaaattcctctgccttgggatcctgttgatctgtgaccttacccccaaccctgtgctctctgaaacatgtgctgtgtccactcagggttaaatggattaagggcggtgcaagatgggctttgttaaacagatgcttgaaggcagcatgctcgttaagagtcatcaccaatccctaatctcaagtaatcagggacacaaacactgcggaaggccgcagggtcctctgcctaggaaaaccagagacctttgttcacttgtttatctgctgaccttccctccactattgtcccatg

SEQ ID NO: 9058 - DNA, 961 bp, Artificial sequence
  DNA replication origin
ttcataattatttcaaagggatttatgagtgtttctctagggagctgttttcaaaataagataagtgctatgaatgggataagaaagattacagtaattatgttcatttctgaaaaaactaaaaacttggccgggcagaggggctcctcacttcccagtaggggcggccgggcagaggcgcccctcacctccccgacggggcggctggccgggcggagggctgacccccccacctccctcccggacggggcggctggccaggcgggggggctgacccccccacctccctcccggacgggcggctggccgggcgggggggctgacccccccacctccctcccggatggggcggctggccgggcggggggccgacccccccacctccctcccggacggggcggctggccgggcagaggggctcctcacttcccagaaggggcggccgggcagaggcgcccctcacctcccagacggggcggctggccgggtggagggctgacccccccacctccctcccggacggggcagtgaggagtgtctctgcctggctgcccatcgtctgggatgtgaggagcccctctgcctggctgcccagtctggaaagtgaggagcgtctccgcctggccgccatcccatctaggaagtgaggagcgcctcttcccagccgccatcacatctaggaagtgaggagcgtctctgcccggccgcacatcgtctgggatgtgaggaggagatcgtctgagatgtggggagcgcctctgccccgccgccccatctgggatgtgaggagcgcctctgcccggccgagaccccgtctgggaggtgaggagcgtctctgcccggccgccccgtctgagaagtgaggagcccctccgcccggcagctgccccgtctgagaggtgaggagcctctccgcccggcagccaccccatctgggaagtgaggagcgtctccgcccggc

SEQ ID NO: 9059 - DNA, 1142 bp, Artificial sequence
  DNA replication origin
gggagaggtcagatgggtctgtagaaaaggaagattagaaagactcagcgacgcttggggttgggactgaggggacaggcgggaaggaaggaagatttgggatgagttgcactgggcacagagactaggaagggactgatgtgtaaaataatgcctggacgtcaggcacctcagaccatttgcctattttacgacaagaattattcagatcttgtaggatggaaaaattgaaagtgccattttccggctatttggaactactgttgagtttgtactggggtcaaacggcattgcagaagaaaataagacacttagattttaggtcaggtgagagttgaagaggttttaagttcttaagaacacaggctaagggagaagaaggaggaatggagggtggaaggttgcccatagtgaaggaggcaaacctagagaaaagagagtgtagagacacggagggaagggatttgggggttcttaccctccagaaaagcagggaggggggtcagggcacggaaataagggattggggcacagagataagaggttggggtgtggaaataagggattggggcacagagataagaggttggggtgcagaaataagggattggggcatagagataagaggttggggcatggaaataagggattggggcacagagataagaggttggggtgcggaaataagggattggggcatagagataagaggttggggcatggaaataagggattggggcacagagataagaggtcggggtgcagaaataagggattgggggttcttgccccatagaaaagagggacttgccaccaagggtgaaggagaaggtgttgaggggtgcttgcccctcccccagaaaagcgggacttgccgctaagggtgaaggagaaggggttgaggggtacttgcccctcccccagaaaagcagagaaggggtagagacaaggagagaaggggttggggtacttgccctttccccacaaaagcagagaaggggtagagacaaggagagaaggtgttggcgtacttgccccttccccagaaaagcgggacttgccactaagggtgaaggaccaaggcaggcttccctgcgtggtctgacactcttgaaacgtgggtagataatcagagaggcatc

SEQ ID NO: 9060 - DNA, 1313 bp, Artificial sequence
  DNA replication origin
agtcatgaactgggctggatttttatatttgatgaaaaagagcctaaacgctatctgatttgggataaagaaaaaggagcattaaccttgactatgcctttagctccagccacctttttaagagtaaattgctgggcaggatggggagggctagtcacggaacgaaactgtaagccggaccaggtgtgaggaggggaggtgataaaaagattatatagggtggaggagcagaggctgaggaagaattgggacctagctcggcctggcgaagagcagcctggggaggaagggagaggtcagatgggtctgtagaaaaggaagattagaaagactcagcgacgcttggggttaatactgaggggacaggcgggagggaaagaaggaagatttgggacaagttgcactgggcacagagactaggaagggactgatgtgtaaaagaatgcctggatgtcaggcacctcagaccgtttgcctattttacgacaagaattatttagatcttgcaggatggaaaaattcaaagtgccattttctggctatttggaactactgtcgagtttgtattggggtcaagcggcattgcagaagaaaataaggcatttaggttttaggtcaggtgtaagttgaagaggttttaagtttttgagaacacaggccaagggagtagaaggaggaatggagggtggaaggttgcccatagtgaaggaagcaagcctagagaaaagagagagtagagaaatggagggaaggggttcgggggttcttaccttccagaaaagtgggaaaaggggttggggcacagagataagaggttggggcgcagagataagaggtcagggcatggaaataagggatggggcgcagaaataagaggtcggggcatggaaataagggattggggcacagagataaaagaggttggggtgcagaaataagggattggggtgcagagatataagaggttggggcacggaaataagggattggggcacagagatacgaggttggggtgcgtaaataagggattggggcacagagataagaggttggggtgcagaaataagggattgggggttcttgccccgtagaaaagcgggacttgccgctaagggtgaaggagaaggggttgagtggtacttgcccctcttccagaaaagcagagaaggggtagagacacggagagaaggggttggggtacttgcccctgccccaggaaagcgggacttgccactaagggtgaaggactaaggcaggcgtccctgcgtggtctgacacctttgaaacgtgggtgaataatcagagaggcagcc

SEQ ID NO: 9061 - DNA, 1132 bp, Artificial sequence
  DNA replication origin
cgtggtcggtcacctgaagttcacggagggtgggggaagggttaaggttatggtgtctcgggctcgggctgtgtgtgagcttgtgcttttccgctgcagacaggcagggcgatcgatctccccctcgcgaaataaccgcggcggtgcctgcccaggggaccgggaggggggcgcgggctgctcgggccaggcgcccccgcgcctccgtgtcacccgggccgcagccgaagtggcgagcaagggcacttgcaagcagtccgctccgcaaacattcctctttctttccccttcccggtacgcaggagtcgacgcaaagggcttgggttgtgcttttttccccttcctttaaaaaaaaaaaatgcccctgtgcagtcctttcttcgcctgcccgctagaggttctgaggataatatcacatatgtaatatatatgcacataaaatcactcgcaggcggctgcgtgtgtagggaaattttgtgcgaggaaggagaaggcggtggagtcggggagggcgagttgggaggctccgcgctgcgattcacagaaaactcgcagcagttggtggaagagtgtgcgtgcacatggccggactgccccgctgccgggctcttgtcgggggcgtgtggggggagggagaggaggcaggaatcctgagggggtcaggggaggtctgccgtgcttggacaaaatgggcttcagtgttctctgcgaacttgcccttagatggcaactttgggagctgatgagcttgtgtgcgaaaacagggcggtgaggttatttggtcattttccctttcttctcttctccccctgctttaaaaaaaaaaatgttggcggggttagagggagggtgggagaggagaagggatttatctgtttcgtctgtgacggagatggaacgccttccctcctcttgtgtgtagtgcagtcgggcagctgcagcgtgccctgctgatgaccttgaccctgacctcctgcgactaccctctccgtctgagaggaaattcaggctccattttagctcgtgtgcttggtgggcctttcctgcgcgtcggtgcctggtgatgaagttatattttcagagtgggctctcctactttgctgtctgattgaatcctgttagccactcactt

SEQ ID NO: 9062 - DNA, 1050 bp, Artificial sequence
  DNA replication origin
aggttggaatcttaaaaaaaaaaaaattccttgtggattccggcgcctgagggtgcgggggtcggggcgcgcggagggctgggggccgtgacatggcgtttgggggtgtcggggagagggcgcgcagcagccgccgggtacaggatccagggagaggtccgtccctggctaaaggttgcgccggggttggtcggcccccgagccgccggcggcagcggcggcggcggctggagcaggaggaggcggaggtggaggaggcggcggcggaggaggggagtcgggggcgggcgaggcgggagcggctggggagggtgtaggggcaccgcacacaaacacacgggtacacacgcgccgccgggcggctgctcccgcggcgccgaggcgagggggcgcgccggggcgcggggcggccgggcggggggcgaggccgggcagcggcgggcggatgtggggtgcgggagctgcgccgaggcgaaggcaggaggcagggcggctcgcggcgcgcgaggtccctgcagagcggaggagagggaggagcagggctcctggccgcaataaaatgcggggtcagtcggagcagacggagccgggcgagactcgggctctcagaccccctccttggcgagcctgagcagagtccaggactaaagtgcatcacagccctccccggcggcagccacacacgccaactggagacacacacccgccggcacggcccggtccccttcccctcctccacccgcgcccccggtccctctccgccctccctccggcttttctttgcgcgactcttaacttttcccccactccctctccagctccccccaaccccccagtctttctccgctttgagtgtttcgagatgctgctaaagctaaaagtgaaggagaaagaagcaactaaaaatatcccccggggccgcccggctccttgaatgcagggaagagggggcaggggagaaggcgtggggcggggtgacggggaggaggggacgcgggaggcgccggagggaggggtcgggggagacggagggtcaatttctcttctctc

SEQ ID NO: 9063 - DNA, 990 bp, Artificial sequence
  DNA replication origin
cagggaaagcagaagggggttaaggaccatggacagagcccgtcgcgcgctcgttgctgccgccttccccagcactctggcggctcctgaggacagcggtcccatcttgaaaccgctattccgcccggctgaggtcaggggtggacaggcggtcccctactctccaccgccgcttccgggagctgaccacccgagggttccccttttccactctccttcccactctgtttttgtcccagcgcgcgccagcgcctctcaggcctgccgcctgctctcgcacctgctcgccttccccaggcgcccagtgcctgcacctgctcccggtcaacccccgtccggattgggccacccgcgggttcctgcgtcggggtcccggggccttctcaccctcgcctgcaccctgctccttccgctctctagggaggtgacagcagcccccaacaccgcgggaagtatagagaaaatgggatccagaaggagaggaagtagtgtgtgtgtgtgtgtgtgtgtgtgtgtgtgtgtgtgacagagagagagagatagatagaaagagattatctccttttgcaactggaaccaagagtgtgtgtccatctctaggaaaagtggtctgcactgggactgggacagaagtgggagtgaagtgtcagctaaaaataggctccgcaccgagaggctgtggaaatgaagataagtgaggtttgtgccagcccccgagggtgtgtgtgtgtgtgtctgtgttgtggggtgtattcagcagcatatgcgctgtgtaatttctgaccttccctctccctgtcagttgccccttcttcctttgattgtggctaatgaagaataataaatccaggggcagggtttgccagtggatccttccaagactcaactcgaactgtactggatacagggaggaggaggaagagaaaaggggggcaagaggagcgtgtgtgtgtgcctgtgtgtatgtgtgtgtgtgttgtgggaggggtg

SEQ ID NO: 9064 - DNA, 1402 bp, Artificial sequence
  DNA replication origin
ccttccctctccctgtcagttgccccttcttcctttgattgtggctaatgaagaataataaatccaggggcagggtttgccagtggatccttccaagactcaactcgaactgtactggatacagggaggaggaggaagagaaaaggggggcaagaggagcgtgtgtgtgtgcctgtgtgtatgtgtgtgtgtgttgtgggaggggtggggacagcggggagggggaggagtcgcatgcgcacagacgacccgagcctgctccgcggctgtccaatccgctgagagctgcgagaaatcgagtgagagaaagccctgcagcccctccgaccccatgtctctttggcaccaggcacccgccgggccgtggggggctcgtagccgaacgccgacctccgctcgtattgggctgggagttcagagccgcgcgcagaacccgggttggccgcaacgtctgtgttctcagcggtggccgggaacctgggatcagggtcacctgagctgacggggtgggggcgggccgagtggggttggaagcctggaacttagtggtaagcaggaggcgtaggaggtggcagccaggtaagaggcactcttacctacccaacgctggcttgggccgcaactttatttgggagtttctttttccggtgagacagagacccggcagaagaagcgggaggggctggaggctggtccttaggtaggcactgcccggcgactggagcgcggacctggccatttgggtggggttgagtgggggcgcgattgtgagtagcagccgcgggacgctgcgaaggggcggcggcaacagagcacgggcgggggcagaaaagaggcggcggagggcgcggtgggggagcgcgaggcgagtgctgagagagcagaaaggactcaagcctgaggggagtagagaggaagaaggggcaacgcgagaaaccgaacaggagccggcgtttcctggcaagggagggcggaggcgcgcgggagagagggagagagggagggcggggggcgcgggggtaggcgcggggagaggggagtataactcgccggccgcgaggagcgggggcagtttcgggtgccgaggtctgcagctagcggcaagcggagtcaggcatccgttcagactgacagcagaggcggcgaaggagcgcgtagccgagatcaggcgtacagagtccggaggcggcggcgggtgagctcaacttcgcacagcccttcccagctccagccccggctggcccggcacttctcggagggtcccggcagccgggaccagtgagtgcctctacggaccagcgccccggcgggcgggaagatgatgatgatgtccctgaacagcaagcaggcgtttagcatgccgcacggcggcagcctgcacgtggagcccaagtactcggca

SEQ ID NO: 9065 - DNA, 1205 bp, Artificial sequence
  DNA replication origin
ctccgcgccattgaagagttcaggcttggtgagcttctcgcggtgggacttctcggcctcctcgagccatgcctgcaggatgggtttgagcgcgatcatattattgtgggacagtgtgagggactcgaacctgcagatggtgctctggctaagcgagcccacgccggggatcttgaggttggccagcgcggagcccacatctgcctgggtcacccccagcttgatgcgtcgctgcttgaagcgctcggcgaatgcctccaggtcccgcgggtcggcgtccacgtcgctcatgcagcccatgtgcgacggcagcccgtgcgcgtgggccatgctgagcgctgcttggtgcatggggttcatggtggccatgtgcggcgcgtgagccggcgtggacaccacagcgccgtcggggcccgccatagcgcccagggccagcccgggactcaggtgctccagcagctcgccctccagcgcctggtgcggttggtggtggtggtggtggtgatggtggtggtggtggtgcgtgcccgccaacgcggaagggtgcgagatgggcaccgatgaagaagaggcggccgacgtgcacgggatggtattcatagtgtggtaggtggcgtccggtttgaaggggctgtggtggggtggatggtggtggtggctcttgctctgggagacgatgtccacggctgccagagcctcggcgcgggccagcagactctcatccagcccgccgaatatattgctctgcaattgtaagtagaaggcacacattacgctcagcagggaattgtacgccctctctccggaagccccggcccagggctcgacaccgtcgccgcgcctacaacattcccagatcgttaaaataataataataataatcctgaaaacagaggtgaagagaaaaagagggaagccacagaaagaagccgagagtgcaggaggaggaggaaagtgagcctgtagacacaacgaaacacaacacaacacgcgcacaggcaacatcccaggtcataaaaattaatatgaaaggcaagacctgctgaatacttaagagagagagaggggaaaattggttggaggtgtggggtgatttgctgtgcagacatgaaaaaaacatcaagcagataaagggggctgtcaaaatgtgcctttaagcggtgattatgcagaaatacgcaccggtggggttggaagacaggctc

SEQ ID NO: 9066 - DNA, 985 bp, Artificial sequence
  DNA replication origin
gggctccggggcagaccgcgcgggcttgggacgcttccccggctttgggccgcggcggagcggccggcggaggcagcaagggcaggcctgggctacctcggccaaatgggcggcgaaggcatcgccggggcgtctgctgtctggctctggagaaaaggctttgagaaaagccagaaggcagcgaggtcgatgggaaagggaagcggctgccgcgcccggtcactgcgtgcgctgtccccagcaggctgcagcaggacgcgcgccgagcgcagcagggggcgcaggcggggaatggggtagggggtggcgcgggagacctgcgagtccaggcggccccagaggggcccccggagggcccaggcgcccgccgcgcggcggatccttggacgagcctgcggctcccggggctcgggacgcccctgcgcggctgcccgagaccgcgcatcgccgcgccgcccaaacgcaattttgacccgtgtgtccccggtcggctgcctgagggcaaggcgaggagggaggagaggccgagagagaaaacgcgaatggggtgggggaggggacccggagcggggaaagagtgtcatttccaccaactgggctccttcctgacccagccgctcatctgtcaccgctgtctcattcctgttatttacatctgtctttagcattctaattactcgctttattactttagcctggaggaatcctgtaaaaaacaacggagatgaggatcctaccacacaataaaactgcccaaaatccccactgcacattatacagagcacttgagaatatttgtgctgttatatgacctcagtatgtccttaaattgatcttattatatctttctttctcccttctctttctccgtgtgtatgtaatgaactcttttaaggtgtggaacgcaagaataagctgttcaacaaataatgaaaatgagattattctttgagggggtgataaaggagtgaggacagagaagact

SEQ ID NO: 9067 - DNA, 1660 bp, Artificial sequence
  DNA replication origin
gctgttgggtacacctcccagacggggtggtggctgggcagaggggctcctcacttcccagtaggggtggctgggcagaggcgcccctcacctcccggacggggcggctggccgggtggggggctgacccccccacctccctcccggacggggcggctggccgggcggggggctgactcccccacctccctcccggacggggcggctggccgggcagaggggctcctcacttcccagtaggggcggccgggcagaggcgcccctcacctcccagacggggtggctggccgggtggggggctgaccccccacctccctcccggacggggcggctggcctggcgggggctgaccccccacctccctcccagacagggtggctgccaggcggagggtctcctcacttctcagacagggcggccgggcagagacgctcctcacctcccagacagggtcgcggctgggctgaggcgttcctcacatcccagacggggcggcggggcagaggcgctccccacatctcagacgatgggtggccgggcagagacgctcctcacttcctagatgggatggcggccgggaagaggcgctcctcacttcctaggtgggatggcggccgggcagagacgctcctcactttccagactgggcagccaggcagaggggctcctcacatcccagacgatgggcggacaggcagagatgctcctcacttcccagacggggtagcggccaggcagaggctgcaatctcggcactttggggggccaaggcaggcggctgggaggtggaggttgtagccagccgagatcacgccactgcactccagcctgggcaccattgagcactgagttaacgagactccgtctgcaatcctggcacctcgggaggccgaggctggcggatcactcgcggttaggagctggagaccagcccggccatcacagcgaaaccccgtctccaccaaaaaaatacgaaaaccagtcaggcgtggcggcgcgcgcctgcaattgcaggcactaggcaggctgaggcaggagaatcaggcagggaggttgcagtgagccaagatggcagcagcacagtccagctttggctcggcatgagagggagaccatggaaagagagggagagggagaccgtggaaagaggggagagggtcatggaaagagagggagagggagactgtggaaagaggggagagggagagggagagggagagcgagagcgagagcgagagcgagagctgaaaatctatttgcgggagagggagagctgaaaatctattttctttacaagatctacttacctgttaaaactattctgtgggtgtgttatgactgcatttagactacttttcccaagtatgaaatatgtgcatacattgaagtgtcctggttaagaaaatgttgtggttaattaacagttacatagatttccagttaaaaaattaaataaaatatagtacatgcaacattaaaactaatttgaccttcttttgatggcttatgccatgaagagccacaatataattatgagtaaacatacatgctgtggttgagtattgtgggtgtataaaatggagacaacaggtctaaggtgtgtgatcctattacctactgtaaagagtagaaaaacaacacaactacaataacaaaccca

SEQ ID NO: 9068 - DNA, 1104 bp, Artificial sequence
  DNA replication origin
gccgccccgtctgggatgtgaggaacgcctcagcccagccgcgaccctgtctgggaggtgaggagcgtctctgcccggccgccctgtctgagaagtgaggagaccctccgcctggcagccaccctgtctgggagggaggtggggggtcagcccccgccaggccagccgccccgtccgggagggaggtggggggtcagccccccacccggccagccaccccgtctgggaggtgaggggcgcctctgcccggccgcccctactgggaagtgaggagcccctctgcccggccagccgccccgtccgggagggaggtgggggagtcagccccccgcccggccagccgccccgtccgggagggaggtgggggggtcagccccccacccggccagccgccccgtccgggaggtgaggggcgcctctgcccagccacccctactgggaagtgaggagcccctctgcccagccaccaccccgtctgggaggtgtacccaacagctcattgagaacgggccatgatgacaatggcggctttgtggaatagaaaagggggaaaggtggggaaaagattgagaaatcggatggttgctgtgtctgtgtagaaagaagtagacatgggagacttttcattttgttctgtactaagaaaaattcttctgccttgggatcctgttgatctatgaccttacccccaaccctgtgctctctgaaacatgtgctgtgtccactcagggttaaatggattaagggcagtgcaagatgtgctttgttaaacaaatgcttgaaggcagcatgctcgttaagagtcatcaccactccctaatctcaagtacccagggacacaaacactctgcctaggaaaaccagagacctttgttcacttgtttatctgctgaccttccctccactattgtcctatgaccctgccaaatccccgtctgcgagaaacacccaagaatgatcaataaaaaaaaaaaaaaagaaagaaaatagattttcaacaaccctatcaacaagccagtcacgagagaccatatgttgtatatttctatttatgtgaaatgtccagactaggtaaatccacagaggcaaaaaagtagattagta

SEQ ID NO: 9069 - DNA, 1060 bp, Artificial sequence
  DNA replication origin
ggtgcagttcccacctgcggggggaggcgagggctggggacctcgcgcggggggcgggagggaaaagttttcttttcctgctcctcggctgcccaccccgccaggctgctcctctccccgcccctctcgggctcgccgcgcctctgccccacccccgccgtgggggggcgccgaggagggagcgggcgtctgtgcgcggaggcgtgcggggagctggctggggcgctgcggtcgcgaccggtcccctcgctctgacggcggctcagacgcccgcggaggcggctcggcggggcaagccgaggaaggggccgagagccgggacccctcctcctccgctcgcggcgcgccgcgcgcccccgcgtctcctggcgcgcccccgcgccctcgtgcccgctcgggcagacacctacgcagacgcgaaagtgaaaggggggcgactgggcccggcaggcgggcggccggcggcgcgcgggcacgcggcaggggacagaggatggatgggtgaacccggatcccgggattctcccgcgcccgctgcccctctgcggagcctccccggagtcccacgcccccaccccggccacggagatcaccacgtcaggagatatgtatgcgtgtgcatgtgtgtgcgcgcgtgttcacgcgcgtgtgcgaggtacgcttctgccccagactcttcccccgcaccgttacacacacccttagatggaagattgggggtttgggaggggggagaagtgtgagtgtcactaccagttaaccggctcccctgctgtggtcccttttgactcagttaaaccccaccaactgaccacacacacaccccttttctggcttaacactcctttttctgcaggctctattgcccccttccacccccgcccttctttgggttctttcccgttttattcctaaatagctgtgaaagttgctaatcccttcccacatagacccgtgttaaacaccgaggtgccctgttaaaacaatcactgcctttctccttccacattcccactgtcctgacagcgagcttcccattgcctccatcacctacacagtt

SEQ ID NO: 9070 - DNA, 1222 bp, Artificial sequence
  DNA replication origin
gggctcctcacttcccagtaggggcggccgggcagaggcgcccttcacctcccaaacggggcggctggccgggcggggggctgacccccccacctccctcccggacggggcggctggccgggcggggggctgacccccccacctccctcccggacggggcggctggccgggtgggggggctgacccccccacctccctcccggacggggtggctggccgggctgaggggctcctcacttcccagtaggggcggccgggcagaggcgcccctcacctcccggacggggcggctggccgggcgtgggggctgacccccccacctccctcccggatggcacggctggccgggcgggggggctgaccccccacctccctcccggatggggcggctggccggggtgggctgacccccccccacctccctcccggacggggtggctgctgggcggagatgctcctcacttcccagatggggtggctgccgggcggagaggctcctcacttctcagacggggcagctgccgggcggaggggctcctcacttctcagacggggtggttgccaggcagagggtctcctcacttctcagacggggcggccgggcagagacgctcctcacctcccagacggggtctcggccgggcagaggcgctcctcacatcccagatggggcggcggggcagaggcgctccccacatctcagacgatgggcggccgggcagagacgctcctcacttcctagatgtgatggcggctgggaagaggtgctcctcacttcctagatgggatggcggccgggcggagacgctcctcactttccagactgggcagccaggcagaggggctcctcacatcccagacgatgggcggccaggcagagacactcctcccttcccagacggggtggcggccgggcagaggctgcaatctcggcactttgggaggccaaggcaggcggctgggaggtgtgggttgtagtgagccgagatcacgccactgcactccagcctgggcaccattgagcactgagtgaacgagactccgtctgcaatcccggcacctcgggaggccgaggttggcggatcactcgcggttaggggctggagaccggcccggccaacacagcgaaaccctgtctccaccaaaaccagtcaggcgtggcggcgctcggcagactgaggcaggagaatcaggcagggaggatgcagtgagccgagatggc

SEQ ID NO: 9071 - DNA, 943 bp, Artificial sequence
  DNA replication origin
aggtgggggggtcagccccccgcccggccagccgccctgtccgggagggaggtgggggggtcagccctccgcccggccagccgccccatctgggaggtgaggggcgcctctgcccggccgcccctactgggaagtgaggagcccctctgcccggccagccgccccgtccgggagggaggtgggggtgtcagccccacgcccgccagccgcctcgtccgggagggaggtggggggtcagccccccgcccggccagccgccccgtccgggagggaggtggggggggtcagcccccctgcccggccagtggccccgtccgggaggtgaggggcgcctctgcccggctgcccctactgggaagtgaggagcccctctgcccggccagccgccccgtccgggagggaggtggggggggtcagccccccccgcccggccagccgccctgtccgggaggtgaggggcgcctctgcccagccaccacccggtctgggaggtgtgcccaacagctcattgagaacgggccaggatgacaatggcggccttgtggaatagaaaggcgggaaaggcggggaaaagattgagaaatcggatggttgccgtgtctgtgtagaaagaagtagacatgggagacttttcattttgttctgcactaagaaaaattcctctgtcttgggatcctgttgatctgtgaccttacccccaaccctgtgctctctgaaacatgtgctgtgtccactcagggttaaatggattaagggcggtgcaagatgtgctttgttaaacagatgcttgaaggcagcatgctcgttaagagtcatcaccaatccctaatctcaagtaatcagggacacaaacactgcggaaggccgcagggtcctctgcctaggaaaaccagagacctttgttcacttgtttatctgctgaccttccctccactattgtccc

SEQ ID NO: 9072 - DNA, 1227 bp, Artificial sequence
  DNA replication origin
atgtctacttctttccacacagacacaataacaatccgacctctccttcttttccccacatttcccccttttctattcgacaaaaccgccatcgtcatcatggcccgttctcaatgagctgttgggtacacctcccagacggggtggcggccgggcagaggggctcctcacttcccagacggggctgctgggcagaggggcccccccatctcccagacagggtggcggccgggcagaggggcttctcacttcccagatggggtggctgggcagaggggccccccacctcccagacggggcagctggccgggcgggggctgccccccacctcctggacggggcggctgccgggcggagacgctcctcacttcccggacggggaggctgccgggcggaggggctcatcacttctcagatggggcggccggtcagagacgctcctcacctcccagaaggggtggcggcagggcagagacactcctcagttcccagacggggtcgcggcagggcagaggcactcttcacatcccagacggggcggcggggcacaggcgctccccacatcccagatgatgggcggccaggcagagacgctcctcacttcctagacgggatgactgccgggaagaggcgctcctcacttcccagactggggggccgggcggaggggctcctcacatcccagacgatgggcggccaggcagagatgctcctcacttcctagacggggtggcggccgggaagaggcactcctcacttcccggactgggcggccaggcagaggggctcctcgcatcccagacgatgggcggccaggcagagacgctcctcacttcctatatggggtggcagccgggcagaggctgcaatctcggcactttgggaggccaaggcaggcggctgggaggtggaggttgtagcgattcgagatcacgccactgcactccagcctgggcaccattgagcactgagtgaacgagactctgtctgcaatcccggcacctcaggaggccgaggccggcagaccactcgcagtcaggagctggagaccagcccggccaacagggcgaaaccccgtctccaccaaaaaatacgaaaaccagtcaggtgtggtggcgcatgcctgcaatcccaggcactcggcaggctgaggcaggagaatcaggcagggaggctgcagtgagccaagatggcagcagtacagtccagcctcggctcggcatcaga

SEQ ID NO: 9073 - DNA, 1106 bp, Artificial sequence
  DNA replication origin
aacagcaggagcgccaaaatccccgcctcaggacttggcagaagcacctcccgaggtccgagagtgggagaggggaaagtgtaggccctcggacggaagggtctctcctcgccgggccgggtacacacctggtgctaccagagcagcgcgcctagtgcagccggaagccccagcccagcactccggctggctcggggcccccttggctgtccgcgcgtcgtcaccgcgcccccgccgcgcggctgcctccgccttcgcgccctcccgccccgcgcactcgcgctcgcgcacgcgcacgccgcgcccggcagcactcggcgctgtcatggcggccgggagcagcttcagtgggcacacgacagccgcgcgacccgtggcggggcgagctgtggcagtagcatcctcaccactcgcagcagcctcagccgcggcgcccgtagcgccagcagcggctgcttttgcaaaggctgagcgcaggggcggggcgggccaggaagccatggagttctgtgcagccgcggactcccggggagcggactagggaaacttggaggctgcgaccaggtgcactgacctctctgtcctcccttctctccctgcggtggccgctgggtttctctggccgctcccctcccttcctgccaccacacacacctccccaccccttcccgtcgaatctcaggtgcctgagagaggtgcttcactcctcccactgggccgagcatttagaataatcaccgcccccttcccccgccttttcctgccctggatctccgccgccacctcggtctcgctgctcctgggcggggggtgaggacgagtccggagtatctgggtgaggaagaactttctacctctgtgatagcttgtgggccccccttctttcctccgatccctcctttccccgcgacagtttctctttctagtgcacctgtgaggagaggttaccctgcgcctagaacctgcacgagagtgggggaggagtgagcctgttcgggggcctcttggacctgccttcacccagaacccagctttttgagcccgggagaagcgggtggctagtagtggggtgcctttagtaacttacttgaccgacaataactatt

SEQ ID NO: 9074 - DNA, 1279 bp, Artificial sequence
  DNA replication origin
agggaggggagcggccagagaaacccagcggccaccgcagggagagaagggaggacagagaggtcagtgcacctggtcgcagcctccaagtttccctagtccgctccccgggagtccgcggctgcacagaactccatggcttcctggcccgccccgcccctgcgctcagcctttgcaaaagcagccgctgctggcgctacgggcgccgcggctgaggctgctgcgagtggtgaggatgctactgccacagctcgccccgccacgggtcgcgcggctgtcgtgtgcccactgaagctgctcccggccgccatgacagcgccgagtgctgccgggcgcggcgtgcgcgtgcgcgagcgcgagtgcgcggggcgggagggcgcgaaggcggaggcagccgcgcggcgggggcgcggtgacgacgcgcggacagccaagggggccccgagccagccggagtgctgggctggggcttccggctgcactaggcgcgctgctctggtagcaccaggtgtgtacccggcccggcgaggagagacccttccgtccgagggcctacactttcccctctcccactctcggacctcgggaggtgcttctgccaagtcctgaggcggggattttggcgctcctgctgttgttaagttaccgtagggtctcttggcgcggagggaacacgcgctgcgttgcctaggtgtctcattggacttggagaagaacacctgaggcacctctacgagccagagaggtgacggcgctggagccagtgaggctgctgtccctgcccaatgggagcgaggagtccccacccctggctgctttcagctgttgcccgcccgccgctctcggcggagacttggagatttccactgggatacctcggcagctgccgccattcgggaggggaggggaggggaccgagtcgacgaggaatgggaaagattccttgctttgcagctgccgcgccacgaaacctctcccacattcattctaggcagaggattcctgagacagctgctataaacagcgtggagacagggttccttgtgcctgtagacctccgaagggttttttcctctcgtgattttccaatgtgaagattaggctcgcgtcattctcagagtagatcaaaagataaattatattaggtagtacagataggtcctcatactcagtgtcccttctttccacccgctattaacagtaaaccattcttcctagtgagtgaaaaataaatttagaggaaggtggtttttcacccacgtgtatcctttgaggtcaa

SEQ ID NO: 9075 - DNA, 973 bp, Artificial sequence
  DNA replication origin
gtctgggaagtgaggagcgtctctgcccggcagccgccctgtccaggagggaggtgggggtcagcccccgccaggccaggcgctccgtccgggagggaggtgggggggtcagccccctgcccggccagcctccccatccgggaggtgaggggcgcctctgcccggccgcccctactgggaagtgaggagcccctctgcccggccagccgccccttccgggagggaggtggggggggtcagccccccgcccggccagccgccccgtccgggagggaggtggggggtcagccccctgcccggccagcctccccgtccgggaggtgaggggcgcctctgcccggccgcccctactgggaagtgaggagcccctctgcccggccagccgccccgtccgggagggaggtggggggtcagccccccgcccggccagcagcctcgtccgggaggtgaggggcgcctctgcccggccaccaccccgtctgggaggtgtgcccaacagcccattgagaacgggccatgatgacaatggtggttttgtggaatagaaagcggggaaaggtggggaaaagattgagaaatcggatggttgccgtgtctgtgtggaaagaagtagacatgggagacttttcattttgttctgtactaagaaagattcttctgccttgggatcctgttgatctgtgaccttaccccccagccctgtgctctctgaaacatgtgctgtgtccactcagggttaaatggattaagggcggtgcaagatgtgctttgttaaacagatgcttgaaggcagcatgctcgttaagagtcatcatcactccctaatctcaagtacccagggacacaaacactgcggaaggcctcagggtcctctgcctaggaaaaccagagacctttgttcacttgtttatctgctgaccttccctccactattgtcctatgaccctgccaaatccctctctgtgagaaacac

SEQ ID NO: 9076 - DNA, 941 bp, Artificial sequence
  DNA replication origin
ccggccgccccgtctgagaagtgaggagaccctctgcccggcaaccgccccgtctgagaagtgaggagcccctccgcccggcagccgccccgtctgagaagtgaggagcctctccgcccggcagccaccccatctgggaagtgaggagcgtctccgcccggcagccaccccgtctgggagggaggtggggggggtcagccccccgccaggccagccgccccatccgggagggaggtgggggtcagccccccgcccggccagccgccccgtccgggaggtgaggggcgcctctgcccggccgcccctactgggaagtgaggagcccctctgcccagccagccgccccatccgggagggaggtgggggcgtcagccccccgcctggccagccgcccctcccgggaggtgaggggcgcctctgcccggccgcccctactgggaagtgaggagccctctgcccggccaccaccccgtctgggaggtgtgcccaacagctcattgagaacgggccaggatgacaatggcggctttgtggaatagaaaggcgggaaaggtggggaaaagattgagaaatcggatggttgccgtgtctgtgtagaaagaagtagacatgggagacttttcattttgttctgtactaagaaaacttcttctgccttgggatcctgttgatctgtgaccttacccccaaccctgtgctctctgaaacatgtgctgtgtccactcagggttaaatggattaagggcggtgcaagatgtgctttgttaaacagatgcttgaaggcagcatgctccttaagagtcatcaccactccctaatctcaagtacccagggacacaaacactgcggaaggccacagggtcctctgcctaggaaaaccagagacctttgttcacttgtttatctgctgaccttccctccactattgtcctatgaccctg

SEQ ID NO: 9077 - DNA, 1334 bp, Artificial sequence
  DNA replication origin
gaacaaaatgaaaagtctcccatgtctacttctttctacacagacacggcaaccatccgatttctcaatcttttccccacctttcccgcctttctattccacaaagccgccattgtcatcctggcccgttctcaatgagctgttgggcacacctcccagacggggtggtggccgggcagagggctcctcacttcccagtaggggcggccgggcagaggcgcccctcacctcccgggaggggcggctggccaggcggggggctgacgcccccacctccctcccggatggggcggctggctgggcagaggggctcctcacttcccagtaggggcggccgggcagaggcgcccctcacctcccggacggggcggctggccgggcggggggctgacccccacctccctcccggatggggcggctggcctggcggggggctgaccccccccacctccctcccagacggggtggctgccgggcggagacgctcctcacttcccagatggggtggctgccgggcggagaggctcctcacttctcagacggggcggctgccgggcggaggggctcctcacttctcagacggggcggttgccgggcagagggtctcctcacttctcagacggggcggccgggcagagatgctcctcacctcccagacagggtcgcggccgggcagaggtgctcctcacatcccagacggggcagcggggcagaggcactccccacatctcagaggatgggcggccgggcagagacgctcctcacttcctagatgtgatggcggccgggaagaggtgcttctcacttcctaggtgagatggcggccgggcggagacgctcctcactttccagactgggcagccaggcagaggggctcctcacatcccagacgatgggcggccaggcagagacgctcctcacttcccagacggggtggcggccgggcagaggctgcaatctcggcactttgggaggccaaggcaggcggctgggaggtggaggttgtagccagccgagatcacgccactgcactccagcctgggcaccattgagcactgagtgaacgagactccgtctgcaatccaggcacctcgggaggccgaggctggcggatcacttgcggttaggggctggagaccggcctggccaacacagcgaaacaccgtctccaccaaaaccagtcaggcgtggcggtgcgagcctgcaatcgcaggcattcggcaggctgtcaggagaatcaggcagggaggttgcagtgagctgagatggcagcagtacagtccagctttggctcagcatgagagggagaccgtggaaagagagggggagaggga

SEQ ID NO: 9078 - DNA, 1291 bp, Artificial sequence
  DNA replication origin
cagatcaacaggatcccaaggcagaagaatttttcttagtacagaacaaaatgaaaagtctcccatgtctacttctatccacacagacccggcaaccatccgatttctcaattttttccccactcttcccgcctttctattccacaaaaccgccattgtcatcatggcccatccccagtgagccgctgggcacacctcccagacggggtcgtggccgggcagaggggctcctcacttcccagtaggggcggccgggcagaagcgcccctcacctcccggactgggcggctggccgggcggggggctgacccccccacctccctcctggacggggcgactggccgggcagaggggctcctcacttcccagtaggggcggccgggcagaggagcccctcacctcccggacagggcggctggccgggcggggggctgaccgccccccacctccctcccggtcggggtggctgccgggcggagacgctcctcacttcccagacggggtggctgccggacggaggggctcctcacttctcagacggggcggttgccaggcagagggtttcctcacttctcagacggggcggccgggcagagacgctcctcacctcccagacagggttgcggcccagcagaggcgctcctcacatcccagacagggcggcggggcagaggtgctccccacatctcagacgatgggcggccgggcagagacgctcctcacttcctagatgggatggcggtggggaagaggcgctccttgcttcctagatgggatggcagccgggcagagacactcctcactttccagactgggcagccaggcagagaggctcctcatatcccagacgatgggaggccaggcagagaggctcctcacttcccagacggggtggcggctgggcagaggctgcaatctcggcactttggggggccaaggcaggcggctgggaggtggaggttgtagcaagccgagatcacgccactgcactccagcctgggcaccattgagcactgagtgaaccagactccgtctgcaatcccggcacctcaggaggccgaggctggcggatcactcgcggttaggagctggagaccagcccggccaacacagcaaaaccccgtctccaccaaaaaaaaaacgaaaaccagtcaggcgtggcggcgcacgcctgcaatcgcaggcactcggcaggctgaggcaggagaatcaggcagggaggttgcagtgagccgagatggcagcagtaccgtccagctttggctcagcatcagagggagaccgtggaagg

SEQ ID NO: 9079 - DNA, 957 bp, Artificial sequence
  DNA replication origin
cggccgcccatcgtctgagatgtggggagcacctctgccccgccgccctgtctgggatgtgaggagcgcctctgctgggccgcaaccctgtctgggaggtgaggagcgtctctgcccggccgccccgtctgagaagtgaggaaaccctctgcctggcaaccgccccgtctgagaagtgaggagcccctccgtccggcagccaccccgtctgggaagtgaggagcgtctccgcccggcagccaccccgaccgggagggaggtggggggcggtcagccccccgcccggccagccgccctgtccgggaggtgaggggctcctctgcccggccgcccctactgggaagtgaggagcccctctgcccggccagtcgccccgtccaggagggaggtgggggggtcagccccccgcccggccagccgcccagtccgggaggtgaggggcgcttctgcccggccgcccctactgggaagtgaggagcccctctgcccggccacgaccccgtctgggaggtgtgcccagcggctcactggggatgggccatgatgacaatggcggttttgtggaatagaaaggcgggaagagtggggaaaaaattgagaaatcggatggttgccgggtctgtgtggatagaagtagacatgggagacttttcattttgttctgtactaagaaaaattcttctgccttgggatcctgttgatctgtgaccttatccccaaccctgtgctctctgaaacatgtgctgtgtccactcagggttaaatggattaggggcggtgcaagatgtgctttgttaaacagatgcttgaaggcagcatgctcgttaagagtcatcaccactccctaatcttaagtacccagggacacaaacactgcggaaggccgcagggtcctctgcctaggaaaaccagagacctttgttcacttgtttatctactgaccttccctccactatt

SEQ ID NO: 9080 - DNA, 1255 bp, Artificial sequence
  DNA replication origin
gccgtggctcctcctccccgagcagtggggctcgctggacaagtgtcctcagatagtccagaaagtttgctctgcggtcccggggacgcctgcgcgggacccagtgaggaaagccgggctggctcctcgcacctcgggcggccgccgctcgaaagtcttggcccaggtcctccaggcccggctcaaactcaggagtgcccgggaagaatgtaggtcgtgagaaggtcggagcgcaacttttcgaaggtgcgtcagccgcgggctgaggcgcgtgggtcactgcctccccccagcctctccctagtgagcgcggggggggcgggggcgggggcgggggccggggcggggcaggggcgggggtggggcccaacctgcctggaggcctcggggagcgcgccccggccccgcccccgccgccgccggccccgcctctgccgctgggacacgccgccgccaggtgcgccggggacttaggcagtgccgcgccgcacggcccgcgccggtttccaaggtgaaggaggaggagcctctgagggaaagtttccacagaaacttgagctgggcgcagtgtagcactcgcgcccttgggggctagcgtttggccggagctacacactctttactcacgcacgcacaccgccgtacacagcacaatcgttcaccgtcccgccaaaggctcgtctctcgggttctgcctagtggaaggagtcggacaacgccgcacgtcacgggcgtttcggatttcttgcttcccaaaggtttgacggcggccaccggcgccccggcccagctctgctttcctttgctgactccttcctttaggtgtgaattttaaaatgctgataccgccccaagagagctgagtcaagtgaggcaaacgttcgcctgttgttctcctgacagactccctgcagtgggcaggggaaatgtggccttggccgacattaatgaagtgccaggatggagggagggggcctgctgatttgttctgttttactttttaagggtaactagagcgttactggagtcgtctgtgggtttggggagtatgtggcgcgtgtgtgtgtcacacatttcactggcaactcccgccaaccccttcccaagaaatgaaggctctaatgtgggcagttctgcaacaaaggtgaaacttccccaaatcacgattccccgcaagatgagagagcaggtgcagcatccattttcccactatcacgcttgagatggtggctttgggcactgccgggtgccccga

SEQ ID NO: 9081 - DNA, 1492 bp, Artificial sequence
  DNA replication origin
tccttcaccttggaaaccggcgcgggccgtgcggcgcggcactgcctaagtccccggcgcacctggcggcggcgtgtcccagcggcagaggcggggccggcggcggcgggggcggggccggggcgcgctccccgaggcctccaggcaggttgggccccacccccgcccctgccccgccccggcccccgcccccgcccccgccccccccgcgctcactagggagaggctggggggaggcagtgacccacgcgcctcagcccgcggctgacgcaccttcgaaaagttgcgctccgaccttctcacgacctacattcttcccgggcactcctgagtttgagccgggcctggaggacctgggccaagactttcgagcggcggccgcccgaggtgcgaggagccagcccggctttcctcactgggtcccgcgcaggcgtccccgggaccgcagagcaaactttctggactatctgaggacacttgtccagcgagccccactgctcggggaggaggagccacggccggggacaggtaggtgctgtgctggccggagatttgcgcttgagggattcttttattttagagggttgaaggaggagggagagtcgaaatgtcccttctctgcatccgccaactgggcagggggtgcgggcattgggctgagggagcaggcattgggctgggggccggctggggatgttccaaacgaggtcgctgcgtcgggcgggggcgcaggggggaggaggtgacttctagggtttcgggctccgggacggggcgtaacgcggtgactgaccctgggagagagagagccagcttgttttgacgaaggaatatgtcattagggccctccatcccattccttggtcccagggtcctctgggaggcacaggaaaaggcaaagagatgtggagttcaggtttcccctgtaaatcaacttgcttacacaggagacagaggcggtgcccctctgaggtttgcagccctttcctggtgtaaggacttactggttaggtagctgttgctcaatttcgtaaattctgtgatgaaactgcgttcaagtcgtggttattattgatagtgtgtatgtgtttgtgtttcctctggctcaacaaaggtcccttgttaactccgcttctgctagggagtgggaagaactaccttggtgtcttatttcaggcctggtcagagcgaggtgttggtgcaggcggcggtagccttgttggcttgggactttgggaatcacatgagcaggtctagtgaattagtgtcccagcctcctggacccacccattcacagcagatctagcttccactattcagcagatgctgcagccccagctatccagggacagggaaacccccctgaagggaaagagccaaatgttgagaaggagagacagctttcaggaggaggagtaaacaatgcctaacaattgttgcttccctatagattgggcttgctcccttggcttctctggaagggctgtgctat

SEQ ID NO: 9082 - DNA, 942 bp, Artificial sequence
  DNA replication origin
tccgcccggcagccgccccatctgagaagtgaggagcccctccgcccagcagccgccccgtctgggaagtgaggagcgtctccgcccggcagccacctcgtccgggagggaggagggggggtcagccccccgcccggccagccgccccgtccgggagggaggtggggggatcagcccctcgcccggccagccgccccgtccgggaggtgaggggcgcctctgcccggccgcccctactgggaagtgagtagcccctctgcctggccggccgccccgtccgggagggaggtgggggggtcagccccccgcccggccagccgcctcatccgggagggaggtgggggggtcagccccccgcccggccagccaccccggtccgggagggaggtgggggggtcagccccccgcccggccagccgcctcgtctgggaggtgaggggcgcctctgcccggccgcccctactgggaagtgaggagctcctctgcccggccaccaccccgtctgggaggtgtacccaacagctcattgagaatgggccatgatgacaatggcggttttgtggaatagaaaggggggaagggtggggaagagattgagaaatcggatggttgccgtgtctgtgtggaaagaggtagacatgggagacttttcattttgttctgtactatgaaaaattcttctgccttgggatcctgttgaactgtgaccttacccccaaccctgtgctatctgaaacatgtgctgtatccactcagggttgaatggattaagggcggtgcaagatgtgctttgttaaacagatgcttgaaggcagcatgctccttaagagtcatcaccactccctaatctcaagtacccagggacacaaacactgcggaaggccgcagggtcctctgcctaggaaaaccagagacctttgttcacttgtttaactgctgacc

SEQ ID NO: 9083 - DNA, 1294 bp, Artificial sequence
  DNA replication origin
cctcacttcccagtaggggcggccgggcagaggcgcccctcacctcccagacgaggcggctggccgggcggggggctgacccccccacctccctcccggaccggggtggctggccgggcggggggctgacccccccacctccctcccggatgaggcggctggccgggcggggggctgacccccccacctccctcccggacggggcggccggccaggcagaggggctactcacttcccagtaggggcggccgggcagaggcgcccctcacctcccggacggggcggctggccgggcgaggggctgatccccccacctccctcccggacggggcggctggccgggcggggggctgaccccccctcctccctcccggacgaggtggctgccgggcggagacgctcctcacttcccagacggggcggctgctgggcggaggggctcctcacttctcagatggggcggctgccgggcggaggggctcttcacttctcagacggggcggttgccgggcagagggtctcctcacctctcagatggggcggccgggcagagacgctcctcacatcccggacggggcggcagggcagaggcgctccccacatctcagacaatgggcggccgggcagagacgctcctcacttcccagatgggatggcggctgggaagaggtgctcctcacttcctagatgggatggcggccgggcagagacactcctcactttccagactgggcagccaggcagaggggctcctcacatcccagacgatgggcggccgggcagagacgctcctcacttcccagacggggtggcggccgggcagaggctgcaatctcggcaccctgggaggccaaggcaggctgctgggaggtggaggttgtagcgagccgagatcacgccactgcactccagcctgggcaccattgagcactgagtgaacgagactccgtctgcaatcccggcacctcgggaggccgaggctggcagatcactcgcggttaggagctggagaccagcccggccaacacagcgaaaccccgtctccaccaaaaaaatatgaaaaccagtcaggcgtggcggcgcacacctgcagtcgcaggcactcggcaggctgaggcaggagaatcaggcagggaggttgcagtgagccgagatggcagcagtaccgtccagcttcggctcggcatcagagggagaccgtttaaagagagggagagggagaccgtggggagagcgagagcgagagagagagggagagggagagggagagggcacctttgtacttcttaactgc

SEQ ID NO: 9084 - DNA, 1634 bp, Artificial sequence
  DNA replication origin
ggcggctgggaggtggaggttgtagctagccgagatcacgccactgcactccagcctgggcaacattgagcactgagtgagcgagactccgtctgcaatcccggcatctcaggaggccgaggctggcagatcacttgtgattaggagctggagatcagcccggccaacatggcgaaaccccgtctccaccaaaaaaatacgaaaaccagtcaggcgtggcggcgcgcgcccgcaatggcaggcactcggcaggctgaggcaggagaatcaggcagggaggttgcagtgagcggagatggcagcagtatagtccagcctcggcttggcatcagagggagaccgtggaaagagagagggagaccgtggggagagggggagggggaaggggagggggagggagagggttttttctttaagctatctatttccttgaatatttctcccttcacttcttgtatcatattttggatttccttgcattgggcttcgcctttctctggtccctccctgattagcttaatagctgacctcctgaattctttttcaggtaaatcagggatttcttcttgatttggattcattgctggtaaactagtgtgattttgggggagtgttgaaaagccttgttttgtcatattaccagcgttggttttctcgttccttctcatttgggtaggctctgtcagagggaaggtccagggctgaaagctgctattcaggtctttttgtcccatggggtgttcccttgatgtaataatattctctcccttttcctgtggatgtggcttcctttgagctgaactgtagtgactgttgtctgtcttctgggtctagccacccagtgagtcttcgtggctccaggctggcactgggggctgtctgcacagagtcctgtgatgtgaaccatccattggtctctcagccgtgaataccagcgcctgttctggtgaaggtggcagagggtgcagtggactccgtgggagtccttagctttggtggtttaatgctttatttttgtgctggttggccttctgccaggaggtggtgctttccagagagcattagctgtagtatggagagggaccagtggtgggcggggccctagaactcccaagattgtatgtccttcgtcttctgttaccaggttgagtagggaaggaccatcaggtggcagcagggctaggcatgtctgagctcagactctccttgggcgggtcttgctgcggctgctgtggatgatggggatgagattcccaggtcactggagttgtgtgcctaggaggatttatggctgcctctgctgagtcatgcgggttgtcagggaagaaggggaaagctggcagtcacaggcctcacccagctcccacacaaaccaaagggccagtctcactcccaccacaccccgagtctgtttccaggcagagggcaggtggggcttgaaaacttgcctgaggctttccacttcccagagtatttggggtgtctcccgggtcctgtaggagcagttttctcaggattgctggcctgctcttgcagctgatctggaggtaaaattcacaatgcaagcctccgcatgctgctctgtctggagctgcaatctagtcctgcctcccgtctgccatgatccgaccagc

SEQ ID NO: 9085 - DNA, 1171 bp, Artificial sequence
  DNA replication origin
acagaacaaaatggagtctcctatgtctacttctttctacacagacacagcaacaatctgatttctctatcttttccccacctttcccccttttctattccacaaaaccgccatcgtcatcatggcccattctcaatgagctgttgggtacacctccctgatggggtggtggccaggcagaggggctcctcacttcccagaaggggtggccgggcagaggcgccccccacctcctggacggggcggtggccgggcggaggctccccccacctccctcccggacggggcggctggccgggcgggggctgacccccccacctccctcccggacggggcggctggccgggcgggggctgaccccccacctccctcccggacggggcggctggccgggcaggggctgaccccccacttccctcccggacggggcggctggcccggcgggggctgacccccacctccctcccggatggggcggctgctgggtggctgccgggcggaggggctcctcacttctcagatggggcggctgccgggcagaggggctcctcacttctcagacggggcggccgggcagagacgctcctcacctcccagacggggtcacagccgggcagagacgctcctcacatcccagacggggcagcggggcagaggcgctccccacatctcagacgatgggcggccgggcagagacgctcctcacttcctagacgggatggcagctgggaagaggcactcctcacttcccagactgggcagccgggcagaggcgttcctcacatcccagacgatgggtggccaggcagagatgctcctcacttcccagacggggtggcagccgggcagaggctgcaatctcggcactttgggaggccaaggcaggcggctgggaggtggaggttgtagctagccgagatcacgccactgcactccagcctgggcaacattgagcactgagtgagcgagactccgtctgcaatcccggcatctcaggaggccgaggctggcagatcacttgtgattaggagctggagatcagcccggccaacatggcgaaaccccgtctccaccaaaaaaatacgaaaaccagtcaggcgtggcggcgcgcgcccgcaatggcaggcactcggcaggctgaggcaggagaatcaggcagggaggttgcagt

SEQ ID NO: 9086 - DNA, 891 bp, Artificial sequence
  DNA replication origin
ccggctgtgaccccgtctgggaggtgaggagcgtctctgcccggccgccccgtctgagaagtgaggagcccctctgcccggcagccgccccatctgagaagtgaggagcccctccgcccggcagccacccagcagccgccccatccgggagggaggtgggggtcagcccccgccgggccagccgccccgtccgggagggaagtggggggtcagcccctgcccggccagccgccccgtccgggagggaggtggggggtcagcccccgcccggccagccgccccgtccgggagggaggtgggggggtcagcccccgcccggccagccgccccgtccgggagggaggtggggggagcctccgcccggccaccgccccgtccaggaggtggggggcgcctctgcccggccaccccttctgggaagtgaggagcccctctgcctggccaccaccccatcagggaggtgtacccaacagctcattgagaatgggccatgatgacgatggcggttttgtggaatagaaaagggggaaaggtggggaaaagatagagaaatcagattgttgctgtgtctgtgtagaaagaagtagacataggagactccattttgttctgtactgggagaggttcttctgccttgggatgctgttgatctgtgaccctgcccccaaccctgtgctctggggcatgtgctgtgtccactcagggttgaatggattaagggcggtgcaagatgtgctttgttaaacagatgcttgaaggcagcatgctcattaagagtcatcaccactccctaatctcaagtacccagggacacaaacactgcggaaggctgcagggtcctctgcctaggaaaaccagagacctttgctcacttgtttatctgctgacctt

SEQ ID NO: 9087 - DNA, 1085 bp, Artificial sequence
  DNA replication origin
tgaaggcaaggttaattaaatcctgttgtggggtttgagggccagaatttaatttttggagttttatttaatgtcaggagcagattgggtaataaaatatattttgagaataagacggccttttgaccttttagggtctagggctgtaaagtgtctcagggttgctgccaaacaagtcatgaactgggctggatttttatatttgatgaaaaagagcctaaatgctatctgatttgggataaagaaaaaggagcattaaccttgactatgtctttagctccagccacctttttaagagtaaattgctgggcaggtgggggagggctagtcatggaaggaagctgtaagccagaccaggtgtgaggaggggaggtgataaaatgattatagggtgtgggagcagaggctgaggaagaattaggagctaactcggcctggtgaggaggggagaggtcagataggtctgtagaaaaggaagattagaaagactcagtgacgcttggggttgggactgaggggacaggtgggagggaaagaaggaagatttgggatgagttgcactgggaacagagactagagagggaccgatgtataaaagaatgcctggacatcaggcacctcagaccacttgcccagtttacgacaagaattatttagatcttgcaggatggaaaaactgaaagtgccgttttctggctatttggaactactgtcgagtttgtattggggtcaagtggcattgcagaagaaaataagacacttagattttaggtcaggtgagagttgaagaggttttaagttcttaagaacacaggctaagggagaagaaggaggaatggaaggtggaatcttgcccagagtgaaggaggcaagcccaaagaaaagagtagagacatggagaaggggtagggggttcttgccctccagaaaagcagagaaggggtcgacgtgcagagatatgaggttggggcatggaaataagggatcggggtgcagagatatgaggttggggtacttgcccctcccctagaaaagcgggacttgccgctaagggtgaaggagaaggggttgggggtttcttgccc

SEQ ID NO: 9088 - DNA, 1200 bp, Artificial sequence
  DNA replication origin
gagcttctgcctcgtcccgtggggcgtggggcgagacccccaaggtgtagggaggggggtcccagccgcagcgacacatgcgggagccgggagcgggggcggcgccgagcggagccggccgggtccctcgccttgccgccgactcggccacccgcccggggccgtagcatcttgccccggagtgtatgaaccggggccccaaccaagctcggcaaccaccccccggccgggggggcggggaccccgatgtgaagcggcggctggggcggcggagagaacaggaccgacgccgccgtcctttcctcaccttccccctcccctcagccccctccgggggtcttctcccttggccagtcgccggccccccggctccttggctggactccgggaggagttcctagagcccccctcccccgccccagtcccgagggcggcggggccgggggggacccggggggccggccgcagcctccacccagaggaaactttacaaaaacaaaatccggagtctcccaaacctgactgtcccgggagaagtggccctggacgggcagaagccgcagcctgaaaagacccaggaagaggaaaagaggaggtaagcggggccgccgcctcccctcccctggcagcgcggaagagacccgggttgccgcctggtttagcgacacgagcaccgcttcttcctcagtaccgcgccggagccttccgcagctgccgcttcagtccgaaggaggaagggaaccaacccactttctcggcgccgcggctcttttctaaaagtgtgagtggccccgggagagggaattgagggggagaaagtgggaggatgccggcgcttcctcctggagttttgctgatgttctccagtagtgttgggagtctatcaatgagggagtctagctttattcacggaggggggaaggtgttagggaggcctgtattttgtaactttttagctctttgtacgagtaatgcaagtatgcaggtttctgtcggaggagtcttttctccaaagtgaatactcgcacctttctggccagcagttggcaaagggaaattgaggaagccagagcatatgtgcgcacagaggccatctgtatctgtaaccttttcctggtactgtgggtgtgtgcggtgtactttttgtttcgggggtactctcatataggttcccgaatgagaactacttaacctgtggac

SEQ ID NO: 9089 - DNA, 1270 bp, Artificial sequence
  DNA replication origin
cagccgccgctgccggccgggaaggtgagggggggaaaggagtgcggccgcggctcccgctggcccaggtgagagcgaaggtctcggcggcggccagtgcagggggactggatctctcggatgctccttcgctctcagtctcagcggcggcggcggcggcagcggcagcggcagcgcccggagctcagctcgctgtctccctcgctctgtgcggggctctcgcctcactccagagagaggggcgggaggagagcggcgcctgccgatgacgcaagtcacctagcaaccgctctcttccccctccctcttctttccgctctgaggcttcctccgctggcctttttcccccttccagccaccccgccctgggcgcctctggcgcgctctgatgacgctccaagggaagaggaagtggggatcggcgagcgggtgggtgcgcctcgggccgcgggactcgcagccgccaccgccgctgccgcctctacggccgcgtcagaactgaagagaggaaggggaggagccgagtcgagcctaagctgccgcccgatcttacccctgacccgagggcggcctggagagcttggtctgtagcggtttccttcggggcaggtggggactgctcctttgggaggaaggaggaggcccaggccgcgtcttcaggcagctgcgcgcaccacccgaaggtgaggcatttggccccaaacagaccctcgaaaagccggactgatcgaggagttaccctacagcctgatctgcacctgctccagggagagagcgccccacccttcccgtggcgtggggtgagacccagcgttggataacgtgtggtcgggccgagcaaatgtttgatgaatgaatgaatgaatgaatgcctctctcacgtggcactcgtgaagctcagaggatatggtggaagtgcaagcgctttgtaaactgcagtgcattgtaaaaatgagttgtaatacattcctcccctccccctagccatgaaaggaaacaggggtgcggcttgagtacagagtcacaacctgagtctttagtggaaaaggagacgaaatgccgagcaagggaagggacccatcctcgcgcagattgttagggcggcgggaagggaggattggaagggagccatcctctgggagattgctgaaggatttttgactgtcaggggaagaatttaatagtccctcacttttacgaatggttctttcttacggtttggagctttcgagagcttctggtcttggttcatcagtgtacgttgtcatca

SEQ ID NO: 9090 - DNA, 886 bp, Artificial sequence
  DNA replication origin
aagcaagaagaaccctaccccaaccttcaggtcctgtggaagggaagccagctaccactgcagagggcttcagggaagcagtgtcaccaggggacagagccaagtttcagttactcctccagggggaggggaaggacacactcagaggagagcacgaaggaaaggattctgctgacgattgcaagtgaaagggtttcgggagatgaggaggatggcgagtgaggctagaaaaggggatgggcagagtcagatggggattagatgcccagggatgagaggtgacctgggagtcttgggtttcttgtgggacagacatcagtggggataagggacatgatgaaattagtcctgatggtcacaaggtacatagtgaaggattgggggtggggtggggtgtcttgacaggagctggaggggttggggatcccccttgatggttgctaggagaggcgtggagtctggctgaaggggcatcttacactgagccatgccctttcttggtggctgcctaatggaggccttacttgatccccacaactctataaagtgcacactattgttattccaattttacagaagcagatatatttaaaaagcaaggacttggtgaatgagggcctttaaattgcaggttgaatcttaatcaccaatgaggaagttgagaaagggagtctatttgggtgtgaaagtggaggggaataaaggactgggaggtggattctggtttaacatgtctggagttgaagttgcaggcagcggggactgccacgtggaaatgagttgaaggtgcttggaactatggaagttggctcggcataggtgtcagagctggagaagtggatttaaagtcagcagtccaagccagagcagatttttcacccccaga

SEQ ID NO: 9091 - DNA, 898 bp, Artificial sequence
  DNA replication origin
gagcgcctctgtcccgccgccccgtctgggatgtgaggagtgcctcttcccggccgcaaccccgtttgggatctgaggagtgtctctgcccgaccgccaccccgtctgggaggtgaggagcgtctctgcccggccgccccgtctgagaagtgaggagcccctccgcccggcagccgccccatccgggaagtgaggagcgtctccgcctggcagccgccccgtccaggaggtggggggcagcccccgcccggccagccgccccttccgggagggaggtggggggcagcccccgcccagccagccgccccgtctgggagggaggtggggggcagcccccacccagcagccgccccgtccgggaggtggggggcgcctctgcccggccaccccgtctgggaagtgaggagcccctctgcccggccgccaccccgtctgggaggcatgcccaacagcttattgagagcgggccatgatgacgatggcggttttgtcaaatagaaggggggaaatgtggagaaaggaaagaggggtgggattgttactgtgtctgtgtagaaagaagtagacataggagactccattttgttctgtactaagaaaaattcttctgccttgggatgctgttaatctataaccttacccccaaccccgtgctctctgaaacatgtgctgtgtccactcagggttaaatggattaagggcggtgcaagatgtgctttgttaaacagatgcttgaaggcagcatgctcgttaagagtcatcaccactccctaatctcaagtacccagggacacaaacactgtggaaggccgcagggtcctctgcctaggaaaaccagagacccttgttcacatgtttatctgctgaccttccctccactattgtcctatgaccctgc

SEQ ID NO: 9092 - DNA, 1291 bp, Artificial sequence
  DNA replication origin
gttgggggtaaggttatagattaacagcatcccaaggcagaagaatttttcttagtacagaacaaaatggagtctcctatgtctacttctttctacacagacacagtaacaatcccacccctctttcctttctccacatttccccccttctatttgacaaaaccgccatcgtcatcatggcccgctctcaataagctgttgggcatgcctcccagacggggtggcggccgggcagaggggctcctcacttcccagacggggtggccgggcagaggcgccccccacctcccggacggggcggctgctgggtgggggctgccccccacctccctcccagacggggcggctggctgggcgggggctgccccccacctccctcccggaaggggcggctggccgggcgggggctgccccccacctcctggacggggcggctgccaggcggagacgctcctcacttcccggatggggcggctgccgggcggaggggctcctcacttctcagacggggcggccgggcagagacgctcctcacctcccagacggggtggcggtcgggcagagacactcctcagatcccaaacggggttgcggccgggaagaggcactcctcacatcccagacggggcggcgggacagaggcgctccccacatctcagacgatgggcggccgggcagagacgctcctcacttcccagactgggcggccgggcagaggggctcctcacatcccagacgacgggcggtcaggcagagacgctcctcacttcccagacggggtggtggccgcgcagaggctgcaatctcggcactttgggaggccaaggcaggaggctgggaggtggaggttgtagcgagccgagatcacgccactgcactccaggctgggcaagattgagcactgagtgagccagactccgtctgcaatcccggcacctcgggaggcccaggcgggcagaccactcgcggtcaggagctggagaccagccaggccaacatggcgaaaccccgtctccaccaaaaaatacaaaaaccagtcaggcgtggcggcgcgcgcctgcaatcccaggcactcggcaggctgaggcaggagaatcaggcagggaggctgcagtgagccgaggtggcggcagtacagtccagcctcggctgggcatcagagggagaccgtggaaagtggaagacgggagagggggagggatttatatttttgtatgcaaaattttctttcagtctcattctatgaatggagtaaactcagattcagagaaatatacgtctatcacaagtt

SEQ ID NO: 9093 - DNA, 890 bp, Artificial sequence
  DNA replication origin
tctgccccgccgccccgtctgggatgtgaagagcgcctctgcctggccgcgaccccatctgggaggtgaggagcgtctctgcccagcagccccgtctgagaagtgaggagaccctccgcccggcagccgccccttctgagaagtgaggagcccctccgcctggcagccaccccgtctgggaagtgaggagcgtctccgcctggcagccaccccgtccgggagggaggtgggggtcagcccccaccaggacagccgccccgtccaggagagaggtgggggtcagcccccgcccggccagccgccccgtccaggagggaggtgggggtcagcccccgcgcggccagccgccccgtccgggagggaggtgggggggtcagcccccgcccggccagctgccccgtccgggaggtgaggggcgcctctgcccggccgcccctactgggaagtgaggagcccctctgcccagccaccaccccgtctgggaggtgtacccaacagctcactgggaacgggccatgatgacaatggcggttttgtggaatagaaaagggggaaaggtggggaaaagattgagaaattggatggttgctgtgtctgtgtagaaagaagtagacatgggagacatttcattttttctgtactaagaaaaattcttctgccttgggatcctgttgatctatgaccttacccccaaccctgtgctctctgaaacatgtgctgtgtccactcagggttaaatggattaagggcggtgcaagatgtgctttgttaaacagatgcttgaaggcaacatgctcgttaagagtcatcaccactccctaatctcaagtacccagggacacaaacactgcggaaggccgcagggtcctctgcctaggaaaaccagagac

SEQ ID NO: 9094 - DNA, 1257 bp, Artificial sequence
  DNA replication origin
tcatagatcaacaggatcccaaggcagaagaatttttcttagtacagaaaaaatgaaatgtctcccatgtctacttctttctacacagacacagcaaccatccaatttctcaatcttttccccacctttcccccttttctattccacaaaaccgccattgtcatcatggcccgttcccagtgagctgttgggtacacctcccagacggggtggtggctgggcagaggggctcctcacttcccagtaggggcggccgggcagaggcgcccctcacctcccggacggggcagctggccgggcgggggctgacccccccacctccctcccggacggggcggctggccgcgcgggggctgacccccacctccctcctggacggggcggctggccgggcgggggctgacccccacctctctcctggacggggcggctgtcctggtgggggctgacccccacctccctcccggacggggtggctgccaggcggagacgctcctcacttcccagacggggtggctgccaggcggaggggctcctcacttctcagaaggggcggctgccgggcggagggtctcctcacttctcagacggggctgctgggcagagacgctcctcacctcccagatggggtcgcggccaggcagaggcgctcttcacatcccagacggggcggcggggcagaggcactccccacatctcagatgatgggcggccgggcagagacgctcctcacttcctagatggatggcggccgggaagaggcgctcctcacttcctagatgggatggcggccgggcagagacgctcctcactttccagactgggcagccaggcagaggggctcctcacatcccagacgatgggcagccaggcagagacgctcctcacttcccagacggggtggcggccgggcagaggctgcaatctcggcactttgggaggccaaggcaggcagctgggaggtggaggttgtagcgagccgagatcacgccactgcactccagcctgggcactattgagcactgagcgaacgagactccgtctgcaatcccggcacctcgggaggctgaggctggcggatcactcgcggttaggagctggtgaccagcccggccaacacagcgaaaccccgtctccaccaaaaaaacacaaaaaccagtcaggcatggcggtgcgtgcctgcaatcgcaggcactcagcaggctgaggcaggagaatcaggcagggaggttgcagtgagccgagatggcagcagta

SEQ ID NO: 9095 - DNA, 1297 bp, Artificial sequence
  DNA replication origin
agatcaaagggatgaggggctgagaatgggtcaccagacttgacttctcaaaaagtaactgttttagagtgcatgctcaatacagttggggggaggcccactgtcacggggttgaggagggaggagtaggcaaggggtgtggactccccatttaacaaggtcgacagtaagagaaaagaagatgccactcaactcctcactttcgatctgctgtaatttaacttgagcctgaacagtcaatattcctttgggattcatattagctccctgagcatgacattgtctttctctttattacattttcttattccttaagattttaagattttcttaattggatccatttctcttcatgcaccatcaatggccaagaaatgggctattggcaggcacagttttggttttggggttgattggtttgtttacactaatagtttctctttctcgatccaaggcttgaccaaggaggtcaggaattctgtcctgggagttcagggactgaggaccaggatggaggaagcaaaaggcgtcaggcattaggctggaaacgtcttggtcggttatctaggatcaaagagtcaaaggtagcgatgacttcatccccgtagagggcgcctccctaccccgacagtggattttcggtcagccggtttgcccgggatgttttctttgactacttgcttctcactggcgccccaagtcactttgaagaaaaaaaaaatgtgattaaatcgattcccctgtttctttctgtgaggagtgtgcctttcccagacagcgtgcgttcattcgatgaggcctggcaaaatttttgaggggtctttttacgctttaatacaacctaaaggtttctgttaccatcatcattgagaattaaaaacaaaaacaaaataaaaaacggtaacaaatttacagcttggcaggccccagggaggagctgacctttgcgaagctctagcgcagccaggtttcagctgtaggggttgggacaggtcagttcgcccaagtgctgctagctctccagggagaagcaagtgttggggcagagggtggtctggcgcgtgcgtcggggggcgtgtgcgggtgtgtgtgtgtgtgtgcgcgcgtgtatataagagtgtgtgcgcgcccgtgtgcacaagagagggtgcctgggaggctgtcgcaaaggctcctttgtgaaaggcacttgcaggttcagaagccagcttggcgcctcctctcgcccgttccccgaggacacctggctcttctgggcagcccagctatctccgtctcctgccgcccctacttctct

SEQ ID NO: 9096 - DNA, 1202 bp, Artificial sequence
  DNA replication origin
cagcgtgctaaacccccgcagaggggctggcgccctggggggcgtggcgtggggagcgtgggctttccagcgtgggcccctcggggaggggggcggggccgagaccccctccaactggaggggccgggaatgggcgagcgggtgcggcggccgacccagcagctgcagccgccggacgggagagcggtcggcgctgcggaaggccgagggtcgtgcaacgcccgcgctgggcgcccgccccgcagtccccgccccgcaggccgcggcttctctccccgccgcagagctggcgcggcgcgtgtgggcgtcgatctcagcgcgcaccggcgccccaccctcgcgccgcgacgcccttctgcccggcgctgataaggacgcagctggggctccgcgcggcccgtgggccgcccactcgcgttcagtttgctgaccccagcgcggctccccggggattcgcggcccagccggtggcggctgagccggtggcttgttggtgagtggctcgggcggggaccggggtgccgggttggggatgtaaggaggctgcggacagctgtctaacgcagagagctggtgaactactacgtatccaaacttgaaagaagtggtgtcccaggaccccccaggccgaatttcttccggacttaatggtcggttttcaaacttccgtgtggacagaaacgacctccgggattcggccgtctgtgacccccttcaactgacccacagttgtcttcctggaaggagcagccggcgctcccttccctctctctagagcatcctttggcacgcatgtgcttttttttttttttttcttggttttgggacagtgagagaaactgaaaatgaacattcaaatacaggcgtttttcctctgctctcgggtgttggtctcgggcgcctatgaatatttacattgtgctgcagattgaaggcgcttactgggaacgcgttgtcctgggttctttcactactgcctggagcacaggcagacggaactcacagaagagctggacggtccggctctggcccgactgcgtaattgtaccgactgacattctgtgtttaataatcaagaaagcttttgaaagataagtggtggtggaggagccttttcccgaattagtggagtgggagtaaaaattccatagtttagaattgtccgtactttccccatccttttcttctctcccaaatacaat

SEQ ID NO: 9097 - DNA, 1231 bp, Artificial sequence
  DNA replication origin
gggagggagttgaggctggaacagcacaatggagcgttctggggtgactggttcttttggttacatgggcgttcaccttattatgactcattaagttctacttttattttggaaggtttctatatgttttattttacaataaaaagtaaaagaggagcagagaaatacagaaagaaagtgattttgatggtggtggtgattgaggcagtggtggtgatggcagtggtgatgctattggtggtgggggtggtggtggtagtgatgctggtggtggtggtggggtggtaatggtggtggtagtgatatggtagtggtagtggtggtggtgatggtggtgatggtagtggtggtggtggtggtggtagtgatagtgatatggtagtggtagtggtggtggtgatggtggtgatggtagtggtggtggtggtggtggtagtgatagtgatatggtagtggtagtggtggtggtgatggtggtgatggtagtggtggtggtggtggtggtagtgatagtgatatggtggtgatggtggtggtgggggtggtgatggtggtaatggtgatggtggtggtggtgatggtggtggtgatggtgttgatggtggtggtgggggtggtgatggtggtgatggtagtggtggtggtggtagtgatatggtggtgatggtggtggtgatggtggtgatggtggtggtgggggtggtgatggtggtaatggtgatggtggtgttggtgatggtggtgatggtagtgatggtggtggtgatggtgttgatggtggtgggggggtggtgatgttggtgatggtgatggtggtggtgaaggtggtggtgatggtgatgctggtggtggtagtggtgatggtggtggtggtgatggtggtggtggtggtgggggtggtgatggtggtaatggtgatggtggtggtggtggtggtgatggtggtgatggtggtggtgatggtggtgatggtggtggtggtggtgatggtggtgatgctggtggtggtggtggtgatggtggtggtggtggtgatggtggtggtggtgatggtggtagtggtatggtggtggtgatggtggtggtggtagtggttatggtggaggtagtggtatgttggtggtggtggtaatggtggtggtgatgctgatggtggtgatggcagtggtgacagtagtggtggtgggggtaatggtggcagttgtggtgatggtggtagtggtggtggtga

SEQ ID NO: 9098 - DNA, 1099 bp, Artificial sequence
  DNA replication origin
gcccttgaaagtagactcatgctttttcaagctttgtattctcagccttgtgacagatgaaggaagggaggaaggtaaggaaggaaggatggagggaggaaggaaggaaggaaagaagaaaagaaggaaggaaagagtgaggaagggagggagggaggaaataaggaaggaaggaaagaagaaaaggaaggaaagagcgaggaaggaagggagggagggaggaaatgaaggaaggaaggaaagcgcgaggaaagaagagagagaggaaggaagggaaggaggaaggaaggaaggagggaggaaggaagggagggagggagagggagaaaaggaacgaaagagtgaggaaggaaggaaagagggaggaagggaggaaggaaggaagggagagaggaaggaaggaaagaaggaaggaaagagcaaggaaggaaggaaagagcgaggaagggagggaggaaggaaggaaggaaagaaagagagagagaggaagggtccctactccaacttcttttacggagtaaaaaggcctaaagagacagtcatgacttatcatttgcaggactgattgtatcatacttgactcatttgttaacattcacttgaaggaaacgcagagattttttttcttcgctcacattcaggagctgtgcttgcttataatgaactgtcatgatggaggccggcccgtttcagctctctcagccccgtcaagctgaactcacttcccctgaaaggacagtgtttgcatttgtgtttacgggactggggaagaggatgcgttttcaggagacctgaaaaccgagccaacccccttttcctgccccgctgtgctgcgattggcccatcttggaggctggctgcaggagcctttagtcatcgcacagggaaatctttctggaaccgggcaccaacttgcgtgtttgttttcatgctctttgtgcggggattagctgtcgtgccgggcctgaaaatgctgcgagcgccgggcgacatctaatccaggatttgcctctgcctcgcggttgatggaaaacagatgtcttactgctctgggcctgagcacagaatggaaatgaccgaccagagagccatttggagc

SEQ ID NO: 9099 - DNA, 979 bp, Artificial sequence
  DNA replication origin
cctgagcccctcccgggcgacagcagggcagcaggacctggaagacgcccagcaggaggttcacggccgccgcggtgcggcagtagcagccgggctgcgggcgtcggagccccgccatgctgctgctcgcgctcctctccgttgctcgccgcgctcgccgctagctcgctggcgccccagctgcctcgccccgggcccgcccccgtgccgccccgccccgccccgccccgccccgccccgccccgcgccgcaccacccccgccgctgccgcagctgctgcagctccagacccgggcgcgccgcttgctctgagcgcgtgtgcgccgcagatagggagggacggaacgcggcggggtgcgggggaaagtggacaatgcgaacccgcgggtgccccgccccggcgcggagcacatggccgcgggcccgccccgcagcgcgcactctgcggggcccgggcgctttcctcggctgggacggggtcgcttagagctgtccgcggggactagcggcccacttttgccaagtgcattttcatgaacttttgggtggttgccgctttgtcgaggcgcttgggccacggtcgagagattaccctcgagggaagaggtggcggtggaggtgggaacgaggagtcgccaagcgagaggccttggacacaggatattagtggaaataatgcagtggttgtcaggaaacgcgagtgcagccacatggccactgccagttatgcagcgaggatatccggtggctgcaaagtctgtaatttagaataaaaagagctctcccaaaacccgagaggcagacctcagcgccgcgtggcggtagtgcgcccggcaccctctgtggacactgtccaggtcctgacaggtggggaagactcttcctaggggatttatagcttcaaagaccctgcaaatactcccttttggaatcatattgcaaaattcagccagcctctcctgaaatatggttggggtcg

SEQ ID NO: 9100 - DNA, 1524 bp, Artificial sequence
  DNA replication origin
ggcgagcaacggagaggagcgcgagcagcagcatggcggggctccgacgcccgcagcccggctgctactgccgcaccgcggcggccgtgaacctcctgctgggcgtcttccaggtcctgctgccctgctgtcgcccgggaggggctcagggacaaggtcagccttgcgccgctgggctcgctctgcctctccaccccgcccccgctctttcttttagggaactgctgaaatctataagagggcgaggggaggaaagggaaaggggcaggaggaggaaggaaagctgttgcgattctccgctgataacattttctgaccacagcgtcccgtcccgcgcctctctgccccgtacagctggagagcggggcagtcgcggggcttggggaccgctagccgctcgcgccctggagcctttgtgcgcgggcccctgcgccccgggcgcagcccccgctttgtgtggcgcgcgcgggtgccccgcagcggcccggcttcctgcagctttgttcccccgagcctggccgcccagggtccacactccagatgctcgggctgcggagcccggagtgcctcgtggggtgtcttcactcccacttcgtccccccacccccagcacgagcaccccgagcctgcctgcacgctgtcgccttcgcgtccgaggggccgccggctcacaccccacccattgtatttttatccttggctcgcccctgggatggcctctgttcccaggaggaaaaagagacgtgttttggtgaggcggggggcacggagggacggtaggggaaacaggaagcgtttctttagcgtgcattaaaaacgtggtgtattttttggtgttcctgcagcgattgagccgttgccgaacgtggtggagctgtggcaggcagaagaaggggaactcctgctgcccactcaggtgaggacgaccaggtgacagggcggctgtgggtgtacgagggaggagaggcggggaggcccccggtcctccccaccccctgtccaagcggcacaggcgttcgggccactttgcaaggcaaataaacgttaggggccgagcctgaacacctggcaacggtggccttcccggctcctcccacgccatgtgacagggcctgaggcaggccggccccaagttcagaaggtgggaacccaggccacctcagcagggaagcggccagcggtctgttcggccgtgggtgtcctgggtgcacactgttccctaagtgagctggtgctgtgtggatggcaagtggctaagaggttgaggacaacaggagtattgatttcataaatgttagagtggtatttgccattagcgttaagtagctttgggatggagatgtgactctcaaggattgtcatcttggattttctccaagtgcccttaattcctgttaaaatacacccacttaagaacttgaatttctggtttttttctctgtatgatgatatgatgattgcgtgtagaaaaataattactgacgttttattgggaatctgtagcatcatagagggtttattgct

SEQ ID NO: 9101 - DNA, 1320 bp, Artificial sequence
  DNA replication origin
aaagtgcaattaggagccattggagcattttctattttttgagacaggatctcacactgtcacccaggctggagtgcagtggcacaatcatggctcactgcatccttgagctcctgggctcaaacgatctttccacctcagaccctgagaatagctgggactacaggtgtgcaccaaccatgcccagctaagagactgggttttaccaagttgttcaggctggtcttgaactcctggcctcaagcgatcagcccgccttggcctcccaaagtgctgggattacaggtgtgagctattgagcccagcccattggagctttttaagtgagaaagaacgttatctgacttaaattttttgaaaatcagctggcggttgagtggagaaaggattctgggagttcaggagtaacgtaacaccaaatcaaggtcagctgcaactgtggagatgatggaggttgggcttgttatatgtgcacattcaggctggcggggtggggttgacggggagtaggaaggcaagaaattctggttgggccttgagacctgggtcccggactgagaggaagctcttatggttaggatctggtgggaggcaggggatggagaattgtggctggacatgttccgtgtgaaaggcccagcatatccatgtggataggcagtcaggcagtccacccacaaacctgaagctctgtgaagttccgggctggagacatcaatggggcgcctttggtctgttgacagtgtctaaagcgagggtgggagggagcctcttggggaggagcatttgggggcccagtgttgagaggcggggcaggagaggcagctgcgggaattaggaaggaaggctcgctgatgagggagcagaagccatgaaggggagggagaggtcacatgtgtcggtgccacagactgagtcacgtggacaaggagcgggtgtgcatgctggggtggtgtcggcggctggcgtccttgcagccagcccagctagagtaagtggaagagaggacagaaggtgagatggatgcagaggcggccaactgtaaaggggagctgaaaaggtcagtcgccggaggggatgtgaagctggcagtaggagactgctaggcgccaggaaccaaggctcaagcttaggtctaagcatgaactggagcaggaacgcttcgccctttggaatgtgtgtggacaagaatgtgagcaggtgggtttcatgatgggaagagacgctttagctgcgtgcctgcttctcagcttgcagactatttttctgcctcccctgtacccaggtgggactgcgttgcatgtgagcagaagtgatagg

SEQ ID NO: 9102 - DNA, 894 bp, Artificial sequence
  DNA replication origin
aggtgcagccgaacgggagcccgggttccccagagcccgtgaccgggctgcggctcccctccgcccctgcccgacccgaccccaggaaggggtgcagagagaccacacgagtggggagcgcacgacgtacctgggagaactccgagcagtcacctgagagaacgccgagcagccgcctggctgcgctttctcgctgcctccgagccggcctgcccgggactaggaagtaagcaaaagggaaagtccgcgcggccgggcgccccctccttctggggtgcgggaaccgccccttccacggggcacgtgcgccgctgcgcagccggagggaactctggacctcgcgctgagttccaggcaggtggccccgagcgagcccccgcggccgtgcttcccagcaggctcccgcccttgaccgtgagctaggctgcgacaggccagaggcgggtcctgccccgacagctgccccgtgcaaggctgggtcgaagaagagagctgggggcttggcggaggttccaggtcagagaaaagcgaatcgagacgctagaggcggcctgcgtgggattggcaaccacagggaaagctaagtgcccaaccagtattttcttgaagcttcgggcatccaggacctcacatcacctgaaacacaccgtctttaaattccactcctgatgcttttccatccatggaagcccgaactcaggctcatgaatcgtgcttctcctttccccacttttccacactctattcacctgccagtacatctccagggtccgcttccacccaaaagtctatgccctcctgcattaaaataggttcaccctccagactaacacagaacgattttgcctaagggagcagataaggacagccccggatttttttccccaatccagt

SEQ ID NO: 9103 - DNA, 1264 bp, Artificial sequence
  DNA replication origin
gagccattgcaccaaatacttaagatctatgatattactagcataaggtttcaatatgattttaataggtgctctatttcactgagttccagtcagaagggaccttctgaacatcatggtttaaatgggttgtgggctagctcctgaaatgtgttgtcatttacatcacttctatggtgaaccaccttctgcacttgaagcaactgatattcaagggctgtctgtgctgccacctactccaccaggtgtgatcctgccccaggggggagtaggcaggggtgagctacgtgggggaccaggcagaggtgagctacgtgggggagtgggcaggggtgagctacgtgggggagcgggcaggggtgagctgtgtgggggagcgggcaggggtgagctgcgtgggggagcgggcaggggtaggctgcgtgggggagcgggcaggggtgagctgcgtgggggagcgggcaggggtgagctgcgtgggggagtgggcaggggtgaactgcgtgggggagtgggcaggggtgagttaagtggagacagaaacttgcatgggctgcagaagttggctgaaattactgtgaggctgtgtggcctcaaaaggaagccagagaaggcttttggcgtctttctgccacagtgactcttgagccatgggttcttttcatttgtcagtactgagcagtttagatcattgctcagggcagccagatcaaggcggaagtttatgttgctaaaagtggtgatggtggagaaacaggcaagctctgagagggtcccctctactaggcccccaacacctgccagtaccagaatatggttccttgaactccgcacacactggtgacccatttccctgccttaaggggcctctctcaaacttccgccagcattagagatgttttaggactaataacctttaaactgcagggtttctctgtgcaaagcggtttgttgaattaatgaagccatagcatgctgttgggagcaggagctttgcagccaagtagttctttggtctgatccaaggctttgctgcttactgcccatgggactttggtcaatttacttggcattccttcctatgattgcctaatttataacatgaggataacactagctcctaaagttgttctgaaggttgtgtgagctaatgtattgatgtttattgacttggcacactaaatgctcaatatgtcatatcactgttatggatgtgttcagttttccaaatctcaagccccacttctcctgccattttcctgct

SEQ ID NO: 9104 - DNA, 1398 bp, Artificial sequence
  DNA replication origin
taacaaaaccggggttcccgccacacgcacccggtagggctcaagacgctttatcggcgacaatggctggctgaatgggaggcctgaggttctgaaggaaccggggtgctggcgaccgggacctcgaggccgctgctggggaggacgctggccagcgtgcagggggcggaggcggggcgtgccgggaggctcccatctcccgccccgcacaacccgggcagggccgccgctccgccgccgccgcagatccggctctcaccctcggctcccgaggccccgcggcgcctccttctgcggactctgcgggaccctccccggcaggcgctgtgccctggagaaggcacagtggctcaggcatggccgcggggacggcggcgcggaaggcagcgccggtgctggaggcccccccgcagcaggagcaggtactggcgcgggggcgcgggcgtgggggacgccaggccggggtcccggggctcacgctggtgccgggcaggctgcacagactggtctccaagaccccgggccccaccggggagaaccggccctggaaagacgtggggacggacgcatgaccttctggaagatgccaccgtgcggggtgccagtccctcctccactccctccctccccacttctgtgccctccccgctaccttcctttcctccttctgatcctcttccttcgctccatccctcttctcgcatcctcgcactttctcttccaggctcaccccttccactcccgccctcctttgtgaccgcctgtgccctcctccctcctcggcggaagcccccagagcccagggtcaaggtcgtaagctgcgagagaggggaaggggtgtactgcaggcttttggctagaccgccctggttctcaaactcgagtgtcatcagaatcactcggagggcctgttaccacgcagactgctggtctgtgcccagggtttctgattcaagatgtgtaccctgatcgtcagcttgtcttgcctggtgctcaacctagcccatttctgcttctgctggcgtcaattgcaaacccaatcttaatttattcttcgttcataggacaattcttcttaggctacatccaggtaccaggaggatttgggggtggaggagggtaggtcttacctggaggaacccaaatcccatccgtaaaacgaggacaaaaataactcttaagggcaaagataactcttaaacaacaacaaaaatcactcacagagcgggtaggaagagattaatgtcccaaaataggttcaggcaaagaactgtaggatttctgagaagggcttgctcctgactaacccccttctcctccaacccgtgagggcgtggcattcgagctgggtgttggggaatggacaggatctgacctcatgggccagagaattctaga

SEQ ID NO: 9105 - DNA, 1475 bp, Artificial sequence
  DNA replication origin
gagggagtggaggagggactggcaccccgcacggtggcatcttccagaaggtcatgcgtccgtccccacgtctttccagggccggttctccccggtggggcccggggtcttggagaccagtctgtgcagcctgcccggcaccagcgtgagccccgggaccccggcctggcgtcccccacgcccgcgcccccgcgccagtacctgctcctgctgcgggggggcctccagcaccggcgctgccttccgcgccgccgtccccgcggccatgcctgagccactgtgccttctccagggcacagcgcctgccggggagggtcccgcagagtccgcagaaggaggcgccgcggggcctcgggagccgagggtgagagccggatctgcggcggcggcggagcggcggccctgcccgggttgtgcggggcgggagatgggagcctcccggcacgccccgcctccgccccctgcacgctggccagcgtcctccccagcagcggcctcgaggtcccggtcgccagcaccccggttccttcagaacctcaggcctcccattcagccagccattgtcgccgataaagcgtcttgagccctaccgggtgcgtgtggcgggaaccccggttttgttaccgggcggcaggactggaggaggggtcagaggtgggtagggagagagaggggagtagaggagtgagaaatggcggtgggggggcgaggggtgctggggaggaagagaagagagagagagagtttcctctccctcagaggtgtttattaggaggcaggagttcgggtggctgtgcagatacagactttcctcagttatctgtgcttcctccaaagatgatgaaggagagaaactccaatctagggagagcgcagaccatcttggcccctatgctgctccaggccatgcagggcccctgcgacgcaagcatcttgcctttgcccctctacctccagggtctcccctcccgcctttacaacttaggcctaagcctggcttcaaggttgagaacaagctggaacgtttaggcaagcctttagaaatacctgggtgttgatttggggaaacagaaaagaggagcacagaattagatgatgtgtcctacgaaatacagcttacccctttccagtttgtgatggctcgtatttgtcaacacctacaaaggaggtgaacagaccaagatggacatttctctgccattgtggaacgtagagcctaacaggggatagagaaaaataagcatctaagtacaatttatcacggatggtgccttggttttccagccttaactgggcatcagaatcctatggaggaatgctgagtttgttaaaactcagagtgctggccaagcacagtggctgatgcctttaatcccagcactttgggaggacagggcgggcggattgcttgaacctaggagtttgagaccagcctaggcaacatggtgaagccccatctctataaaatatacaaa

SEQ ID NO: 9106 - DNA, 1251 bp, Artificial sequence
  DNA replication origin
gaggttttcattgctttgatggtttttgcacaggaactctccctccgttttctaaaaacttgggaatctcttttgcatgattttctccagctaatcaaaaccactcctaagttaaaaactgatagcaatagaaaagtgatttccagagattccctttatgccctcttcctcaagtatctgagcagttacaaccaatgttcaattttccacacactccgtgccagtcccggttttatttccaaaatctaaattgacaaaggacaaaaagacccttaaaaggttatctacttgtgcatcctggttttcctttctgtacaggaaatgttcctgtgactagaatcctgcccagtggtaggaaggtgcagaatgaggctgagcgaggggcctctggccagaatgctcaccacaaactcctccaccaaacaccacttccaacgctctgcgcagctccagtgctagcatctttaacaataatcgtgtatctatttttttttaaaccgccgttcagttcttcgtttttttagttttgttgtttttgtttgtttgttttatttttaaactgcccttaagtatagctggtacaactcgggaggagaatgcgcgagacttgggcggcgtgggaggggtgcctcaaatttgatacaggcttgttgtgatgacagaccaggtcaggcagaacttctgcccttcccgctactggcaccccaagcagggatgcactgggatgcgtggcaggggcgggatctcctgggagcgtctcagcccagcagggagtggggaagcaagagggaaggcttaccttcctcggtggctggcaggaggtggtcgctgctagcgagggggatgcaaaggtcgttgtcctgggggaaacggtcgcactcaagcatgtcgggccaggggaagccgaaggcggacatgaccggggcgcagcggtccttcacctgcacgcagagcgagtggcatggctggatggtctcgtctaggtcatcgaggcagacgggggcgaagagcgagcacaggaacttcttggtgtccgggtggcactgcttcatgaccagcgggatccaagcgccggcctgctccagcacctccttcatggtctcgtggcccagcaggttgggcagccgcatgttctggtattcgatgccgtggcacagctgcaggttggcagggatgggcttgcaattgctgcgcttgtaggagaagtcgggctggccaaagaggaagagcccgcgcgccgagcccaggcag

SEQ ID NO: 9107 - DNA, 1459 bp, Artificial sequence
  DNA replication origin
atgagtgggagagggtgtgtgtgtgtgtgtgtgtgtgtgtgtgtgtgtgtgtgtgtgtgttggggggctgcgtccctggtagccgcgtgtgccctgtgatggagcccgggacctgcccgcccgaggccgcctcggcgaacttcgttttccctcgaatctccagccaccgttcagcagcctgtcggtgtgctccccaatgccgtaaaaaaatcagaattataaatatattcgtatgagcagaactttacatggaaaacgaaatactaataaaatgggcttgttattctgttggagtgagtgcctaggaagggtttcgtcgttgtagaaacgcccctacaagagtctcaccagtcacacaggactgcccaccatttccccgttttggagagatttttccttcttaaatgaatggcatgactcaatactcgaaggcatcacgggctctaacacacagccgcccttgcagctgtgcgctctggaaagctggagtatgggcccccagggcactgtttgtaaagactggtggccggcacaaaagacgggcacaaaagatgggcaggctgggagggagcgaggtagaggaaggagtcctgcctagagatccacgagggctagaattagctcattcatcccctacgtaccagggggcaccatgctgggcgctggatgtgcagaaatgaacaaacaggccggcctctgctctcgtggagcctgggatctagtgtctctgactgcaaacagtaagttctgggttggggggtgggctccttttgcctaattgtccctagtctccctatggggacaggaggccttcgctctcctcagccgctgtctccgggtggctgtgaagatccaaagagataatccccggagggcgaagttctttcatatgtaaggtgggcgcattgttattacttcccgaccacttaagagtcattcacaggctcagaccccggcttcctaatttccctccttccggaagatgcgttggccttggcggctcccaggcccaagttatcaggcacactttgcggtccagctgcttagaggagccgggtaatgaatgaatgggtggcaaaagcccactcagtgttatctgctgaccgtaaacacgccaggaaaatcgtcatctggagagaatgcacattctgaactccaagaatctgcgtccctaagagcccagcttccgggtgctctgctggggaagggcccggggtagctgcaaaaggcctctctttccccaaattggttcagggccttttcgtctctaacgaaagcaccaagaggcctaaaagcccccttcccaacataaactactttgcaatgaaaccacaaaggaaacagaagcacaccaaaagaaagagctaataaagagcgtgagctctgagagatgctacgacttgggcctgggagtgggataagggccctctcgctttcacgcccccccaaccccccgccg

SEQ ID NO: 9108 - DNA, 1770 bp, Artificial sequence
  DNA replication origin
ccagttgcgctaccggactccggggccactaccgtcaccgcttttgccaggctcctcgtcacccctggagcctctagatctggtgctgctgcggcgcttggaccgagaggaggcggcggcgcaccggctgcagatcgaggcatgggacggcggccgaccccggcgcaccggcctcctgagcgtggagctgcgcgtgctggatgagaacgacaacccgccggtctttgagcaggacgagtaccgcgccgcggtgcgcgaggacgcccagccgggcgccgaggtctgtcgcgtgcgcgccaccgaccgcgacctggggcccaatggcttcgtgcgctacagcgtccgcgcccggcaagtgcctggggcgggtagcggcggcggggcactgggcgacgcggcctacttcgcggtggaggagctgagcggcgtggtgcgagtgtggagacctctggaccgcgaggcacaggcctggcaccagttggtggtggaggcccgcgatggaggcgccgagcctgaggttgccacggtgcgcgtgtccatcgccgtgctggacgtgaatgacaaccggccagcaattcacgtgctctttctcacagagggaggcgtcgcccgtgtctctgaaggcgcccgaccgggcgactacgtggctcgcgtctcggtgtctgacgcggacggtgactgggagaaggaagatgaggccacaggggagcttggtgtgggtcttggagacgggagcatctctctgtccttggaaggcggagagggagacttcgcgttgctacccggcggccccccaggggtatttttcctttgcgtggaggggcccctggacagagagagccgcgatctgtatgagttactactggtggccacggacgcggggtccccgccgctgagcacggaggagacgctgctactccgggtcgctgacctcaatgaccaaccacctctcttcagccaacagcattacaaggcctcagtgtccgaggccgcggcccctggcactgtagtcatgtgggtcagcgcctccgatgccgacgaggcaggcagtgatcacgcctggctgcgctacactgtagtccaactctcggctccctgcaatctcggctccctgcaatcaaagatggtccacaccgcagagtgtggaccatcttttgccattgattccgaaagcggtgcgatcagcactatccggactctagaccgagaggtccaggaggcggtggagctgaaagtggtggcccaggacctcggagagcccccactctctgccacctgcctggtgagcatcaccgtagatgatgtgaatgacaatgagcccatcttctggaggcaggtgtacaatgccaccattgcagagcatgccccggttggacactgctttctgcaggtgagtgcatcaggcctgtgggccaacctgaaggcttgggaagggatggagagggttgtgagttggcctaggaaattgtgatgtggaggataatattccggctctcaaatacaagactggcggtagtgccccctctacagtgagatgaatgatgccctctagtcacctaacttttttttgccagggtcttggctacatgatctctaaggtcctttcaacttgacttttagatcttgatttatcttattgaagcctgatttctttcctgctggatgtatgcacctaaataggttcaggaggaactgcccattctaaatcagacctcttccaactgacaatgtctcacatcatatcatataaatacatgtatacacacacac

SEQ ID NO: 9109 - DNA, 1683 bp, Artificial sequence
  DNA replication origin
ctgtccttccgctgcggacgggagtccctctcgccaaatggagaacacaagtttggcaccccaaagtgatgataacctctaccctcttggctcagcgcgagccaagagtcaggcctgcagagggacggtcaagcggatggagggggaggccgcggagaggccgctcctctcacctccccgcacccatcatcacttggcacttggccaagcccaggcagacgccccgcctgcgcgtcccccacccgccccgcggtgcacgtctcccagtgcttttgcatttgctcctcttccgccctgctgcagagcgcggctcgcaggttggagtttgccctcgtgtgcgccgcatcacacggcagggaggggaaggcaggcggcggaggctgggtcggagcaggagtcgcgcggtccctggcgcccggagacacagtggggaaccaccgccccgcccccggagcagcggacagggccgcagacctcccttcccccctccctctctccctcctccccagcgccctgactccctgcctccacgcccttactccaccccctactccggccagatccccatcctctccttgtgtgtgcgcgcttcatataatctcctcctttttggcaaaagaaataatgcacctgactttaccaggggggaacaaccagccgagtagaacaaggaacagatgtaaagggaataaaaggagagagaaaaagagatgagattcgtttaaagaaatccaggggcagaagaggtggctgccgcggcagaggcagctagagcttacttccctgtctgcgtgagctgcaggcagaggacgctttcaccagttgcagatgtaacctcgggaattcctgggccgtcggtttgtttgccaaacaaagtcttttcttctctggctcagacactgaagaggctcctggatttttctgcgatcctgccacaagctggcagttacccgagagccttcccaaggagctggaggagaaatgagcccttgtgggcggaagatgggcgaagggcgtcagcagcggcgggctccggtcgggaagctccttctgctccccgggaggagagatacaccccatgggcggtcaggcagcagcggcgccaggacgcagcgctccctgctctggctcttggtgcacgtgtggctgtgggcggcctcgggctcctctgcccagttgttcaacctcaccctttccgtagatgaggggcttcccccggacacgctggtaggtgacatccgcgccgggctgccggccgcgcagcagcaggaggggagcggcttctttctgtcggaggactccgatgactccccgctgctggacgacttccacgtgcacccggacaccggcatcatccgcactgcgcggcgcctggaccgcgagcggcgggaccactacagcttcgtcgccgccacgctgctgggcgctgtggtgcaggtggagattcgcgtcaacgacgtgaatgaccactcgccccgctttcccctcgactccctgcaactcgacgtctccgagctcagcccgccagggaccgccttccgcctgccagttgcccacgatccggacgccggactgttcagcactcagggctacaccctggtgcaaccgtccgacctgcccaaggaccccgcaggcccgttcttccagttgcgctaccggactccggggccactaccgtcaccg

SEQ ID NO: 9110 - DNA, 1220 bp, Artificial sequence
  DNA replication origin
gcgagggcgccttctggccggatgctgccggggcaggaagcagcgtctcggacacttgccctcccactgctcgacggggctggggaaggacgagggtgaaccccgcagccaccgccgccagcccccactgtgtattcggcgtgagagtgagccgggcactatccagccgttagcagtggtctggtagtgaccccgtttcccctttcccctcctcaccccttcgggtcttcaaatgttggtcctaaatcccggggcccaacgaccaaaaaccgccgccaccgtttaggggaccagtcggtcagagcgagggggggtcgtcgcagggggagggtagcccaccgggaccgctcgcgctggtcctcgtgtctccactcgtttcccagcgcgcagcgcgcgcggtggcctaagcagccccacgaggagtggtgcctcatccaatcagggattagcttcggggcggggcgaggaggagagagtggggctaaagtttaaatgaggctcttgggctagtcaaagtgcttggagtgacaggcatttcgagcaattggggtgaagagagcgatttttagggtgtgggtgggcacggaataataaatgaaggtcctaggtgcattgtttaggtgtttgaagacgagggctgcagtgtgaaattccgcacttaagggaaaacatagatgcatcgtaatggttctttttcttgtttgatgtagttttcttgtaaactgctagtttggcgcaaaacaaccacatatatccggtggacctttgaaattaagggctagggggaggtgggttataaagctaaaagatggatttgcaaataggactagaagtataaagtataagtggtttaaatgacaatgactaagaaaatgggttagatgaggagaactagcgataggcttgacgctaccactaatcagcttgcagggacatttggcagaggcgaactgccgaactgggttctatgctcttgtaaaaccaactttcacagatagggttgtttggcattcggtatgcataacttcagttttgcttcctttgaagacagctcgaaattaaatgcagacaaggaaagaaaaaaccacctttaggaaccaactatttatgtatagataatattagattcatggaatattagacaataaagaacctagctcatgttgattctctaattaacaaggaacttcatgcccagaatattcaccgagtaacacaga

SEQ ID NO: 9111 - DNA, 1092 bp, Artificial sequence
  DNA replication origin
ccggctgccttctctgggcagcccagcgatcgcagcttttgctgtggaggaggacgcgcctcttacccacgccgcagccggccgggtgaagttgccctgaagcccgccaccgcctccagccctgctgcctccggggtccaggcatcccccagctgcgcccgctcgcttgcctgccggcgcgccggaggccgcagcgctgcacgcggctgatgggctctggggcccaggcgccctggccgtgggagaccagcggccccggcgcgccccgcgcgttctcacggcccggccccgcgagctcagcagccggcgcggcgctgctcggcgcccacccccgtctgtgctcctccctcgggcgccgcgggtcccccgggccctgggccggcccctcgggcgtcctctcctttcctctcgctcctccccagcgtgggaacccgatgctggcttcccagggctgggcaactgggagcgtaccgaaggtttctcaggagaggaaggagacccagcccaagcgggggtcccggaagagggaccgcctgtctgaagaaccccgacccgcgtggggatgcagcgaccacttacttggtggcttcgcacacctcggggctgtgcttccggatctctagcagctccagggcgcgcctcgcaaatccgcactgcgaatggagaaagagagcaggcgtcaggggtggcaggcagtgagcgggagaggggaccctgcagtggcacctgtcggtccccgcgcgagtgcaccctgggcactcgcggcagcggcacttacgcttgggtcgctcatgtctacctgttcaacaggctaggcgggacgcggcgtgcctcggaaactgtatcgcccgcgtggctcccagacagtcctccttgcctttgtctctctgtgtctgtgtctccctctttgatcaccccaaaggaacccttgcagttcctttccataaggcattcgattttttcagacctctgcccgcctcctccccttctccgcaccgaaagactgaaaaagaaagtagcagccaaaacgcaccatggtgagatcacgcccggctggggtctctaagctcctccaggcgctccctcccccac

SEQ ID NO: 9112 - DNA, 959 bp, Artificial sequence
  DNA replication origin
tcttcccaccctcctcacctgtcaccgctccgggagaggctgggcatcgggggcagcgcggggacgcgaacccggagccttcccttccgctggcgctcagcctcccacactggtggggccggccagagccgggaagaccccacgcctccgccgcacctccccttcccgagctcaggaagctgcggtgtggagcggcaaacccgcctgggaagcaaaggcaccgatcgcccccgccacgactcgcggcgttcccacctcccctgactgggcgcgggcaaggagtgaggctgctcccgtggccggcagtgagcgcccagggcccccgagccaagctccggctgcgcggccagttccctcgctgccaggccggccgaggaggggtgaggttcgggccgcacccggctgagagcacttaccatggtgtctgcaccgggagccggggaggcagcccccacgcagaggtacggccgaagggacccaggcagaggcggcagcggctacagcgcaaccgggccggggaggcagcatcgagctggagcgagaacagccgccttggcccgccctgattgccacctcttcccagccaatggcgagtcgagccgcagggggctggtcggtgctccccagttcttcaaccaatcagggacagaggagggaattcggatgctctcaatgctgctgcgctccagtgccttcccgcccccgcctggtgacaaggccttcatttgaggccataacaatgacagtggagaagccccagccgtgctccttgcatgaattctggagcagaggaaatgcagctcttgtggacccactaaatgtattattattcagagatctgccctcagtggttaacacaagcaaaagggaacagggcgtgtttgttgtgtgagcgtgtacgtgtgtactttgcaatggacagaccttaaaaggaatatcctctgttgctggcatcctca

SEQ ID NO: 9113 - DNA, 1540 bp, Artificial sequence
  DNA replication origin
ggtttgtctcacagtggaggcaaggaattgcaacttttttctattattgtacaccttgaaggagaggttaattaaatcctgttgtggggtttgagggccggaatttaatttttggagttttatttaatgtcgggagcagattgggtaataaaatgtattttgagaataagacggccttttgaccttttagggtctagggctgtaaagtgtctcagggttgctgccaaacaagtcatgaactgggctggatttttatatttgatgaaaaagagcctaaacgctatctgatttgggataaagaaaaaggagcattaaccttgactatgcctttagctccagccacctttttaagagtaaattgctgggcaggtgggggagggctagtcacggaatgaaactgtaagccagacccggtgtgaggaggggaggtaataaaaggattatagggtggaggagcagaggctgaggaagaattgggaactagctcggcctggcgaggagcagcctgggaggaggggagaggtcagatgggtctgtagaaaaggaagattagaaagactcagcgacacttggggttgggactgaggggacaggcgggagggaaagaaggaagatttgggacgagttgcactgggcacagagactagggagggaccgatatgtaaaagaatgcctggacgtcaggcacctcagactgtttgcccattttatgacaagaattatttagatcttgcaggatggaaaaattgaaagtgccgttttctggctatttggaactactgtcgagtttgtattggggtcaagtggcattgcagaagaaaataaggcacttaggttttaggtcaggtgtgaattgaagaggttttaagtttttgagaacacaggccaaaggagaagaaggaggaatggagggtggaagtttgcctatagtgaaggaagcaagcccagagaaaagagagagtagagacatggagggaaggggttcgggggttcttaccttctagaaaagcgggaaaggggttggggcatggatataagggattggggcgcagagataagaggtcgggacgtggaaacaagggatggggcgcagagataagaggtcggggcatggaaataagggatcggggtgcagagataagaggttggggcacagaaataagggattggggtgcagagataagaggtcagggtgcaaaaataagcgattggggcacagagatataagaggttggggcacggaaataagggattggggcacagagaaacaaggttggggtacttacccctcctctggaaaagcaggacttgccgctaagagtgaaggagaagggtttgggggtttcttgccccccggaaaggtagagaaggggtagagacatggagagaaggggttggggtacttgccccttccccagaaaagcgagacttgccgctaagggtgaaggacaaaggcaggcgtccctgtgtggtctgacacctctgaaacatggttgaataatcagagaggcatccctgcaataattaaacaccaagggaa

SEQ ID NO: 9114 - DNA, 1083 bp, Artificial sequence
  DNA replication origin
tgaaaaagagcctaaacgccatctgatttgggataaagaaaaaggaacattaaccttgactatgcctttggctccagccacctttttaagagtaaattgctgggcaggtgggggagggctagtcacagaacaaaactgtaagcccgaccaggtatgaggaggggaggtgataaaaagattatagggtggagggcggaggctgaggaagaattgggacctagctcggcctggcgaggaggggagaggtcagatgggtctgtagaaaaggaagattacaaagactcagtgacacttggcgttgggactgaggggacaggtgggagggaaagtaggaagatttgggatgagttgcactgggtacagagactaggaagggactgatgtgtaaaagaatgcctggacgtcaggcacctcagaccgtttgcctgttttatgacaagaattatttagatcttgcaggatggaaaaattcaaagtgccactttctggctatttggaactactgtcgagtttgtattggggtcaagcggcattgcagaagaaaataaggcatttaggttttaggtcaggtgtgacttgaagaggttttaagtttttgagaacacaggccaagggagtagaaggaggaatggagggtggaaggttgcctatagtaaaggaagcaagcctagagaaaagagagagtagagaaacggagggaaggggttcaggggttcttaccttccagaaaagtgggaaaaggggttggggcacagagataagaggttggggtgcagaaataagggatggggtgcagaaataaggggtcagggcatggaaataaggggtcggggcatggaaataagggattggggcacagagatacgaggttggggtgtggaaataagggattggggttcttgccccctagaaaagcgggacttgccgctaagggtgaaagagaaggggttgaggggtacttgcccctgccccagaaaagtgggacttgccgctaagggtgaaagagaaggggttgaggggtacttgacccttccccaggaaagcagagaaggggtagagacaaggagagaaggggttggggta

SEQ ID NO: 9115 - DNA, 1423 bp, Artificial sequence
  DNA replication origin
tcccgctcctcagcccggagcgcagttggccccgggttcggagcgccgcagcacggattccggcacctggcttgagttttccgcgaccaaagttcaccttgttcgggctcgtcccccgctcctcaaagcctggggcaattcggccgctcggggtcaccgcggggctccggttgttccccgtcccctccccccacgcctcgggctccgcgctaacctcggggctacgcgcggcgtctccgcacggggtgaagagggaaggccggggcggccgggaggatccggcttgtcccctccccttctctaccttccccccgccgggcggcagacaggaggtgggggccgtgggccgagcccgggcggagcgcgcgcctggcgagcgggggcggctcagcggctctcccgcaggcggccgatggggcgggcgggggtcagcgcctctgggaggggcagccctgggacgcgtccgcgcgagcgggcttggccgcccactggctgtcaacaggtgctgcgcagacagggggtgctgcgggactcgctgtgggcaagaccccggtggcccaggagaggaacgcggccaaggcggcccctgctttcccttccacggaacacctctaaccccaaatacagagcacgatgggtggtgaagggtgctgcagaagtaagtgggaaagaacttcctgcagctctccttctcccgccccctgtcgcctgacttgtcattagtttccaggagggctccccactccctaaggtctttgctaggacccttggccagagtttcagaacagaaggaagaagggaaatgaattcaaaggctttcctccaatttccagctccgtaaagcaggacaaataaagcaaaagtaaaggcagccaaaataacatccatttaacaagtactatatttactgaatgcctactatgtcgggcactgtttagaggttggagccgtagcagtgaaaacagacaaaagtccctgccctcgtgaagcatacgtagtagttgggcagcattaagctaatagcaagctcttctgagaatggtgtctaagggactcagaatgatcctgcaaccttggactttcctacaatacagcctctaacaaaactaggctgccctgaacccctggtgatagaattgtttacatttacaccaaaaaggtcgagaaagaactgaaatctcttgtggcttgtgttcaggctgacttggagagagaggccgatgctttaagacctaaagttctcatgaggtagtctgaaatgaaacacacatgccaagcagggcttatggtggttccatgtctgctaaatatgtctgtgacaggatccaacgtgctttctttgtggagaagcagaaaatcattgtcaatgtgttaaaggcacaagcagagagtcagaaaagttgaattttaaaatgaagctatt

SEQ ID NO: 9116 - DNA, 926 bp, Artificial sequence
  DNA replication origin
ggccctctgcatctctccacccggagcgtctccgcgggcgccaccgcagcggggacccggctgccgctgccaggcgccccgcgcccctctcccgcgcagggcagcgcgcgtcctcccgggcacgccgcagtgctcctcgcgctccgccgccccgggcttgacccgctgtttccgcaaaggcgtctattcccgtcctcagaccaccgtcgccgccccaacccgcgtcccctcctcctaagtggagctcctggcacttacccggaggcgcccctgcccacaatcgccgggcgagatcgtggaggctccgggcccaggtggcagtggctgctaagggtgcagcgggcgccgagcgggggcagctgcgtcccagccgcccgcgccaccgccgagctcggctgacgcgcctgctcgggccgcggagcctgcgccgtggcgcgccgcggtcggggccgcagcggggacagcgcgggccgcgggggaacctggcgaccgcgggcgggggagggaagaggtgtcccgacagagcaacgtcacggcatcgtccccttcaggcattggaggggttaccgagcagaaatgtgtacccccctcactccttaggggactaaaggagttggggacgaagggcgggaatgatagtgtcggtacaaaaagaaaaaacctttcaaggagctgggattgcttggggtcagcttttgaccactagcaacaaacaacagagcaacaaatgaccttcttgggtcaaagcgaacaaaacacattttctgtcatttcaccatttgcctggaacccagacatccagcttaatctccgggtcttccaatttctaaaagcctgaactttctgagcaagcttaaattggtcaaaattactgacaatatagtcatacaggtaatactatgtttaacatctgttacataattaac

SEQ ID NO: 9117 - DNA, 914 bp, Artificial sequence
  DNA replication origin
cccgcccggccagccgccccgtctgggaggtgaggggcgcctctgcccggccgcccatactgggaagtgaggagcccctgtgcccggccagccgccccgtccgggagggaggtggggtcagccccccacccggccagccgccccgtccgggagggaggtgggggggtcatccccccgcccggccagcagccccgtccgggaaggaaggtgggggggggtcagcccccccacccggccagccgccccgtccgggaggtgaggggcgcctctgcccggccgcccctactgggaagtgaggagcccctctgcccggccagccgccccgtccgggagggaggttggggggtcagccccccgcccggccagccgccccgtccgggaggtgaggggcgcctctgccccgccgcccctcctgggaagtgaggaacccctctgccgggccaccaccccgtctgggaggtgtgcccaacagctcattgagaacgggccaggatgacaatggtggctttgtggaatagaaaggcgggaaaggtggggaaaagattgagaaatcggatggttgccgtgtctgtgtagaaagaagtagacatgggagacttttcattttgttctgcactaagaaaaattcctctgccttgggatcctgttgatctgtgaccttacccccaaccctgtgctctctgaaacatgtgctgtgtccactcagggttaaatggattaagggcggtgcaagatgtgctttgttaaacacatgcttgaaggcagcatgctcgttaagagtcatcaccaatccctaatctcaagtaatcagggacacaaacactgcggaaggccgcagggtcctctgcctaggaaaaccagagacctttgttcacttgtttatctgctgaccttccctccactattgtcccatg

SEQ ID NO: 9118 - DNA, 949 bp, Artificial sequence
  DNA replication origin
aaccgccccgtctgagaagtgaggagcccctccacccggcagccaccccgtctgagaagtgaggagcccctccgcccggcagccaccccgtctgggaagtgaggaacgtctccgcccggcagctgccctgtccgggagggaggtgggggtcagcccccgccaggccagccgccccgtccgggagggaggtggggggatcagccccccgcccggccagccgccccgtccgggagggaggtggggtgtcagccccccgcccggccagccgccccgtccgggcgggaggtggggggtcagccctccgcccggccagccgccccgtccgggagggaggtgggggggtcagccccccgcccggccagccgccccgtccgggagggaggtgagggggtcagccccccgcctggccagccgccccgtccgggaggtgaggggcgcctctgcccggccgcccctactgggaagtgaggagcccctctgcccggccaccaccccgtctgggaggtgtgcccaacagctcattgagaacgggccatgatgacaatggtggttttgtggaatagaaagcggggaaaggtggggaaaagattgagaagtcggatggttgcggtgtctgtgtggaaagaagtagacatgggagacttttcattttgttctgtactaagaaaaattcttctgccttgggatcctgttgatctgtgaccttaccccccaaccctgtgctctctgaaacatgtgctgtgtccactcagggttaaatggattaagggcagtgcaagatgtgctttgttaaacagatgcttgaaggcagcatgctggttaagagtcaacaccacaccctaatctcaagtacccacggacacaaacactgcggaaggcctcagggtcctctgcctaggaaaaccagagacctttgttcacttgtttatctgctgaccttccctccgct

SEQ ID NO: 9119 - DNA, 1451 bp, Artificial sequence
  DNA replication origin
ttctattccacaaaaccaccattgtcatcatggcccgttctcaatgagctgttgggcacacctcccagacggggtggtggccgggcagaggggctcctcacttcccagtaggggcggccgggcagaggcgcccctcacctcccggacggggcggctggccaggcggggggctgaccccctcacctccctcccggacggggcggctggccgggcggggggctgacccccccacctccctcccggacggggcggctggccgggcggagggctgaccccccacctcccgcccggacggggcggctggccgggcggggggctgacaccccacctccctcccggacggggcggctggccgggcggggggctgatccccccacctccctcccggacggggcggctggcctggcgggggctgacccccacctccctcccggacagggcagctgccgggcggagacgttcctcacttcccagacggggtggctgccgggcggaggggctcctcacttctcagacggggtggctgccgggtggaggggctcctcacttctcagacggggcggttgccgggcggagggtctcctcccttctcagatggggcggctgggcagagatgctcctcacctcccagacggggcagcggggcaaaggcgctccccatatctcagatgatgggtggccaggcagagacgctcctcacttcctagatgggatggtggccgggcagagacgctcctcactttccagaccgggcagccaggcagaggggcttctcacatcccagacgatgggcggccaggcagagatgctcctcacttcctagacggggtggcggccgggcagaggctgcactctgggcactttgggaggccaaggcaggcggctgggaggtggaggttgtagcgagccgagatcacgccactgcactccagcctgggcaccattgagcactgagtgaaccagacactgtctgcaatcccagcacctccggaggccgaggctggcggatcactcgcggttaggagctggagaccagcccggccaacacagcgaaaccccatctccaccaaaaaaatacgaaaaccagtcaggcgtggcagcgcgcgcctgcaatcgcaggcactcggcaggctgaggcaggagaatcaggcagggaggttgcagtgagccgagatggcagcagtacagcccagcttcggctcggcatcagagggactgttttttgtttttttgagacagggtcttactcagtttcccaggctggagtgcagtggcgcgatcatgactcactgcagcctcaacctgccgggctcaagcgattttcccacttcagcatcccgaatagctgggactacaagtgtgcaccaccacacccagctaatttataaattttttttatagagacggagtctcaccatgttgtccaggctggtctcaaactcctgggctca

SEQ ID NO: 9120 - DNA, 1017 bp, Artificial sequence
  DNA replication origin
tggagcagggtcggggccatgatgccgccgccgcagctccggccgtggcgctcggggggccggcggctcagcgcgcagccgggggcggcggccgcggtggcggggccatcgcggcggcgcggccgcccagccttgcgggagcgcggggccgctgcgactgagtaactctgctcggcgccggagccgccggctgccggtcatatgactgagccggcccgccaccgcctcgcgcgctgacagttatctcctgcgggaggagcccgcagccccacggcggcggcggcggcgcgggaggagcgcggcggccccggcggcggccattggcccggcggccgcccgccccgggctcacgtaaccccggcgggaggcgggaggtgggaggtgcggccaggagcgggcgggcggcccagtactccgggcacgcgggggacgcggacgggggcaggcgcggcacttaaaggggcccgaggggcgagggcggccgccggggcgcagctccgcgagtggcgtggggttcccacggagcctgggttctttcgcacagcgagcatgcagctaggccgatctttgttctttagagacaaagcccctgaacttgggtcctcgctttgttcaggtacaagagcccgttcacagaaggcgtatgctaggggggaaggcttggtacgcgcggtggccgcttcggtgggctgtgatttgaatcacatagcacccaaggttttgtcaggtttcctccatgtccaaattcgattcctccaggctttcacaaaatttaaactgtttatccaaatcatttgttctgtttggcgtcttgggccaccataccatggttatataagaagttgcatttgaaatattaagtcccccctttaaaacatacacacacacacacacacacacacacacacacacacacagaactcactacatagatttagaaacttaagatattttatagcaagggattgtttttcctaatacatatttaacagtcaatcaaggcatatcagcagcaga

SEQ ID NO: 9121 - DNA, 807 bp, Artificial sequence
  DNA replication origin
ctggccgcacctcccacctcccgcctcccgccggggttacgtgagcccggggcgggcggccgccgggccaatggccgccgccggggccgccgcgctcctcccgcgccgccgccgccgccgtggggctgcgggctcctcccgcaggagataactgtcagcgcgcgaggcggtggcgggccggctcagtcatatgaccggcagccggcggctccggcgccgagcagagttactcagtcgcagcggccccgcgctcccgcaaggctgggcggccgcgccgccgcgatggccccgccaccgcggccgccgcccccggctgcgcgctgagccgccggccccccgagcgccacggccggagctgcggcggcggcatcatggccccgaccctgctccagaagctcttcaacaaaaggggcagcagcggcagctccgcggcggcgtctgcccagggcagggctcctaaggaaggacccgcctttaggtgagggggcgccggggggcaattctggcgcgggacccgagttggcttcggtgctcgccggggaggggacgggtaggggaaagggaagggactgtccaggacggcgctgcctatcgccggcacctggtcccgggcttgtcagcgtggacgcgcctgatccgagtgtggctccggaccctccgtgacccttcctcccgctctttctccacaactcagggtccttccccatttcagagttctcttgtgttccttggggttcccgggcgtgcgctgtgcttggctgtggcgaccggagattctccggttattggggtgaaccccttccgggc

SEQ ID NO: 9122 - DNA, 1358 bp, Artificial sequence
  DNA replication origin
tcaacagcatcccaaggcagaagaatttttcttagtacagaacaaaatggagtctcctatatctacttctttctacacagccacagcaacaatctgatttctctatcttttctccgcatttcccccttttctattcgacaaaaccgccatcgtcatcatggcccgttctcaatgagctgttgggtacacctcccagacggggtggcggccaggcagaggggctcctcactccccagaaggggcggccaggcagaggcaccccccacctcccggacggggtggtggccgggcggaggcgccccccacctccctcccggacggggcggctggccggacgggggctgcccctcacctccctcccagatggggcagctgccgggcggagacgctcctcacttcccagacggggtggctgccaggcggaggggctcctcacttctcagacggggcggctgccgggcggaggggctcctcacttctcagacggggcggctgctgggcggaggggctcctcacttctcagatggggcggctgccgggcagaggggctcctcatttctcagacggggcggccaggcagagacgctcctcacctcccagacagggttgcggtggggcagaggcactccccacatctcagacaatgggcggccgggcagagactgggcagagacactcctcacttcctagactggatggcggccgggaagaggcgctcctcacttcccagactgggcagccaggcagaggggctcctcacatcccagacgatgggcggccaggcagagacgctcctcacttcccagacggggtggcggccaggcagaggctgcaatctcggcactttgggaggccaaggcaggcggctgggaggtggaggttgtagcgagccgagatcacgccactgcactccagcctgggcaacattgagcactgagtgaacgagactccgtctgcaatcccagcacctcgggaggccgaggctggcagatcactcgcggttaggagctggagaccagcccggccaacacagtgaaaccccgtctccaccaaaaaaatacgaaaaccagtcaggcgtggcggcacgcgcctgcaatcacaggcacttggcaggctgaggcaggagaatcaggcagggagcttgcagtgagcggagatggcagcagtacagtccagcttcggctcagcatcagagggagaccgtggaaagagagggagagggagaccgtggaaagagagggagagggagaccgtggaaagagagggagagggagaccgtggaaagagagagagagggagagggagaccgtggaaagagagggagagggagaccgtggaaagagagggagagggagacg

SEQ ID NO: 9123 - DNA, 866 bp, Artificial sequence
  DNA replication origin
ctgccccaccgcaaccctgtctgggaggtgaggagcgtctctgcctggccgccccgtctgagaaatgaggagcccctctgcccggcagccgccccatctgagaagtgaggagcccctccgcccagcagccgccccgtctgagaagtgaggagcccctccgcccggcagccgccccgtctgagaagtgaggagcccctccgcctggcagccaccccgtctgggaagtgaggagcgtctccgcccggcagctgccccatctgggagggaggtgaggggcagcccccgtccggccagccgccccgtccgggagggaggtggggggcgcctccgcccggccaccaccccgtccgggaggtggggggtgcctctgcctggccgccccttctggggagtgaggagcccctctgcctggccgccaccccgtctgggaggtgtacccaacagctcattgagaacgggccatgatgacgatggcggttttgtcgaatagaaaagggggaaatgcggagaaaagatagagaaatcagattgttgctgtggctgtgtagaaagaagtagatataggagactccattttgttctgtactaagaaaaattcttctgccttgggatgctgttgatctatgaccttacccccaaccgggtgctctctgaaacatgtgctgtgtccactcagggttaaatggattaagggcggtgcaagatgtgctttgttaaacagatgcttgaaggcagcatgctccttaagagtcatcaccactccctaatctcaagtacccagggacacaaatactgcggaaggccgcagggtcttctgcctaggaaaaccagagacctttgttcacttgtttatctgctgaccttcc

SEQ ID NO: 9124 - DNA, 1015 bp, Artificial sequence
  DNA replication origin
gcctctggggcttgttgctttgtgctgcaaccatggtgaggaatgagtgacagcgtgggggcgagtcggcggccgccgcatcatcggggggcggggcagccccgtcgcgccgggtcccgcctccccgctccccgcccgccagcggccgcgccctcgcgtctgagcggcaccttcggcggcgcccaggtgagcagcgctctggccgcaagtgggtcgcggagccctcggccgggctgtcgggtcccgcgcgcggcctggacccgaagagggggcgcaagtcctggtgccccggagagaagcgcagggctttcctcacgcagtgtcccccactgtctcacgccgcgccccctccccacacccgacgcgccctactaggagacccagccgcgtcgggtcgctgctccccgcccgctcctggcgccacgccgccgcccaggggctgaaagctaaccttgggcaaaagaccggcccaccagcccgggctgtactgggcattctttttgagcccaagagttgcgtccgagttgcttctgtggcgataaatcctcttaggatttattttgcttatttgtaatttgctgcaccctcccctgctttccaagcccactctggcacctcagacagtaaaatgaccacgaaattaggcagagaggtttcaacaccagacccactaccacccctagaccaacaaacactccagatttaaagttgatcactccttagcgacagaccaggatggcaagttctgtgacataatcagaaacatttattggtaggtctggctttgccttggacagaacaagcctcctcctctagatgctcaaatttccaaaccggacccacatggtgcagaaacaatacctcgtccttcaagatgtcaccgctcctgctgattccctcagctcccccccactccttgccccggccacgtagaggtgtgttaaggtcagcccaagcatcggggaccactctgctgttctggtcccagggatttatttttgtttgcccccacccc

SEQ ID NO: 9125 - DNA, 1661 bp, Artificial sequence
  DNA replication origin
ccctgggcggcggctgcgcaagcccctgagaggagggggcgaccctcagcgccgtgggggaggaggctccgcctgcccacagccctccccactgccactcgtacctccctaaaaataactcgggcccgctggggccaggaggagccgccactgtcccccgagtggagccggggaggcgtgtcgagccagggccggaggaagccggcggagcggcgaggaagaggaggaggaggaggaaggggagttccgcctgcgggccgcatcgcacggcagcctaggggcgccgcgaccctcccggctgcgtccagcccctcgcgcctgtaccgcgctctcggccgccgggcccagccgagccgcccccccgcgggccccgcgccgccgccgccgcggtttggctgattagtcgcgggcgggcgggcgggcgcagcgcgcagggcggaggcagcagcggcgctgggccgggaggaggccggccagggtgcggagcggccccggcccgctcccagaggggagatggcgtcctacgtagataacagcttccgccaggcggtgatgaagaatccccccgaaaggaccccccaggtgagaacgcggcggccgcctgcccttggccggatttctgcctcgcaggctgcgtcttcccctgtccccccacctccttcctgacacagttcgccccgagcaccccacttcttgcatcaggacccccaacttccaaaggcatcccacctccgagtcttttactccgcctatcctggttttatttttccctctccttgacattctgctccttaactcttccctccccatgactgacctttcccactatgttgcccagccgagagagagagagagagagagagagagagagagagagggagagacagagagagagagagagagagtgtgtgtgtgtgtgtgtatgtgtgtgaatgtgtgaattctctagctttccctctccccagccgccctccgtggcctctgaatctcaggggatggagtctcatctcccctcgggcagcgactcttgctccctctgactccagatccgttcctccccttgcaagtgacccttggagttcagtggtgtttgaaaggtataggaggaaacctgtacggttgtgctaaagacaaatccatgctgaccttcagtaaaacattgaggtgtttgtatgtttactgttttgcttttattttttaaaggatactgctttcaattgaagggaaaaaaagttgaatagctaagttagtgcttttagtttaaattgcagacatagctgcagagcaggcatgttccagtacaccctcgggaagggcaccctgcggattcttttggtgttgcacaaccttgtcaaaattagataagtttgttaacctttatacatttgtttacctgcaggcttactcttctcttacttatagcggctgatagggttggatttggttgtctcaagttttactggagagggggaaattttataaaaatgtggtagcttaattttctccgcctttagttgctgactggataatgacgcatattcctaagcgttgggatggtgactataggagatcctgcctgccaaccctcttaagacaaataagccctcctgatccttgggaccatcagacatttaggatctaatgcttgaaagtgttgcttc

SEQ ID NO: 9126 - DNA, 1291 bp, Artificial sequence
  DNA replication origin
caggcggggggctgaccccccaacctccctcccggaaggggcggctggccgggcagaggggctcctcacttcccagtaggggcggccgggcagaggcgcccctcacctcccggacggggcggctggccgggcggggggctgaccccccacctccctcccggatggggcggctggccgggcggggggctgacccccccacctccctcccggacagggtggctggccgggcagaggggctcctcacttcccagtaggggcagctgggcagaggcgcccctcactggccgggcggggggctgacccccccacctccctcccggacggggcggctggccgggtggggggctgaccccacacctccctcccagacggcagacggggtggctggcctggcgggggctgacccccacctccctcctggacagggcggctgccgggcggagacgctcctcacttcccagatggggtggctgccgggcgcaggggctcctcacttctcagatggggcggctgccgggcggagggtctcctcacttctcagacggggtggttgccaggcggagggtctcctcccttctcagatggggcggctgggcagaggcgctcctcacatcccagacggggcggtggcgcaaaggcactccccacatctcagacgatgggcggctgggcagagacgctcctcacttcctagatgggatggcggccgggaagaggcgctcctcacttcctagatgggatggcggccgggcagagacgctcctcactttccagactgggcagccaggcagaggggctcctaacatcccagatgatgggcggccaggcagagacgctcctcacttcctagacggggtggcggccgggcagaggctgcactttgggaggccaaggcaggcggctgggaggtggaagttgtagcaagccgagatcacgccactgcactccatcttgggcaccattgagcactgagtgaaccagacactgtctgcaatcccggcacctccggaggccccttgcattttcatattgcaaatgtgatacgaggtcactagtatttttttttttttttttttgagatggagtttcgctcgtcagccaggctggagtgatctcggctcactgcaacctccacctcctgggttcaagtaattctcccgcctcagcctcctgagtagttgggattacgggtaaccgccaccatgcccagctagtttttgtatttttaatagagacggggtttttccatgttggccaggctgctctcgaactcctgacctcaggtgatcca

SEQ ID NO: 9127 - DNA, 932 bp, Artificial sequence
  DNA replication origin
cgggagggaggtggggggtcagccccccgcccggccagccgccccgtccgggagggaggtgggggggtcagccccccgcccggccagctgtctcgcccgggaggtgaggggcgcctctgcccggctgcctgtactgggaagtgaggagcccctctgcccggccagccgccccgtccgggagggaggtggggggtcaggcccccgcccggccagccgccccgtccgggaggtgaggggcgcctctgcccggccacccctactgggaagtgaggagcccctctgcccggccagccgccccttccgggagggaggttggggggtcagccccccgcctggccagccgccccgtccgggagggaggtggggggtcagccccccacccggtcagccgccccgtccgggagggaggtgggggggtcagccccctgcccggccagccgcctcgtccgggaggtgaggggcgcctctgcccggccgcccctactgggaagtgaggagcccctctgcccggccaccaccccgtctgggaggtgtgaccaacagcccattgagaacgggccatgatgacaatggtggttttgtggaatagaaagcggggaaaggtgggaaaaagattgagaaatcggatggttgccgtgtctgtgtggaaagaagtagacatgggagacttttcatttttttctgtactaagaaagattctgccttgggatcctgttgatctgtgaccttaacccccaaccctgtgctctctgaaacatgtgctgtgtccactcagggttaaatggattaagggcggtgcaagatgtgctttgttaaacagatgcttgaaggcatcatgctcgttaagagtcatcaccactccctaatctcaagtacccagggacacaaacactgcggaaggccgcagggtcctctgcctaggaaaaccagag

SEQ ID NO: 9128 - DNA, 956 bp, Artificial sequence
  DNA replication origin
gggttcagccccccgcccggccagccgccccgtccgggagggaggtgggggggtcagccccccgcccggccagccaccccgtctgggaggtgaggggcgcctctgcccggccgcccctactgggaagtgaggagcccctctgcccggccagccgccccgtccaggagggaggtgggggggtcagccccccgcccggccagccgccccgtccgggagggaggtggggggggtcagccccccgcccggccagctgccccgtccgggagggaggtgggggggtcagccccccgcccggccagccgccccatcccggaggtgaggggcgcctctgcccggcggcccctactgggaagtgaagagcccttctgcccggccagccgccccgtccgggagggaggtgggagggtcagccccctgcccggccagccgccccgtccgggaggtgaggggcgcctctgcccagccgcccctactgggaagtgaggagcccctctgcccggctaccaccccgtctgggaggtgtgcccaacagctcattgagaacgggccatgatgacaatggtggttttgtggaatagaaagcggggaaaggtggggaaaagattgagaaatcggatggttgccgtgtctgtgtagaaagaagtagacatgggagacttttcattttgttctgcactaagaaaaattattctgccttgggatcctgttgatctgtgaccttacccccaaccctgtgctctctgaatcatgtgctgtgtccactcagggttaaatggattaagggcggtgcaagatgtgctttgttaaacagatgcttgaaggcagcatgctcgttaagagtcatcaccactccctaatctcaagtaatcagggacacaaacactgcggaaggccgcagggtcctctgcctaggaaaaccagagacctttgttcacttgtttatctgctgaccttcc

SEQ ID NO: 9129 - DNA, 1332 bp, Artificial sequence
  DNA replication origin
gggggctgacccccccacctccctcccggacggggcggctggccgggcggggggctgaacccccacctccctcccggacggggcggctggccgggcagaggggctcctcccttcccagtaggggcggccgggcagaggtgcccctcacctcccagacggggcggctggccgggcggggggctgatccccccacctccctcccggacggggcggctggccgggcggggggctgacccccccacctccctcccggacggggcggctggccgggcggggggctgacccccccacctccctcccggacggggcggctggccgggcagaggggctcctcacttcccagtaggggcggccgggcagaggcgcccctcacctcccagacggggcggctggccgtgccgggggctgacccccccacctccctcccggacggggcggctggctgggcggggggctgaccccccccacctccctcccggacggggtggctgcagggcggagaggctcctcacttctcaaacggggcagctgccgggcggaggggctcctcacttctcagagggggtggttgccaggcagagggtctcctcacttctcagacagggcggccgggcagagaagctcctcacctcccagacggggtcgcagccgggcagaggcgctcctcacatcccagatggggtggcagggcagaggcgctccccacatctcagatgatgggtggcagggcagagacgctcctcacttcctagatgtgatggcggctgggaagaggcgctcctcacttcctagatgggatggcggccgggcggagatgctcctcactttccagactgggcagccaggcagaggggctcctcacatcccagacgatgggcggccaggcagagacactcctcacttcccagatggggtggcggccgggcagaggctgcaatctcggcactttgggaggccaaggcaggcggctgggaggtgtaggttgtagcgagccgagatcacgccactgcactccagcctgggcaccattgagcactgagtgaacgagactccgtctgcaatcccggcacctcgggaagccgaggctggtggatcactcgcggttaggggctggagaccggcccggccaacacagtgaaaccccgtctccaccaaaaccagtcaggcgtggcggcgcgtgcctgcaatcgcaggcactcggcaggctgaggcaggagaatcaggcagggaggttgcagtgagccgagatggcagcagtacagtccagcttcggttccgcatgagagggagaccatggaaagagagggagaccgtggggagagggagagggag

SEQ ID NO: 9130 - DNA, 970 bp, Artificial sequence
  DNA replication origin
aaaaagagcctaaacgctatctgatttgggataaagaaaaaggagcattaaccttgactatgcctttggctccagccacctttttaagagtaaattgctgggcaggtgggggagggctagtcacagaaggaaactgcaagccggatcaggtgtgaggaggggaggtgataaaaggattatagggtggaggagcggaggctgaggaagaattgggacctagctcggcctggcgaggagcagcctgggggggaggggagagatcagatgggtctgtagaaaaggaagattagaaagactcagcgacgcttggggttgggactgaggggagaggtgggagggaaagaaggaagatttgggatgagttgcactgggcacagagactaggaagggactgatgtgtaaaagaatgcctggacgtcaggcacctcagaccatttgcctattttacaacaagaattatttagatcttgtaggatggaaaaattgaaagtgccattttccggctatttggaactactgtcgagtttgtattggggtcaagcagcattgcagaagaaaataagatgcttagattttaggtcaggtgagagttgaagaggttttaagttcttaagaacacaggctaagggagaagaaggaggaatggagggtggaaggttgcccatagtgaaggaagcaagcccagagaaaagtgagagtagagacacggagggaaggggttcgggggttcttaccctccagaaaagcgggaaaggggtcagggcacagagatacgaggtcggggcacagaaataagggattggggcgcagagatacaaggttgaggtagttgcccctcccccacaaaacgggacttgccgctcagggttaaggagaaggggttgggggtttcttcccccccagaaaggtggagaaggggtagagacatagagagaaggggttggggtacttgccccttccccaggaaagt

SEQ ID NO: 9131 - DNA, 952 bp, Artificial sequence
  DNA replication origin
cgtacctcggggcgccccggccgctgcaggccctgggctcccgggagcgcggcccagcgcgatcgctcctgcaccccggcggtggcggcagcagcgggagcaggacctggaggcggcggtggggaagagggggcgggggtttaacggcgtctcgagaacacgtgactgttccggggacccccgagaccctgctccaaggcgcctgctccgcgccagcctcttccaaagccgggggccgggggcgtcccagacctacgccgctgtttgggcgctctagggagaagccacagggccccgggatgtcgtcccttcaccctggcctcgggtcccaggccgaccaagttaacttgatgggcaaatcgagttttgccggtccagccctcaaccctgtgtagtgaactctgagaagtcttggactggtgtgaggatggctgtgcccctaagttcttagtattcctgagaacaagcttcgactctcaggttttatctttgtttggggtgggggacggtggggggtggtgtggtgatagaaagaaagaaagaaaaaagacaaaacactgctcttcctttgcacctctttgaagtaaggaagagtggaggtggggaggctgacccaatgttcaggagaggcaacagcgtctgcggtaatgagcccagcagaatagaagggaagtttccccactccaaggagtggcagctgtgggtgtgggcaagtggcaggagcaggggagtgaagctgaaatgaaatcaacgctgctcaagactatattcaatagcaaagagaagacgaagggctaaaaacgaattgtcacaggttaaaaaaaaaaaaagacgggaaaaaagcccacacaaaagaagaagagaaaacctgtccttctgttccttcccaacatgatttccatccctaatgtttccaaatctgtattgcgcaggtttgctttatttttagcta

SEQ ID NO: 9132 - DNA, 863 bp, Artificial sequence
  DNA replication origin
ccaccccgtctgggaagtgaggagtgtctccgcccggcagccaccccgtccgggagggaggtgggggtcagcccccgccaggccagccgccctgtccgggaggtgaggggcgcctctgcccggcagcccctactgggaagtgaggagcccctctgcccggccagccgccccgtccgggagggaggtgggggtcagcccccgccaggccagccgccctgtccgggaggtgaggggcgcctctgcccggcagcccctactgggaagtgaggagccccccgcccggccagccgccccgtccgggagggaggtgggggggtcagccccccgcccggccagccgccccgcccgggaggtgaggggcgcctctgcccggccgcccctactgggaagtgaggagcccctctgcccggccaccaccccgtctgggaggtgtgcccagcggctcattgagaacgggccatgatgacaatggcggttttgtggagtagaaaggggggaaaggtggggaaaagattgagaaatcggatggttgccgtgtctgtgtagagagaggtagacatgggagacttttcattttgctctctactaagaaaaatctttatcctgttgatctgtgaccttacccccaaccctgtgctctctgaaacatgtgctgtgtccactcagggttaaatggattaagggcgatgcaagatgtgctttgttaaacagatgcttaaaggcagcatgctcgttaagagtcatcaccactccctaatctcaagtacccagggacacaaacactgcggaaggccgcagggtcctctgcctaggaaaaccagagacctttgttcacttgtttatctgctgaccttccccccact

SEQ ID NO: 9133 - DNA, 1606 bp, Artificial sequence
  DNA replication origin
cccacctttcccccctttctactccacaaaaccgccattgtcatcatggcccgttctcaatgagccgctgggcacacctcccagacggggtggtggccgggcagaggggctcctcacttcccagtaggggcggccgggcagaggcgcccctcacctcccgggcggggcggctggccgggcggggggctgacccccccacctccctcccggacggggcggctggccgggcggggggctcctcacttcccagtaggggctgccgggcagaggcgcccctcacctcccggacagggcggctggcctggcgggggctgacccccacctccctcccggacggggcggctggccgggcagaggggctcctcacttcccagtaggggctgccgggcagaggcgcccctcacctcccggacagggcggctggcctggcgggggctgacccccacctccctcccggacggggtggctgccgggcggagacactcctcacttcccagacggggtggctgccaggcggagggtctcctctcttctcagacggggcggccgggcagagacgctcctcacctcccagacggggtcgcagccgggtagaggcgctcctcacatcccagccggggcggcggggcagaggcgctccccacatctcagacgatgggcggccgggcagagacactcctcacttcctagatgggatggcggccgggaagaggcgctcctcacttcctagatgggatggctgccgggaagaggcgctcctcacttcctagatgggatggcggccgggcagagacgctactcactttccagactgggcagccaggcagaggggctcctcacgtcccagacgatgggcggccaggcagagacgctcctcacttcccagacggggtagcggccgggcagaggctgcaatctcggcactttgggagaccaaggcaggcggctgggaggtggaggttgtagcgagccgagatcacgccactgcactccagcctgggcaccattgagcactgcgtgaacgagactccgtctgcaatcccggcacctcgggaggccgaggctggcggatcactggcggttaggagctggagaccagcccggccaacacagcgaaacctcgtctccaccaaaaaaatacgaaaaccagtcaggcgtggcggcgcgcgcctgcagtcgcaggcactcggcaggctgaggcaggagaatcaggcagggaggttgcagtgagccgatatggcagcagtacagtccagcttcggctcggcatcagagggagaccatggggagcgggagagggagagggagagtagagggttcattttgtagtttattttctaatttgaataatggatcatacttgttttcactgactgacatgttgatagaaaaatgtatgctttatttctgctttcaacctttttcaacatctcttacaatcaaaatagtcaaagatcaatggtatcgtacctgaaagactgtagagtatgatatattctcttgctttattcttggcgggtacttctaataaagagtgtgactccatttttgatgtttgctgacaacttttaatcctcacccctctctcttcttctgctccacatcc

SEQ ID NO: 9134 - DNA, 1545 bp, Artificial sequence
  DNA replication origin
tctcgggcttcagaacgcaggcaccgaccaacacagccagcaccattccagccgcggacgccggcactgcccgcccgccgagccgcgttccatccgccccggagggggcgccgcgctctcctcaccgcgcgccaccacctgcggcggcggcccccgcggccatggcccgctcggccgggcgcgctccgtctactgcgcggctcccgcgctcgcccgagtgcggggcggcggcgacgggaccggcgggcgcgcgggctcggccacttccgggttcggccccggccggcgccgacgctgtgacgggactgcgatgcggcctcccgcggcggccgagtacccctccctcggcgcctccccttcctcctgctgctgctgctgccgctgccgctgccgcttctgcttctggaggcgggcgggcgggcgccagccgggtgcggggcgggcgtgcccagacgctggcccgcaggccgggacgcgggcggcggccgcccacagcgggtctctggatcgccgggacgggggcgctggaaaatgggagcggagggggttctccgtgcagaaaaagggcggccgaacgcacggcgtaataatgctcggtatccacttgctgctctgcttcgcgggcgtgtacacgttattcttttcatttgtgcctgtacccagggagatgggaagggtaggcataaccaaccagtgtccttacaaagggtggcactgaggcaagaagaagtgatttgcctgtccagtgtcccaggcaggaagcaggctctccctcctcagtatgctagccattccttggacaagtgaagtgagcacctgctaagcaaggttttagtgctgcggctgtgacagcaaaaccaagtctttctgcttgtggagctgtccatctagacggggtgacggaaacagtaagtgatgcttaccatgaagaaacataaatgaggatgaggagagggaaagagattttagaaagagtggtcagagaaggcctctcaaaaggcatgagttaaagagatggaataacaggggctttgagtaatgcaaagaatgcctagggcagagggaagagcagcgtggagactgctaagcaagatcctgcctgccttgttgaggaacgggaaggagaacagtgcagctggtggttctccaagtatgcccgctggaagcagtagcacctgcgaacttgttagagatgcgaattttccagtcccactttagccctactgaaccagaaactctgggggtggggcccagcagcgtgtgctttaacaagctttccagatgatgcttgctggggccgcgagggtgggagaccctctaatgaagcagagtgaggtcaggaggacggcggcaggaatgggtgtggcgaggagtaatcacagatcacccaggccttgcaggccgtgataaaggacttggcttttactgagattagaagcaattagaaagtggtgagtagcttgatctgatcattaaaaggatgacttttctgggatttgtttgaaaatatcccacaaaaagaaggacagaggtcgggcgccgtgg

SEQ ID NO: 9135 - DNA, 1177 bp, Artificial sequence
  DNA replication origin
cactcattcagccggggaaggtgaggcgagtagaggctggtgcggaacttgccgcccccagcagcgccggcgggctaagcccagggccgggcagacaaaagaggccgcccgcgtaggaaggcacggccggcggcggcggagcgcagcgatggccgggcgagggggcagcgcgctgctggctctgtgcggggcactggctgcctgcgggtggctcctgggcgccgaagcccaggagcccggggcgcccgcggcgggcatgaggcggcgccggcggctgcagcaagaggacggcatctccttcgagtaccaccgctaccccgagctgcgcgaggcgctcgtgtccgtgtggctgcagtgcaccgccatcagcaggatttacacggtggggcgcagcttcgagggccgggagctcctggtcatcgagctgtccgacaaccctggcgtccatgagcctggtaagggcgctgccccctgacagccctgggggcatcccggaggggggcggcagagggtgggactggtggcggtgggggaaggagggagggatgggcccaggggtgcctcttggtaaaaggtatctaaggtggaaggtgggaagtggagggagggatggaaatggggaagaacccgacttagagcgccagtggcccaatttctgctttcccgtcccatccccccagcaccaatcccatctccccagaccttaggccaccctctagtaagtataggcttgggaggctggggtggcgggggatgggggggatagcaatacagaaaaaacaaatcctgacgcacgcaaccccagcggtcgctctcactttgctgtgtgaaaaacccaaaggaatgattgcgagtcccccgcaaggggggttggtcttccttgctgacaagagtagaaagataaggtgcagaaggcagtgattgagaggaaaggagaacgagggagaaagagtcatttatcatgttttctctaatttccagaggaccagtttattggctctgtgtacccatctctacctgtgtgtgtatacgtattaggtacactcgctgctgtggatgcttggggaatcttagggatattgccaatctggggtggtggtgtataaagatacgttggtgcccctcctcctaccagggtgaaaagtggtttctgacttttgaaaccagattttgaaac

SEQ ID NO: 9136 - DNA, 1216 bp, Artificial sequence
  DNA replication origin
gaggttactttagtcctgttgtggggtttgagggccggaatttaatttttggatttttatttaatgtcaggagcagattgggtaataaaatgtgtattgagaataagatggccttttgactttttagggtctagggctgtaaagcgtctcagtgttgctgccaaacaagccatgaactgggctggatttttatatttgatgaaaaagagcctaaatgctatctgatttgggataaagaaaaaggagcattaaccttgactatgcctttagctccagccgcctttgtaagaataaatcgctgggcaggtgggggagggctagtcacagaacgaaactgtaagccggaccaggtgtgaggagcagaggtgataaaaggattatagggtggaggagcggaggctgaggaagaattggaacctagcttggcctggcgaggagcagcctggggaggaggggagaggtcagatgggtctgtagaaaaggaagattagaaagactcagtgacgcttggggttgggactgaggggccaggtgggagggaaagaaggaagatttgggatgagttgcattgggaacagagactagagagggaccgatgtgtaaaagaatgcctggatgtcaggcacctcagaccatttgcctatttgacaacaagaattatttagatcttgcaggatggaaaaattgaaagtgccattttctggctatttggaaccactgtcaagtttgtattggggtcaagctgcattgcagaagaaaataaggcatttaggttttaggtcaggtgtgagttgaagaggttttaagttcttgagagcacaggctaagggagacggaggactggagggtggaagattgcccatagtgaaggaggcaagcctagagaaaagagaaagtagagacacggagggaaggggttcaggggtttcttaccttccagaaaagtgggaaaggggtcaaggcatggaaataaggggttggggtgcagagataagaggtcagggtgcagaaataagggattggagcgcagagataagaggtcggggcatggaaataagggattggggcacagagataagaggtcggggcatggaaataagggattgggggttctttcctccaagaaaagcgggacttgccactaagggtgaaggagaaggggttggtgtacttgcccctcccccagaaaagcgggacttgatgctaagggtgaagg

SEQ ID NO: 9137 - DNA, 1279 bp, Artificial sequence
  DNA replication origin
gctggggtttgtctcacagtggaggcaaggaattgcaacttttttctattattgtacaccttgaaggtgaggttaattaaatcctgttgtgcggtttgagggctggaacttaatttttggagttttatttaatgttgggggcagattgggtaataaaatatattttgagaataagacggccttttgacattttagggtctagggctgtaaagtgtctcagggttgctgccaaacaagccatgaactgggctggatttttatatttgatgaataagagcctaaacgctatctgatttgggataaagaaaaaggagcattaaccttgactatgcctttagctccagccgcctttttaagagtaaattgctgggcaggtgggggagggctagtcacggaacgaaactgtaagccggaccgggtgtgaggaggggaggtgataaaaggattatagggtggaggagcagaggctgaggaagaattgggacctagctcggcctggtgaagagcagcctgggaaggaggggagaggtcagatgggtctgtagaggaagattagaaagactcagcgacacttggggttgggactgaggggacaggtgggagggaaagaaggaagatttgggatgagttgcattgggaacagagactagagagggacagctgtgtaaaagaatgactggtcgtcaggcacctcacaccatttgcccattttataagaattatttagatcttgcaggatggaaaaattgaaagtgccattttctggctacttggaaccactgtcaggtttgtattggggtcaagcagcattgcagaagaaaataagatgcttagatttcaggtcaggtgagagttgaagtggtttcaagttcttaagaacacaggctaagggagaagaaggaggaatggaaggtggaagcttgcccatagtgaaggaggcaagcccagagaaaagagtagagacacggagaaggggtagggggttcttgccctccagaaaagcagagaagaggttggggtgcagagatatgaggtcggggcgtggaaatacaggatcagggctcagagatgtaagaggttggggcttggaaataagggattggggcacagagataagatgtcggggcagggaaataagggattggggcacagagatacgaggttggggtacttgcccctctcccagaaaagcgggacttgctgttaagggtgaaggagaaggggttgggggtttcttgccccccagaaaggtggagaaggtggagaaagggagagaagg

SEQ ID NO: 9138 - DNA, 1645 bp, Artificial sequence
  DNA replication origin
aagctttaccacttcccagttctctttcttcattccagcagaagcctggaaggtgtgtatgaggaaggcatgaagctaggccctctgaggaactcacacgcgcgcacctcatgaaggccacctggaggtcacgtggtgtgggggcaaggtcacagaccacgaggctcaacaacaacagtgctttgcctgtcaccactgctttctagttatgtgaccttcaattacttcacctcttggttccttggtgtccttgtctataaattggacataattcacttcttagtgaggttcattatgatgatgattaaatgaggtaaagtgcccagcagacgccgggcacataggacatatgcaaaaattggtagttccctttctaacccagcgtccatcctcagggaactcatcattttctagcaggcatgatattctaggtgacgtgagtgctgtaaacaagaacgctgggagttcagagaaagagcacagaatagtgcctgggctgaccgtggaagatagcgtatcaagaaaagatggataggagtttcctaaggagtgaaaactatgactaaggtacaggcatggaaaacaagcagggagagagagtccccactttctctgtgtcctaggggaggcttccttgccaccatccttaaaattgcagccccccgggaagtcccatcacagcccgtgcccctcccctgcttgatgactttcctgcttcactcaccaccgtatcatgtacttatttctcttctgtgtcctcacaagatcagaggggtatgtgtgtgtgtgtgtgtggtgtacgtagtggatgtgggtatggtgtgtgggggggtatggtgtgcgtgtgtggtgtgtgtggtgtgtcgtgtgggtgtggcgtgtgtgtggtggtgtggtgaggtgtgtatgtgtggtgtgtgtatgtgcagtgggtgtggcagggtgtgtgtggtgtgtgtgtgggtgtgatgtgtgtggtgtgggtacggtgtgtgcgtggtgtgggtatgtgtagcatgggtatagtgtgtggtgtgtgtgtgtggtgtgggtgtgtgtaggtgcgtgtgtggtggggtgagtatggatgtgtttggggtgtttatggtgggtgtgtgtgtgtgtgtggtggggtgagtatggatgtggtgtgtggggggtgtgtgtgcatggtgtgtggtggggtgtgtgtgtggtggggtgagtatggatgtgtgtggggtgtgtgtgtgtggtgtgtgtggggtgtgtgtgtggtgtgtggtggggtgtgtgtggtggggtgagtatggatgtgtgtggggggtgtgtgtgtggtgtgcggtggggggtatatgtgtgtggtgggtgtgtggtggggtgagtatggatgtgtgtgggtgtgtgtgtgtgtgtggtgtgctgtggggtgtgtgcgtgtggtagggtatggatgtgtggggtgtgtgtgtggtggggtgagtatggacgtgtgtgggggggtgtggtgtgtggtggggtgtgtgtgtttgtgtgtggtggggtatgtatggatatggtgtgtggggagtgtgtggtggggtgtgtgtgtgtgtcctcttcactgcgtatcccccttacttatggagtgcacaccattagatgtgcaggtgaactcagctctctg

SEQ ID NO: 9139 - DNA, 1059 bp, Artificial sequence
  DNA replication origin
tgctcccgcgggccgggggagggagagggctcgggaaggaaccggccgggtggaaagtgcgctgacgagtctcttgtcctccccgcccccaccctgtcccgagccctgcactcccgactcgcggcccaccctgcacgctgcactccctttaattcacacatttcttccaccagcctcagggccgattccccgcgcctacctcggctctccgggccgcctcccgctgctgcccgattccgcgtccggagcgagcgggagctgcagcgggctccgcggaccgggcgcggggcaggtatcgggctttatacctcgcccgccgggtgactcaggaggctccgagccttcacccgccgcccttcaaaataagagtccggcggcgcggcgggcgggagagaggaggcgtggctcgcagctctgggacgcggcccccaggttagggaggcttccccgcacccactcgtaaccttgtcccgccctttgcatctttctggtcgcaggccccttcctggggcagccaagctacaaatcgggctttcctggaacgatcgagaagtgctaataacgggaaagaatttaagttttttaggcccatagatatgttgtcggcttgttaggatgattctcctccggtgtttgtgtttttttcctttacagactaaagagtgtccaataaacgcgactccagggcagcgttttaggggaaagcaataaaaactcacggtagaatggaagctgccctgaaggaatggaactgcgagactggggctgggactggggctgtggggagggaaagcacatacagtgtaaaaacgattgtgtgacattaaatcgaaaagcacaaatcatcatgcagtatatttcttttctaagaagaggaaggataatttttagatttccattaattagtttactgggttctgtgtaataaaaagctaaattcaggagcccttagggtgagaagagtaaagcatttgatctagcaacatctgaggaacccggtccctatcctatcctgtgatcctcttagctcataaactactggaggccctgagtcactta

SEQ ID NO: 9140 - DNA, 826 bp, Artificial sequence
  DNA replication origin
gcaggcgacgagcagtgggacgcctgtcccgggctcgggagcggcggtggtggcggcggcagtgggaacacgtcgggcaccgggaaggcagccgtggggctgaagaccgggggtggcgggggcgggggcgacggcgaggaggagccccacggggcctcgggctcagcgccgaagggctgcgcgaagggcggcacgggggcgcggccgaactgcctcggcgtcggggacatgggcgacgggaggctggacgagctggggctggaggccggcgtgccgtggcccgacgcgggcccgaggttctgcgcggcgatgaactgcttggggcgcgcgtagttgaaggagccggaggactgcatggcgggggcggagcgggaggccagcgcgctcatgggctccggggacgcgggcggcgtgcaggccgcgagctcggggaaggcgggcggcggcgggaaggggggcgagggcggcgcgctgcgcggggctggcggaggctgccgagcgccggcctcctgctccagtcggatttggttctggagttgctggagcttcagagggtccctggggggaaaaagagaagtgacaccttcagagatggaacggccaggaacgtgtattccaggagtgagctcagcttgtggacatcgcttggcacttaggccagctgcagagaacacccagggaacgggcacacgttagcaggcccaagtgtggggccagcagttcattctggaccaagcgctaagtcagtgaagtatgctcgcccatttcactctcatttaagtttcacataaggtgatcccaaccagtttacaaatcctgatggaaa

SEQ ID NO: 9141 - DNA, 1330 bp, Artificial sequence
  DNA replication origin
aaagtctcccatgtctacttctttctacacagacacggcaaccatccgatttctcaatcttttccccacctttcccccctttctattccacaaaaccgccactgtcatcatagctggttctcaatgagccgctgggcacacctcccagatggggtggtggccgggcagaggggctcctcacttcctagcaggggcggccgggcagaggcacccctcacctcctggacggggcggctggccgggcggggggctgacccccccacctccctcccggacgggtatgctggccgggcggggggctgacccccccacctcccttccggacggggcggctggccgggcggggggctgatccccccacctccctcccagactgggcggctggcctggtggggggctgaccccccaacctccctctcggactgggcagctggcctggcgggggctgacccccacctccctcccggacggggtggctgccgggcggagacgctcctcacttcccagacggggtggctgctgggcggaggggctcctcacttctcagatggggcggttgccaggcagagggtctcctcacttctcagacggggcggccaggcagagacgctcctcacctcccagacggggtcgcagccgggcagaggcgctcctcacatcccagacggggcggcggggcagaggcgctccccacatctcagacgatgggcggccaggcagagacgctcctcacttcctagatgggatggcggccgggaagaggcgctcctcacttcctagatgggatggcggccgggcagagccgctcctcactttccagactgggcagccaggcagaggggctcctcacgtcccagacgatgggcggccaggcagagacgctcctcacttcccagacggggtggcggctgggcagaggctacaatctcggcactttggaaggccaaggcaggcggctgggaggtggaggttgtagcgagccgagatcacgacactgcactccagcctgggcaccattgagcactgagtgaacgagactccgtctgcaatcccggcacctcgggaggccgaggctggcggatcactcgcagttaggagctggagaccagcccggccaacacagcgaaaccccgtctccaccaaaaaaatacgaaaaccagtcaggcgtggtggcgcgcgcctgcaatcgcaggcactcggcaggctgaggcaggagaatcaggcagggaggttgcagtgagcctagatggcagcagtacagtccagcttcggctcggcatcagagggagactgtggaaagagagggagagggagaccatggggagaggga

SEQ ID NO: 9142 - DNA, 888 bp, Artificial sequence
  DNA replication origin
ctgcctggccgccccgtctgagaagtgaggagaccctctgcctggcaaccgccccatctgagaagtgaggagcccctccgcccagcagccaccccgtctgggaagtgaggagcgtctccgcccggcagccaccccgtccgggagggaggtgggggtcagcccccgccaggccagctgcccagtccgagagggaggttggggggtcagccccccaccaggccagccgcccagtctgggagggaggtggggggatcagccccccgcccggccagccgccccgtccggaagggaggtgggggggtcagccccccgcccggccagcatacccgtccgggagggaggtgggggggtcagccccccgcccggccagccgccccgtccaggaggtgaggggtgcctctgcccggccgcccctgctaggaagtgaggagcccctctgcccggccaccaccccatctgggaggtgtgcccagcggctcattgagaaccagctatgatgacagtggcggttttgtggaatagaaaggggggaaaggtggggaaaagattgagaaatcggatggttgccgtgtctgtgtagaaagaagtagacatgggagacttttcattttgttctgtactaagaacaaattcttctgccttgggatcctgttgatctgtgaccttacccccaacccagtgctctctgaaacatgtgctgtgtccactcagggttaaatggattaagggcggtgcaagatgtgctttgttaaacagatgcttgaaggcagcatgctcattaagagtcatcaccactccctaatctcaagtacccagggacacaaacactgcggaaggctgcagggtcctctgcctaggaaaaccagagacctttgttcacttgtttat

SEQ ID NO: 9143 - DNA, 738 bp, Artificial sequence
  DNA replication origin
taccacgggtttgactccgtcctgtctcgggcgacgcccgtaagacaggtcgacactaccccgacgaaacaaacaaactggtttctgagccccgtagaaacggcggggtgcagcagggggagtgcctccgttaccgcctctccaacttcacagaggtcgttgctagtggccacggcggggtggggacgggcggcgttcgggactgggaagctacttgactgccacgtgctcctgcctcgcaacagcggctctagattccgagttatggggacaactgctcgagaggccagggtagggtaaggactccgcaacctagggtcccaaaaccctggagcgaatgcggactaagggagagcggccggcgcgtcaccggcgctggcgtgtgacgtcagcgcgtggaaggcggcacgcagcggaggcggctgggaaggagcagtgaggctgggctagaaccgtagggtcgggcggggtgctgtgcgaaggggcgggcggggtgctgtgcgaagggacgggaggggcgggctctgcaggcgggaagacagaaaggacgagacgggagagatgaaaaggatggagagagtgtaaagctgttaagagtcatgcagagatgcgggagagaactcactagttgaaaccaatttggaatataaagcatataaaattttcccacagctactacaccgagaaagggacttttttattttacatgaaagcgcactacttagggatgccacattt

SEQ ID NO: 9144 - DNA, 1316 bp, Artificial sequence
  DNA replication origin
gagttgacatagcacatgtttcagagagcagggggttgggggtaaggttatggattaacagcatcccaaggcagaagaatttttcttagtacagaacaaaatggagtctcctgtgtctacttctttctacacagacacagtaacaatctgatctctcttttccccatatttccccttttctatttgacaaaactgccatcctcaccatggcccgttctcaatgagctgttgggtacacctcccagacagggtggcggccaggcagaggggctcctcacttcccacactgggcggccgggcggaggcgccccccacctcccagacggggcggctgccgggcgggggcgccccccacctcccagactgggtggccgggcggagacgctcctcacttcccagatggggcggctgccgggcggaggggctcctcacttctcagatggggtcgcggctgggcagaggtgctcctcacctcccagacagggtggcggctgggcagagacgctcctcacctcccagacggggcagccgggcagaggcgctcctcacatcccagagggggcggccgggcagaggcgctccccacgtcccagacgatgggcggccgggcagagacgctcctcacttcctagacgggatggcggcggggaagaggcgctcctcacttcctagatgggatggcggccgggaagaggtgctcctcacttcctagactgggcggccgggcagaggggcttctcacatcccagacgatgggcagtcaggcagagacgctcctcacttcctagacggggtggcggccgggcagaggctgcaatctcagcactttgggaggccaaggcaggcggctggcaggtggaggttgtagcgagccgagatcacgccactgcactccagcctgggcaacattgagcactgagtgagcgagactccgtctgcaatcccggcaccttgggaggccgaggcgggcagatcactcgaggtcaggagctggagaccagcccggccaacacggcaaaaccccatctccaccaaaaaatacaaaaatcagtcaggcgtggcggcgcgtgcctgcaatcccaggcactcggcaggctgaggcaggagaatcaggcagggaggttgcagtgagctgagatcgcggcagtacagtccagccttggcaacagagggagaccgtggaaggcgggagtcggagacgagggagagggggagaccgtggaaagcgggaggtggagacgagggagagggagagggattatttctgtatgacttaataatgaatttctaagaaggtcacttagctcactgttgtc

SEQ ID NO: 9145 - DNA, 1036 bp, Artificial sequence
  DNA replication origin
tgtctacttctttctacacagacacagtaacaatctgatctctctttcttttccccatatttcccccttttctattcgacaaaaccgccatcgtcatcatggcccgttctcaatgagctgttgggtacacatcccagacagggtggcggcccggcagagggtctcctcacttcccagatggggcggccgggcagaggcgccccccacctcccagacggggcagtggccaggcggagacgcccccccacctccctcctggacggggcggctggcccggtgggggctggccccccacctccctcccggatggggcagctggcggggcgggggctgccccccacctcctggacggggcggctgccaggcagaggggctcctcacttcgcagacggggcggctgccgggcggagaggctcctcacttcccagacggggcggctgccaggcggaggagctcctcacttctcagacagggcggccaggcagagacgctcctcacttcctacaggcgatggcggccgggaagaggcactcctcatttcccagactgggcggccagtcagaggggctcttcacatcccagatggtgggcagccaggcagagacgctcctcacttcccagacgggtggcggccgggcagaggctgcaatctcggcactttgggaggccaaggcaggcggctggcaggtggaggttgtagcgagccgagatcacgccactgcactccagcctgggcaacattgagcactgagtgagcgagactccgtctgcaatcccggcacctcgggaggccgaggcaggcagatcactcgcggtcaggagctggagaccagccccgccaacacggcgaaaccccgtctccaccaaaaaatgcaaaaaccagtcaggtgtggcggcgtgcgcctgcaatcccaggcactctgcaggctgaggcaggagaatcaggcagggaggttgcagtgagcccagatggcggcagtacagtccagcctcggctttcacaactttggtggcatcagagggagaccggggagag

SEQ ID NO: 9146 - DNA, 792 bp, Artificial sequence
  DNA replication origin
agtgcctcttcccggccgccatcgcctgtaggaagtgaggagcgtctctgcctggccgccctgtctgagaagtgaggagctcctccgcctggcagccgccccgtctgggaagtgaggagcctctccgcccggcagccgccccgtctgcgaagtgaggagcccctctgcctggcagccgccccgtccaggaggtggggggcagcccccgccccgccagctgccccatccgggagggaggtggggggccagcccccaccgggccagccgccccgtccaggagggaggtgggggggcgtctccgcctggccactgccccgtctgggaggtggggggcgcctctgcccggccgccccatctgggaagtgaggagaccctctgccgggccgccaccctgtctgggatgtgtacccaacagctcattgagaacgggccatgatgacgatggcggttttgtcgaatagaaaagggggaaatatggggaaaagaaagagagatcagattgttactgtgtctgtgtagaaagaagtagacatgggagactccgttttgttctgtactaagaaaaattcttctgccctgggatgctgttaatctataaccttacccccaaccccatgctctctgaaacatgtgctgtgtccactcagggttaaatggattaagggaggtgcaagatgtgctttgttaaacagatgcttgaaggcagcatgctcattaagagtcatcaccactccctaatctcaagtacccagggacacaaacactgcagaaggccgcagggtcctctgtcta

SEQ ID NO: 9147 - DNA, 935 bp, Artificial sequence
  DNA replication origin
gccccgctgcccccgcccgcggctgccgcgaaaacccggcggctacacccgcgcctccgcgccgcccggcgagccgcactgggcatgctcggccccggccggcccaggctcctgtaggtgggaagctccgcgctcccggcagccggcggcgcagctcgcaacgctgtgaggcgccggcggaggcggctcgcccgcagtaggcgctaccgggcgtccggcgcagagtgcggcgcagcggccgctgtcgggctggccatggcgaggggtgcacggcggccacctgagtggcgcggcggtgtcaggttagcgggggcccccggcgggccggggcggaggggcacgggtgggagccagccccgcaccgggtcggcggccgagtcggcgccggggccgccgaactttcgggtgtttgggctggctgagactgcggcggaggctgcgctgcgagacgccgcagggtccgggcagcgggctccagggggtcgcaggatgcttcgagatccgtgcggggcgggggctggccgtttggggactgccgcatcctgggctcgaaccgtaaccttccgagggcgaggagcgcggaatccactgccagctgccggcgagcctcctaggtgtcgtgggggaaggggacgccgaacagccgtgggggctttcgctgggctctggatctctctcatcgctgtgcctcagtttacccggacagggaggagcgtgcgctggccagggctccggagaacgtgaatgcgggttccgcgtcgggagggcgccgtgtcctgatgccgcaggagtgcgggcggctgtgggtgctgcgagccgccgcctcgctactgaagctctcggagtttgtcgcatttgactccataacaagttgacatcgaattgcttcatggcgtggaatggggaaacgtgcttcatcggattaaaatacagag

SEQ ID NO: 9148 - DNA, 1222 bp, Artificial sequence
  DNA replication origin
taggggcagccaggcagaggcgcccctcacctcccggacagggcggctggccgggcacggggctgaccccccccccccacctccctcccggacggggtggctggccgggcagaggggctcctcacttcccagtaggggcggccgggcagaggcgcccctcacctcccggacggtgcggctggtcgggcggggggctgacgcccccacctccctcccggacggggtggctggccgggcagggggctgacccccccacctccctcccggacggggcggccagccaggcagagcggctcctcacttcccagtaggggcggccgggcagaggcgcccctcacctcccggactgggcggctggccgggcggggggctgaccccccccacctccctcccggacggggcggctggccgggcggggggctgacccccccacctccctcccggacgaggtggctgccgggcggagacgctcctcacttcccagacggggtggctgctgggcggaggggctcctcacttctcagacagggcggctgccgggcggaggggctcctcacttctcagatggggcggttgccaggcagagggtctcctcacttctcagacagggcggccgggcagagatgctcctcacatcccggaccgggcggcagggtagaggcgctccccacatctcagacgatgggcggccgggcagagacactcctcacttcctagatgggatggcggctgggcagagacgctcctcactttccagactgggcagccaggcagaggggctcctcacatcccagtcgatgggcggccaggcagagacgctcctcacttcccagactgggtggcggccgggcagaggctgcaatctcggcactttgggagaccaaggcaggcggctgggaggtggaggttgtagtgagccgagatcacgacactgcactccagcctgggcaccattgagcactgagtgaacgagactccgtctgcaatcccggcacctcgggaggccgaggctggcggatcactcgcggttaggagctggagaccagcccggccaacacagcgaaaccccgtctccaccaaaaaaatacgaaaaccagtcaggcgtggtggcgcgcgcctgcaatcgcaggcactcggcaggctgaggcaggagaatcaggcagggaggttgcagtgagccaagatggcagcagtacagtccagcttcggctcggcatcagag

SEQ ID NO: 9149 - DNA, 1074 bp, Artificial sequence
  DNA replication origin
ctgggaagtgaggagcgtctccgcccggcagccacctcgtccgggagggaggtgggggggtcagccccccgcccggccagccgccccgtccgggagggaggtggggggggtcagccccccgcccggccagccgcccagtccgggaggtgaggggcgcctctgcccggccgcccctactgggaagtgaggagccgctctgcctggctggccgccccgtccgggagggaggtgggggggtcagccccctgcccggccagccaccccgtccgggagggaggtgggggcgtcagccccccgcccgaccagccgcaccgtccgggaggtgaggggcgcctctgcccggccgcccctactgggaagtgaggagcccctctgcccggccagccaccccgtccgggagggaggtggggggggggggtcagccccgtgcccggccagccgccctgtccgggaggtgaggggcgcctctgcctggctgcccctactgggaagtgaggagcccctcttcccggccaccaccccgtctgggaggtgtacccaacagctcactgagaacgggccatgatgacaatggcggttttgtggaatagaaaggggggaaaggtggggaaatgattgagaaatcggatggttgccgtgtctgtgtagaaagaggtagacatgggagacttttcattttgttctgtactaagaaaaattcttctgccttgggatcctgttgatctgtgaccttacccccaaccctgtgctctctgaaacatgtgctgtatccactcagggttgaatggattaagggcggtgcaagatgtgctttgttaaacagatgcttgaaggtagcatgctcgttaagagtcatcaccactccctaatctcaagtccagggacacaaacactgcggaaggccgaagggtcctctgcctaggaaaaccagagacctttgttcacttgtttatctgctgaccttccctccactattgtcctgtgaccctgccaaatccccctctgcgagaaacacccaagaatgatcaataaaaaaataaaataaaataaaataaaataaaataaaaaaagagt

SEQ ID NO: 9150 - DNA, 1270 bp, Artificial sequence
  DNA replication origin
gaaggcaaagttaattaaatcctcttatggggtttgagggctggaatttaatttttgaagttttatgtaatgtcgggagcagattggataataaaatgcattttgagaataagacggccttttgacattttaggatctagggctgtaaagtgtctcagggttgctgccaaacgagtcatgaactgggctagatttttatatttgatgaaaaacagcctaaacgctatctgatttgggataaagaaaaaggagcattaaccttgactatgcatttagctccagccacctttttaagagtaaattgctgggcaggtgggggagggctagtcacggaacgaaactgtaagccagactgggtgtgagaaggggaggtggtaaaaggattatagagcggaggagagaaggctgaggaagaattgggacctagctcagcctggcgagcagcagcctggggaggaggggagaggtcagatgggtctgtagaaaaggaagattagaaagactcagcgacgcttggggttgggactgaggggacaggcgggagagaaagaaggaagatttgggatgagttgtgctgggcacagacactagggagggaccgatgtgtaaaagaatgccaggatgtcaggcacctcagaccatttgcctattttacaacaagaattatttagatcttgcaggatggaaaaattgaaagtgccattttctggctatttggaactactgtcgagtttgtattggggtcaagtggtattgcagaagaaaataagatgcttaggttttaggtcaggtgagagttgaagaggttttaagttcttaggaacacaggctaagggagaagaaggagaaatggagggtggaaagttgcccatagtgaaggaggcaagcccagagaaaagagagagtagagacacggagggaaggggttcaggggttcttaccctccagaaaagcagagaagggtttggggcacagaaatacaaggtcggggtgtggaaataagggattggggtacagagatataagaggttggggcacggaaataagggattggggtgcagagatataagaggttggggcgcggaaataagggatcagggcacagagatataagaggtcaaagcgtggaaataagggatcggggcacagagatataagaggtcagagcgcggaaataagggatcgggcacagagatataagaggtcagagcgcggaaataagggatcggggtgcagagatatgaggttggggtacttgcccctcccccag

SEQ ID NO: 9151 - DNA, 821 bp, Artificial sequence
  DNA replication origin
cccagccgccatcccatctaggaagtgaggagcatctccgcccggccgcccatcgtctgagatgtggggagcgcctctgcccggctgcgaccccgtctgggaactgaggagtgtctctgcccaaccgccaccccgtctgggaggtgaggagcctctgtgcccggctgccctgtctgagaagtgaggagcccctccgcccggcagccgccccgtctgggaagtgaggagcgtctccgcccagccagccaccccgtccgggagggaggtggggggcagcccccgcctggccagccaccccgtctgggaggtggggggcagcccccgcccggcagccgccctgtctgggaggtggggggcacctctgcctggccaccccatctgggaagtgaggggcccctctgcccggccgccaccccgtctgggaggtgtacccaacagctcattgagaacaggccatgatgacgatggcggttttgtcgaatagaaaagggggaaatgtggggaaaagaaagagagatcagattgttactgtgtctgtgtagaaagaagtagacataggagactccattttgttctgtactaagaaaaattcttctgccttgggatgctgttaatctataaccccgtgctctctgaaacatgtgctgtgtccactcagggttaaatggattaagggcggtgcaagatgtgctttgttaaacagatgcttgaaggcagcatgctcattaagagtcatcaccactccctaatctcaagtacccagggacacaaacactgcggaaggccgcagggtcctctgcctaggaaaaccagagaccctt
